(19) United States
(12) Patent Application Publication
(10) Pub. No.: US 2020/0270635 A1
(43) Pub. Date: Aug. 27, 2020

(54) MODULATORY POLYNUCLEOTIDES

(71) Applicant: VOYAGER THERAPEUTICS, INC., Cambridge, MA (US)

(72) Inventors: Jinzhao Hou, Cambridge, MA (US); Xin Wang, Arlington, MA (US); Pengcheng Zhou, Cambridge, MA (US); Xiao-Qin Ren, Cambridge, MA (US); Dinah Wen-Yee Sah, Cambridge, MA (US)

(21) Appl. No.: 16/611,046

(22) PCT Filed: May 4, 2018
(86) PCT No.: PCT/US18/31108

§ 371 Date: Nov. 5, 2019

Related U.S. Application Data
(60) Provisional application No. 62/501,787, filed on May 5, 2017.
(60) Provisional application No. 62/507,923, filed on May 18, 2017.
(60) Provisional application No. 62/520,093, filed on Jun. 15, 2017.

(51) Int. Cl. C12N 15/86; C12N 7/00; C12N 15/113

(52) U.S. Cl. CPC C12N 15/86; C12N 7/00; C12N 2310/531; C12N 2750/14143; C12N 2310/11; C12N 15/113

(57) ABSTRACT

The present invention relates to adeno-associated viral (AAV) particles modulatory polynucleotides encoding at least one siRNA molecules and methods of use thereof.

### CROSS REFERENCE TO RELATED APPLICATIONS

[0001] This application claims the benefit of U.S. Provisional Patent Application No. 62/501,787, filed May 5, 2017, U.S. Provisional Patent Application No. 62/507,923, filed May 18, 2017, and U.S. Provisional Patent Application No. 62/520,093, filed Jun. 15, 2017, the contents of each of which is incorporated by reference herein in its entirety.

### REFERENCE TO THE SEQUENCE LISTING

[0002] The present application is being filed along with a Sequence Listing in electronic format as an ASCII text file. The Sequence Listing is provided as an ASCII text file entitled 14482_155_228_SEQ_LISTING.txt, created on May 3, 2018, which is 6,853,639 bytes in size. The Sequence Listing is incorporated herein by reference in its entirety.

### FIELD OF THE INVENTION

[0003] The present invention relates to compositions, methods and processes for the design, preparation, manufacture, use and/or formulation of AAV particles comprising modulatory polynucleotides, e.g., polynucleotides encoding at least one small interfering RNA (siRNA) molecules which targets at least one gene of interest. Targeting the gene of interest may interfere with the gene expression and the resultant protein production. The AAV particles comprising modulatory polynucleotides encoding at least one siRNA molecules may be inserted into recombinant adeno-associated virus (AAV) vectors. Methods for using the AAV particles to inhibit the expression of the gene of interest in a subject are also disclosed.

### BACKGROUND OF THE INVENTION

[0004] MicroRNAs (or miRNAs or miRs) are small, non-coding, single stranded ribonucleic acid molecules (RNAs), which are usually 19-25 nucleotides in length. More than a thousand microRNAs have been identified in mammalian genomes. The mature microRNAs primarily bind to the 3′ untranslated region (3′-UTR) of target messenger RNAs (mRNAs) through partially or fully pairing with the complementary sequences of target mRNAs, promoting the degradation of target mRNAs at a post-transcriptional level, and in some cases, inhibiting the initiation of translation. MicroRNAs play a critical role in many key biological processes, such as the regulation of cell cycle and growth, apoptosis, cell proliferation and tissue development.

[0005] miRNA genes are generally transcribed as long primary transcripts of miRNAs (i.e. pri-miRNAs). The pri-miRNA is cleaved into a precursor of a miRNA (i.e. pre-miRNA) which is further processed to generate the mature and functional miRNA.

[0006] While many target expression strategies employ nucleic acid based modalities, there remains a need for improved nucleic acid modalities which have higher specificity and with fewer off target effects.

[0007] The present invention provides such improved modalities in the form of artificial pri-, pre- and mature microRNA constructs and methods of their design. These novel constructs may be synthetic stand-alone molecules or be encoded in a plasmid or expression vector for delivery to cells. Such vectors include, but are not limited to adeno-associated viral vectors such as vector genomes of any of the AAV serotypes or other viral delivery vehicles such as lentivirus, etc.

### SUMMARY OF THE INVENTION

[0008] Described herein are methods, processes, compositions, kits and devices for the administration of AAV particles comprising modulatory polynucleotides encoding at least one siRNA molecule for the treatment, prophylaxis, palliation and/or amelioration of a disease and/or disorder.

[0009] The details of various embodiments of the invention are set forth in the description below. Other features, objects, and advantages of the invention will be apparent from the description and the drawings, and from the claims.

[0010] Set forth below are non-limiting embodiments that are representative of the subject matter description herein:

[0011] 1. An adeno-associated viral (AAV) viral genome comprising a nucleic acid sequence positioned between two inverted terminal repeats (ITRs), wherein said nucleic acid when expressed inhibits or suppresses the expression of a target gene in a cell, wherein said nucleic acid sequence comprises, in a 5′ to 3′ order: a first region encoding a first sense strand sequence, a second region encoding a first antisense strand sequence, a third region encoding a second sense strand, and a fourth region encoding a second antisense strand sequence, wherein the first and second sense strand sequences comprise at least 15 contiguous nucleotides and the first and second antisense strand sequences are complementary to an mRNA produced by the target gene and comprise at least 15 contiguous nucleotides, and wherein said first sense strand sequence and first antisense strand sequence share a region of complementarity of at least four nucleotides in length and said second sense strand sequence and second antisense strand sequence share a region of complementarity of at least four nucleotides in length.

[0012] 2. An adeno-associated viral (AAV) viral genome comprising a nucleic acid sequence positioned between two inverted terminal repeats (ITRs), wherein said nucleic acid when expressed inhibits or suppresses the expression of a first target gene and a second target gene in a cell, wherein said nucleic acid sequence comprises, in a 5′ to 3′ order: a first region encoding a first sense strand sequence, a second region encoding a first antisense strand sequence, a third region encoding a second sense strand, and a fourth region encoding a second antisense strand sequence, wherein the first and second sense strand sequences comprise at least 15 contiguous nucleotides and the first antisense strand sequence is complementary to an mRNA produced by the first target gene and the second antisense strand sequence is complementary to an mRNA produced by the second target gene and comprise at least 15 contiguous nucleotides, and wherein said first sense strand sequence and first antisense strand sequence share a region of complementarity of at least four nucleotides in length and said second sense strand sequence and second antisense strand sequence share a region of complementarity of at least four nucleotides in length.

[0013] 3. The AAV viral genome of embodiment 2, further comprising, in a 5′ to 3′ order, a fifth region encoding a third sense strand sequence and a sixth region encoding a third antisense strand sequence, wherein the third sense strand sequence comprises at least 15 contiguous nucleotides and the third antisense strand sequence is complementary to an mRNA produced by a third target gene and comprises at least 15 contiguous nucleotides, and wherein said third sense strand sequence and third antisense strand sequence share a region of complementarity of at least four nucleotides.

[0014] 4. The AAV viral genome of embodiment 3, further comprising, in a 5′ to 3′ order, a seventh region encoding a fourth sense strand sequence and a eighth region encoding a fourth antisense strand sequence, wherein the fourth sense strand sequence comprises at least 15 contiguous nucleotides and the fourth antisense strand sequence is complementary to an mRNA produced by a fourth target gene and comprises at least 15 contiguous nucleotides, and wherein said fourth sense strand sequence and fourth antisense strand sequence share a region of complementarity of at least four nucleotides.

[0015] 5. The AAV viral genome of embodiment 2, wherein the first target gene is the same as the second target gene.

[0016] 6. The AAV viral genome of embodiment 3, wherein the third target gene is the same as the first target gene.

[0017] 7. The AAV viral genome of embodiment 3, wherein the third target gene is the same as the second target gene.

[0018] 8. The AAV viral genome of embodiment 3, wherein the first target gene, the second target gene and the third target gene are the same.

[0019] 9. The AAV viral genome of embodiment 4, wherein the fourth target gene is the same as the first target gene.

[0020] 10. The AAV viral genome of embodiment 4, wherein the fourth target gene is the same as the second target gene.

[0021] 11. The AAV viral genome of embodiment 4, wherein the fourth target gene is the same as the third target gene.

[0022] 12. The AAV viral genome of embodiment 4, wherein the fourth target gene is the same as the first target gene and the second target gene.

[0023] 13. The AAV viral genome of embodiment 4, wherein the fourth target gene is the same as the second target gene and the third target gene.

[0024] 14. The AAV viral genome of embodiment 4, wherein the fourth target gene is the same as the first target gene, the second target gene and the third target gene.

[0025] 15. The AAV viral genome of any one of embodiments 1-14 wherein the first target gene, the second target gene, the third target gene and/or the fourth target gene is Huntingtin.

[0026] 16. The AAV viral genome of any one of embodiments 1-14 wherein the first target gene, the second target gene, the third target gene and/or the fourth target gene is SOD1.

[0027] 17. The AAV viral genome of any one of embodiments 1-14 wherein the first target gene, the second target gene, the third target gene and/or the fourth target gene is Huntingtin or SOD1.

[0028] 18. The AAV viral genome of embodiment 1 or 2, wherein the region of complementarity between the first sense strand and the first antisense strand is at least 12 nucleotides in length.

[0029] 19. The AAV viral genome of embodiment 18, wherein the region of complementarity between the first sense strand and the first antisense strand is between 14 and 21 nucleotides in length.

[0030] 20. The AAV viral genome of embodiment 19, wherein the region of complementarity between the first sense strand and the first antisense strand is 19 nucleotides in length.

[0031] 21. The AAV viral genome of embodiment 1 or 2, wherein the region of complementarity between the second sense strand and the second antisense strand is at least 12 nucleotides in length.

[0032] 22. The AAV viral genome of embodiment 21, wherein the region of complementarity between the second sense strand and the second antisense strand is between 14 and 21 nucleotides in length.

[0033] 23. The AAV viral genome of embodiment 22, wherein the region of complementarity between the second sense strand and the second antisense strand is 19 nucleotides in length.

[0034] 24. The AAV viral genome of embodiment 3, wherein the region of complementarity between the third sense strand and the third antisense strand is at least 12 nucleotides in length.

[0035] 25. The AAV viral genome of embodiment 24, wherein the region of complementarity between the third sense strand and the third antisense strand is between 14 and 21 nucleotides in length.

[0036] 26. The AAV viral genome of embodiment 25, wherein the region of complementarity between the third sense strand and the third antisense strand is 19 nucleotides in length.

[0037] 27. The AAV viral genome of embodiment 4, wherein the region of complementarity between the fourth sense strand and the fourth antisense strand is at least 12 nucleotides in length.

[0038] 28. The AAV viral genome of embodiment 27, wherein the region of complementarity between the fourth sense strand and the fourth antisense strand is between 14 and 21 nucleotides in length.

[0039] 29. The AAV viral genome of embodiment 25, wherein the region of complementarity between the fourth sense strand and the fourth antisense strand is 19 nucleotides in length.

[0040] 30. The AAV viral genome of embodiment 1 or 2, wherein the first sense strand sequence, the second sense strand sequence, the first antisense strand sequence, and the second antisense strand sequence are, independently, 30 nucleotides or less.

[0041] 31. The AAV viral genome of embodiment 3, wherein the first sense strand sequence, the second sense strand sequence, the third sense strand sequence, the first antisense strand sequence, the second antisense strand sequence and the third antisense strand sequence, are, independently, 30 nucleotides or less.

[0042] 32. The AAV viral genome of embodiment 4 wherein the first sense strand sequence, the second sense strand sequence, the third sense strand sequence, the fourth sense strand sequence, the first antisense strand sequence, the second antisense strand sequence, the third antisense strand sequence and the fourth antisense strand sequence, are, independently, 30 nucleotides or less.

[0043] 33. The AAV viral genome of embodiment 1 or 2, wherein at least one of the first sense strand sequence and the first antisense strand sequence or the second sense strand sequence and the second antisense strand sequence comprise a 3′ overhang of at least 1 nucleotide.

[0044] 34. The AAV viral genome of embodiment 1 or 2, wherein at least one of the first sense strand sequence and the first antisense strand sequence or the second sense strand sequence and the second antisense strand sequence comprise a 3′ overhang of at least 2 nucleotides.

[0045] 35. The AAV viral genome of embodiment 3, wherein the third sense strand sequence and the third antisense strand sequence comprise a 3′ overhang of at least 1 nucleotide.

[0046] 36. The AAV viral genome of embodiment 3, wherein the third sense strand sequence and the third antisense strand sequence comprise a 3′ overhang of at least 2 nucleotides.

[0047] 37. The AAV viral genome of embodiment 4 wherein the fourth sense strand sequence and the fourth antisense strand sequence comprise a 3′ overhang of at least 1 nucleotide.

[0048] 38. The AAV viral genome of embodiment 4 wherein the fourth sense strand sequence and the fourth antisense strand sequence comprise a 3′ overhang of at least 2 nucleotides.

[0049] 39. The AAV viral genome of any one of embodiments 1-38, wherein the first region comprises, a promoter 5′ of the first sense strand sequence followed by the first sense strand sequence, and the second region comprises the first antisense strand sequence followed by a promoter terminator 3′ of the first antisense strand sequence; or the third region comprises a promoter 5′ of the second sense strand sequence followed by the second sense strand sequence, and the fourth region comprises the second antisense strand sequence followed by a promoter terminator 3′ of the second antisense strand sequence.

[0050] 40. The AAV viral genome of any one of embodiments 1-38, wherein the first region comprises, a promoter 5′ of the first sense strand sequence followed by the first sense strand sequence, and the second region comprises the first antisense strand sequence followed by a promoter terminator 3′ of the first antisense strand sequence; and the third region comprises a promoter 5′ of the second sense strand sequence followed by the second sense strand sequence, and the fourth region comprises the second antisense strand sequence followed by a promoter terminator 3′ of the second antisense strand sequence.

[0051] 41. The AAV viral genome of any one of embodiments 3-40, wherein the fifth region comprises a promoter 5′ of the third sense strand sequence followed by the third sense strand sequence and the sixth region comprises the third antisense strand sequence followed by a promoter terminator 3′ of the third antisense strand sequence.

[0052] 42. The AAV viral genome of any one of embodiments 4-41 wherein the seventh region comprises a promoter 5′ of the fourth sense strand sequence followed by the fourth sense strand sequence and the eighth region comprises the fourth antisense strand sequence followed by a promoter terminator 3′ of the fourth antisense strand sequence.

[0053] 43. The AAV viral genome of embodiment 3, wherein the fifth region is 3′ of the fourth region.

[0054] 44. The AAV viral genome of embodiment 4, wherein the seventh region is 3′ of the sixth region.

[0055] 45. The AAV viral genome of any one of embodiments 39-44 wherein a promoter is a Pol III promoter and the promoter terminator is a Pol III promoter terminator.

[0056] 46. The AAV viral genome of embodiment 45, wherein the Pol III promoter is a U3, U6, U7, 7SK, H1, or MRP, EBER, seleno-cysteine tRNA, 7SL, adenovirus VA-1, or telomerase gene promoter, and the Pol III promoter terminator is a U3, U6, U7, 7SK, H1, or MRP, EBER, seleno-cysteine tRNA, 7SL, adenovirus VA-1, or telomerase gene promoter terminator, respectively.

[0057] 47. The AAV viral genome of embodiment 46, wherein the Pol III promoter is an H1 promoter and the Pol III promoter terminator is an H1 promoter terminator.

[0058] 48. The AAV viral genome of any one of embodiments 1-47, wherein the AAV viral genome is a monospecific polycistronic AAV viral genome.

[0059] 49 The AAV viral genome of any one of embodiments 1-47, wherein the AAV viral genome is a bispecific polycistronic AAV viral genome.

[0060] 50. The AAV viral genome of embodiment 1 or 2, wherein the first region and the second region encode a first siRNA molecule, and the third region and the fourth region encode a second siRNA molecule, wherein the first and the second siRNA molecules target a different target gene.

[0061] 51. The AAV viral genome of embodiment 3, wherein the fifth region and the sixth region encode a third siRNA molecule, wherein the first siRNA molecule, the second siRNA molecule and the third siRNA molecule each target a different target gene.

[0062] 52. The AAV viral genome of embodiment 4, wherein the seventh region and the eighth region encode a fourth siRNA molecule, wherein the first siRNA molecule, the second siRNA molecule, the third siRNA molecule and the fourth siRNA molecule each target a different target gene.

[0063] 53. An adeno-associated viral (AAV) viral genome comprising a nucleic acid sequence positioned between two inverted terminal repeats (ITRs), wherein said nucleic acid sequence comprises a first molecular scaffold region and a second molecular scaffold region, wherein said first molecular scaffold region comprises a first molecular scaffold nucleic acid sequence encoding:
[0064] (a) a first stem and loop to form a first stem-loop structure, the sequence of said first stem-loop structure from 5′ to 3′ comprising:
   [0065] i. a first UG motif at or near the base of the first 5′ stem of the first stem-loop structure;
   [0066] ii. a first 5′ stem arm comprising a first sense strand and optional first 5′ spacer region, wherein said first 5′ spacer region, when present, is located between said first UG motif and said first sense strand;
   [0067] iii. a first loop region comprising a first UGUG motif at the 5′ end of said first loop region;
   [0068] iv. a first 3′ stem arm comprising a first antisense strand and optionally a first 3′ spacer region, wherein a uridine is present at the 5′ end of said first antisense strand and wherein said first 3′ spacer region, when present, has a length sufficient to form one helical turn;
[0069] (b) a first 5′ flanking region located 5′ to said first stem-loop structure; and
[0070] (c) a first 3′ flanking region located 3′ to said first stem-loop structure, said first 3′ flanking region comprising a CNNC motif, and
   a second molecular scaffold region comprising a second molecular scaffold nucleic acid sequence encoding
[0071] (d) a second stem and loop to form a second stem-loop structure, the sequence of said second stem-loop structure from 5′ to 3′ comprising:
   [0072] v. a second UG motif at or near the base of the second 5′ stem of the second stem-loop structure;
   [0073] vi. a second 5′ stem arm comprising a second sense strand and optional second 5′ spacer region, wherein said second 5′ spacer region, when present, is located between said second UG motif and said second sense strand;
   [0074] vii. a second loop region comprising a second UGUG motif at the 5′ end of said second loop region;
   [0075] viii. a second 3′ stem arm comprising a second antisense strand and optionally a second 3′ spacer region, wherein a uridine is present at the 5′ end of said second antisense strand and wherein said second 3′ spacer region, when present, has a length sufficient to form one helical turn;
   [0076] ix. a second 5′ flanking region located 5′ to said second stem-loop structure; and
[0077] (e) a second 3′ flanking region located 3′ to said second stem-loop structure, said second 3′ flanking region comprising a CNNC motif, and
   wherein said first antisense strand and said first sense strand form a first siRNA duplex and said second antisense strand and said second sense strand form a second siRNA duplex, where the first siRNA duplex, when expressed, inhibits or suppresses the expression of a first target gene in a cell, and the second siRNA duplex, when expressed, inhibits or suppresses the expression of a second target gene in a cell, wherein the first and second sense strand sequences comprise at least 15 nucleotides, the first antisense strand sequence is complementary to an mRNA produced by the first target gene and second antisense strand sequences is complementary to an mRNA produced by the second target gene, and wherein said first sense strand sequence and first antisense strand sequence share a region of complementarity of at least four nucleotides in length and said second sense strand sequence and second antisense strand sequence share a region of complementarity of at least four nucleotides in length.

[0078] 54. Adeno-associated viral (AAV) viral genome comprising a nucleic acid sequence positioned between two inverted terminal repeats (ITRs), wherein said nucleic acid sequence comprises a first molecular scaffold region and a second molecular scaffold region, wherein said first molecular scaffold region comprises a first molecular scaffold nucleic acid sequence encoding:
[0079] (a) a first stem and loop to form a first stem-loop structure, the sequence of said first stem-loop structure from 5′ to 3′ comprising:
   [0080] i. a first UG motif at or near the base of the first 5′ stem of the first stem-loop structure;
   [0081] ii. a first 5′ stem arm comprising a first antisense strand and optional first 5′ spacer region, wherein said first 5′ spacer region, when present, is located between said first UG motif and said first antisense strand;
   [0082] iii. a first loop region comprising a first UGUG motif at the 5′ end of said first loop region;
   [0083] iv. a first 3′ stem arm comprising a first sense strand and optionally a first 3′ spacer region, wherein a uridine is present at the 5′ end of said first sense strand and wherein said first 3′ spacer region, when present, has a length sufficient to form one helical turn:
[0084] (b) a first 5′ flanking region located 5′ to said first stem-loop structure; and
[0085] (c) a first 3′ flanking region located 3′ to said first stem-loop structure, said first 3′ flanking region comprising a CNNC motif, and
   a second molecular scaffold region comprising a second molecular scaffold nucleic acid sequence encoding
[0086] (d) a second stem and loop to form a second stem-loop structure, the sequence of said second stem-loop structure from 5′ to 3′ comprising:
   [0087] v. a second UG motif at or near the base of the second 5′ stem of the second stem-loop structure;
   [0088] vi. a second 5′ stem arm comprising a second antisense strand and optional second 5′ spacer region, wherein said second 5′ spacer region, when present, is located between said second UG motif and said second antisense strand;
   [0089] vii. a second loop region comprising a second UGUG motif at the 5′ end of said second loop region;
   [0090] viii. a second 3′ stem arm comprising a second sense strand and optionally a second 3′ spacer region, wherein a uridine is present at the 5′ end of said second sense strand and wherein said second 3′ spacer region, when present, has a length sufficient to form one helical turn;
[0091] (e) a second 5′ flanking region located 5′ to said second stem-loop structure; and
[0092] (f) a second 3′ flanking region located 3′ to said second stem-loop structure, said second 3′ flanking region comprising a CNNC motif, and
   wherein said first antisense strand and said first sense strand form a first siRNA duplex and said second antisense strand and said second sense strand form a second siRNA duplex, where the first siRNA duplex, when expressed, inhibits or suppresses the expression of a first target gene in a cell, and the second siRNA duplex, when expressed, inhibits or suppresses the expression of a second target gene in a cell, wherein the first and second sense strand sequences comprise at least 15 nucleotides, the first antisense strand sequence is complementary to an mRNA produced by the first target gene and second antisense strand sequences is complementary to an mRNA produced by the second target gene, and wherein said first sense strand sequence and first antisense strand sequence share a region of complementarity of at least four nucleotides in length and said second sense strand sequence and second antisense strand sequence share a region of complementarity of at least four nucleotides in length.

[0093] 55. The AAV viral genome of embodiment 53 or 54, wherein the first antisense strand sequence or the second antisense strand sequence inhibits or suppresses the expression of Huntingtin.

[0094] 56. The AAV viral genome of embodiment 53 or 54, wherein the first antisense strand sequence and the second antisense sequence strand inhibits or suppresses the expression of Huntingtin.

[0095] 57. The AAV viral genome of embodiment 53 or 54, wherein the first antisense strand sequence or the second antisense strand sequence inhibits or suppresses the expression of SOD1.

[0096] 58. The AAV viral genome of embodiment 53 or 54, wherein the first antisense strand sequence and the second antisense strand sequence inhibits or suppresses the expression of SOD1.

[0097] 59. The AAV viral genome of embodiment 53 or 54, wherein the first 5′ flanking region is selected from the sequences listed in Table 10.

[0098] 60. The AAV viral genome of embodiment 53 or 54, wherein the second 5′ flanking region is selected from the sequences listed in Table 10.

[0099] 61. The AAV viral genome of embodiment 59, wherein the second 5′ flanking region is selected from the sequences listed in Table 10.

[0100] 62. The AAV viral genome of embodiment 53 or 54, wherein the first loop region is selected from the sequences listed in Table 11.

[0101] 63. The AAV viral genome of embodiment 53 or 54, wherein the second loop region is selected from the sequences listed in Table 11.

[0102] 64. The AAV viral genome of embodiment 62, wherein the second loop region is selected from the sequences listed in Table 11.

[0103] 65. The AAV viral genome of embodiment 53 or 54, wherein the first 3′ flanking region is selected from the sequences listed in Table 12.

[0104] 66. The AAV viral genome of embodiment 53 or 54, wherein the second 3′ flanking region is selected from the sequences listed in Table 12.

[0105] 67. The AAV viral genome of embodiment 65, wherein the second 3′ flanking region is selected from the sequences listed in Table 12.

[0106] 68. The AAV viral genome of embodiment 53 or 54, wherein the nucleic acid sequence comprises a promoter sequence between the first molecular scaffold nucleic acid sequence and the second molecular scaffold nucleic acid sequence.

[0107] 69. The AAV viral genome of embodiment 53 or 54, further comprising, in (b), a promoter 5′ of the first 5′ flanking region followed by the first 5′ flanking region and in (c) the first 3′ flanking region followed by a promoter terminator 3‘ of the first’3 flanking region, and in (d), a promoter 5′ of the second 5′ flanking region followed by the second 5′ flanking region and in (c) the second 3′ flanking region followed by a promoter terminator 3′ of the second 3′ flanking region.

[0108] 70. The AAV viral genome of embodiment 69, wherein the promoter is a Pol III promoter.

[0109] 71. The AAV viral genome of embodiment 70, wherein the Pol III promoter sequence is a U3, U6, U7, 7SK, H1, or MRP, EBER, seleno-cysteine tRNA, 7SL, adenovirus VA-1, or telomerase gene promoter.

[0110] 72. The AAV viral genome of embodiment 71, wherein the Pol III promoter is an H1 promoter.

[0111] 73. The AAV viral genome of embodiment 53, wherein the nucleic acid sequence further comprises a third molecular scaffold region comprising a third molecular scaffold nucleic acid sequence encoding:
[0112] (g) a third stem and loop to form a third stem-loop structure, the sequence of said third stem-loop structure from 5′ to 3′ comprising:
   [0113] ix. a third UG motif at or near the base of the third 5′ stem of the third stem-loop structure;
   [0114] x. a third 5′ stem arm comprising a third sense strand and optional third 5′ spacer region, wherein said third 5′ spacer region, when present, is located between said third UG motif and said third sense strand;
   [0115] xi. a third loop region comprising a third UGUG motif at the 5′ end of said third loop region;
   [0116] xii. a third 3′ stem arm comprising a third antisense strand and optionally a third 3′ spacer region, wherein a uridine is present at the 5′ end of said third antisense strand and wherein said third 3′ spacer region, when present, has a length sufficient to form one helical turn;
[0117] (h) a third 5′ flanking region located 5′ to said third stem-loop structure, and
[0118] (i) a third 3′ flanking region located 3′ to said third stem-loop structure, said third 3′ flanking region comprising a CNNC motif, and
   wherein said third antisense strand and said third sense strand form a third siRNA duplex, wherein the third siRNA duplex, when expressed, inhibits or suppresses the expression of a third target gene in a cell, wherein the third sense strand sequence comprises at least 15 nucleotides, the third antisense strand sequence is complementary to an mRNA produced by the third target gene, and wherein said third sense strand sequence and third antisense strand sequence share a region of complementarity of at least four nucleotides in length.

[0119] 74. The AAV viral genome of embodiment 73, further comprising, in (h), a promoter 5′ of the third 5′ flanking region followed by the third 5′ flanking region, and in (i) the third 3′ flanking region followed by a promoter terminator 3‘ of the third’3 flanking region.

[0120] 75. The AAV viral genome of embodiment 74, wherein the promoter is a Pol III promoter.

[0121] 76. The AAV viral genome of embodiment 75, wherein the Pol III promoter sequence is a U3, U6, U7, 7SK, H1, or MRP, EBER, seleno-cysteine tRNA, 7SL, adenovirus VA-1, or telomerase gene promoter.

[0122] 77. The AAV viral genome of embodiment 76, wherein the Pol III promoter is an H1 promoter.

[0123] 78. The AAV viral genome of embodiment 73, wherein the nucleic acid sequence further comprises a fourth molecular scaffold region comprising a fourth molecular scaffold nucleic acid sequence encoding
[0124] (j) a fourth stem and loop to form a fourth stem-loop structure, the sequence of said fourth stem-loop structure from 5′ to 3′ comprising:
   [0125] xiii. a fourth UG motif at or near the base of the fourth 5′ stem of the fourth stem-loop structure;
   [0126] xiv. a fourth 5′ stem arm comprising a fourth sense strand and optional fourth 5′ spacer region, wherein said fourth 5′ spacer region, when present, is located between said fourth UG motif and said fourth sense strand:
   [0127] xv. a fourth loop region comprising a fourth UGUG motif at the 5′ end of said fourth loop region;
   [0128] xvi. a fourth 3′ stem arm comprising a fourth antisense strand and optionally a fourth 3′ spacer region, wherein a uridine is present at the 5′ end of said fourth antisense strand and wherein said fourth 3′ spacer region, when present, has a length sufficient to form one helical turn;
[0129] (k) a fourth 5′ flanking region located 5′ to said fourth stem-loop structure; and
[0130] (l) a fourth 3′ flanking region located 3′ to said fourth stem-loop structure, said fourth 3′ flanking region comprising a CNNC motif, and
   wherein said fourth antisense strand and said fourth sense strand form a fourth siRNA duplex, wherein the fourth siRNA duplex, when expressed, inhibits or suppresses the expression of a fourth target gene in a cell, wherein the fourth sense strand sequence comprises at least 15 nucleotides, the fourth antisense strand sequence is complementary to an mRNA produced by the fourth target gene, and wherein said fourth sense strand sequence and fourth antisense strand sequence share a region of complementarity of at least four nucleotides in length.

[0131] 79. The AAV viral genome of embodiment 78, further comprising, in (k), a promoter 5′ of the fourth 5′ flanking region followed by the fourth 5′ flanking region, and in (1) the fourth 3′ flanking region followed by a promoter terminator 3‘ of the fourth’3 flanking region.

[0132] 80. The AAV viral genome of embodiment 79, wherein the promoter is a Pol III promoter.

[0133] 81. The AAV viral genome of embodiment 80, wherein the Pol III promoter sequence is a U3, U6, U7, 7SK, H1, or MRP, EBER, seleno-cysteine tRNA, 7SL, adenovirus VA-1, or telomerase gene promoter.

[0134] 82. The AAV viral genome of embodiment 81, wherein the Pol III promoter is an H1 promoter.

[0135] 83. The AAV viral genome of any one of embodiments 53-82, wherein the first target gene is the same as the second target gene.

[0136] 84. The AAV viral genome of any one of embodiments 53-82, wherein the third target gene is the same as the first target gene.

[0137] 85. The AAV viral genome of any one of embodiments 53-82, wherein the third target gene is the same as the second target gene.

[0138] 86. The AAV viral genome of any one of embodiments 53-82, wherein the first target gene, the second target gene and the third target gene are the same.

[0139] 87. The AAV viral genome of any one of embodiments 53-82, wherein the fourth target gene is the same as the first target gene.

[0140] 88. The AAV viral genome of any one of embodiments 53-82, wherein the fourth target gene is the same as the second target gene.

[0141] 89. The AAV viral genome of any one of embodiments 53-82, wherein the fourth target gene is the same as the third target gene.

[0142] 90. The AAV viral genome of any one of embodiments 53-82, wherein the fourth target gene is the same as the first target gene and the second target gene.

[0143] 91. The AAV viral genome of embodiment 53-82, wherein the fourth target gene is the same as the second target gene and the third target gene.

[0144] 92. The AAV viral genome of embodiment 53-82, wherein the fourth target gene is the same as the first target gene and the third target gene.

[0145] 93. The AAV viral genome of any one of embodiments 53-82, wherein the fourth target gene is the same as the first target gene, the second target gene and the third target gene.

[0146] 94. The AAV viral genome of any one of embodiments 53-93 wherein the first target gene, the second target gene, the third target gene and/or the fourth target gene is Huntingtin.

[0147] 95. The AAV viral genome of any one of embodiments 53-93 wherein the first target gene, the second target gene, the third target gene and/or the fourth target gene is SOD1.

[0148] 96. The AAV viral genome of any one of embodiments 53-93 wherein the first target gene, the second target gene, the third target gene and/or the fourth target gene is Huntingtin or SOD1.

[0149] 97. A method for inhibiting the expression of a gene of a target gene in a cell comprising administering to the cell a composition comprising an AAV viral genome of any one of embodiments 1-96.

[0150] 98. The method of embodiment 97, wherein the cell is a mammalian cell.

[0151] 99. The method of embodiment 98, wherein the mammalian cell is a medium spiny neuron.

[0152] 100. The method of embodiment 98, wherein the mammalian cell is a cortical neuron.

[0153] 101. The method of embodiment 98, wherein the mammalian cell is a motor neuron.

[0154] 102. The method of embodiment 98, wherein the mammalian cell is an astrocyte.

[0155] 103. A method for treating a disease and/or disorder in a subject in need thereof, the method comprising administering to the subject a therapeutically effective amount of a composition comprising an AAV viral genome of any one of embodiments 1-96.

[0156] 104. The method of embodiment 103, wherein the expression of a target gene is inhibited or suppressed.

[0157] 105. The method of embodiment 104, wherein the expression of a target gene of interest is inhibited or suppressed by about 30% to about 70%.

[0158] 106. The method of embodiment 104, wherein the expression of a target gene is inhibited or suppressed by about 50% to about 90%.

[0159] 107. A method for inhibiting the expression of a target gene in a cell wherein the target gene causes a gain of function effect inside the cell, comprising administering to the cell a composition comprising an AAV viral genome of any one of embodiments 1-96.

[0160] 108. The method of embodiment 107, wherein the cell is a mammalian cell.

[0161] 109. The method of embodiment 108, wherein the mammalian cell is a medium spiny neuron.

[0162] 110. The method of embodiment 108, wherein the mammalian cell is a cortical neuron.

[0163] 111. The method of embodiment 108, wherein the mammalian cell is a motor neuron.

[0164] 112. The method of embodiment 108, wherein the mammalian cell is an astrocyte.

### BRIEF DESCRIPTION OF THE DRAWINGS

[0165] The foregoing and other objects, features and advantages will be apparent from the following description of particular embodiments of the invention, as illustrated in the accompanying drawings. The drawings are not necessarily to scale, emphasis instead being placed upon illustrating the principles of various embodiments of the invention.

[0166] FIG. 1 is a schematic of a viral genome of the invention.

[0167] FIG. 2 is a schematic of a viral genome of the invention.

[0168] FIG. 3 is a schematic of a viral genome of the invention.

[0169] FIG. 4 is a schematic of a viral genome of the invention.

[0170] FIG. 5 is a schematic of a viral genome of the invention.

[0171] FIG. 6 is a schematic of a viral genome of the invention.

[0172] FIG. 7 is a schematic of a viral genome of the invention.

[0173] FIG. 8 is a schematic of a viral genome of the invention.

[0174] FIG. 9 is a schematic of a viral genome of the invention.

[0175] The details of one or more embodiments of the invention are set forth in the accompanying description below. Although any materials and methods similar or equivalent to those described herein can be used in the practice or testing of the present invention, the preferred materials and methods are now described. Other features, objects and advantages of the invention will be apparent from the description. In the description, the singular forms also include the plural unless the context clearly dictates otherwise. Unless defined otherwise, all technical and scientific terms used herein have the same meaning as commonly understood by one of ordinary skill in the art to which this invention belongs. In the case of conflict, the present description will control.

### DETAILED DESCRIPTION OF THE INVENTION

### I. Compositions of the Invention

[0176] According to the present invention, compositions for delivering modulatory polynucleotides and/or modulatory polynucleotide-based compositions by adeno-associated viruses (AAVs) are provided. AAV particles of the invention may be provided via any of several routes of administration, to a cell, tissue, organ, or organism, in vivo, ex vivo or in vitro.

[0177] As used herein, an “AAV particle” is a virus which comprises a viral genome with at least one payload region and at least one inverted terminal repeat (ITR) region.

[0178] As used herein, “viral genome” or “vector genome” or “viral vector” refers to the nucleic acid sequence(s) encapsulated in an AAV particle. Viral genomes comprise at least one payload region encoding polypeptides or fragments thereof.

[0179] As used herein, a “payload” or “payload region” is any nucleic acid molecule which encodes one or more polypeptides of the invention. At a minimum, a payload region comprises nucleic acid sequences that encode a sense and antisense sequence, an siRNA-based composition, or a fragment thereof, but may also optionally comprise one or more functional or regulatory elements to facilitate transcriptional expression and/or polypeptide translation.

[0180] The nucleic acid sequences and polypeptides disclosed herein may be engineered to contain modular elements and/or sequence motifs assembled to enable expression of the modulatory polynucleotides and/or modulatory polynucleotide-based compositions of the invention. In some embodiments, the nucleic acid sequence comprising the payload region may comprise one or more of a promoter region, an intron, a Kozak sequence, an enhancer or a polyadenylation sequence. Payload regions of the invention typically encode at least one sense and antisense sequence, an siRNA-based composition, or fragments of the foregoing in combination with each other or in combination with other polypeptide moieties.

[0181] The payload regions of the invention may be delivered to one or more target cells, tissues, organs or organisms within the viral genome of an AAV particle.

### Adeno-Associated Viruses (AAVs) and AAV Particles

[0182] Viruses of the Parvoviridae family are small non-enveloped icosahedral capsid viruses characterized by a single stranded DNA genome. Parvoviridae family viruses consist of two subfamilies: Parvovirinae, which infect vertebrates, and Densovirinae, which infect invertebrates. Due to its relatively simple structure, easily manipulated using standard molecular biology techniques, this virus family is useful as a biological tool. The genome of the virus may be modified to contain a minimum of components for the assembly of a functional recombinant virus, or viral particle, which is loaded with or engineered to express or deliver a desired payload, which may be delivered to a target cell, tissue, organ, or organism.

[0183] The parvoviruses and other members of the Parvoviridae family are generally described in Kenneth I. Berms, “Parvoviridae: The Viruses and Their Replication,” Chapter 69 in FIELDS VIROLOGY (3d Ed. 1996), the contents of which are incorporated by reference in their entirety.

[0184] The Parvoviridae family comprises the Dependovirus genus which includes adeno-associated viruses (AAV) capable of replication in vertebrate hosts including, but not limited to, human, primate, bovine, canine, equine, and ovine species.

[0185] The AAV viral genome is a linear, single-stranded DNA (ssDNA) molecule approximately 5,000 nucleotides (nt) in length. The AAV viral genome can comprise a payload region and at least one inverted terminal repeat (ITR) or ITR region. ITRs traditionally flank the coding nucleotide sequences for the non-structural proteins (encoded by Rep genes) and the structural proteins (encoded by capsid genes or Cap genes). While not wishing to be bound by theory, an AAV viral genome typically comprises two ITR sequences. The AAV viral genome comprises a characteristic T-shaped hairpin structure defined by the self-complementary terminal 145 nt of the 5′ and 3′ ends of the ssDNA which form an energetically stable double stranded region. The double stranded hairpin structures comprise multiple functions including, but not limited to, acting as an origin for DNA replication by functioning as primers for the endogenous DNA polymerase complex of the host viral replication cell.

[0186] In addition to the encoded heterologous payload, AAV vectors may comprise the viral genome, in whole or in part, of any naturally occurring and/or recombinant AAV serotype nucleotide sequence or variant. AAV variants may have sequences of significant homology at the nucleic acid (genome or capsid) and amino acid levels (capsids), to produce constructs which are generally physical and functional equivalents, replicate by similar mechanisms, and assemble by similar mechanisms. Chiorini et al., J. Vir. 71: 6823-33(1997): Srivastava et al., J. Vir. 45:555-64 (1983); Chiorini et al., J. Vir. 73:1309-1319 (1999), Rutledge et al., J. Vir. 72:309-319 (1998), and Wu et al., J. Vir. 74: 8635-47 (2000), the contents of each of which are incorporated herein by reference in their entirety.

[0187] In one embodiment, AAV particles of the present invention are recombinant AAV vectors which are replication defective, lacking sequences encoding functional Rep and Cap proteins within their viral genome. These defective AAV vectors may lack most or all parental coding sequences and essentially carry only one or two AAV ITR sequences and the nucleic acid of interest for delivery to a cell, a tissue, an organ or an organism.

[0188] In one embodiment, the viral genome of the AAV particles of the present invention comprise at least one control element which provides for the replication, transcription and translation of a coding sequence encoded therein. Not all of the control elements need always be present as long as the coding sequence is capable of being replicated, transcribed and/or translated in an appropriate host cell. Non-limiting examples of expression control elements include sequences for transcription initiation and/or termination, promoter and/or enhancer sequences, efficient RNA processing signals such as splicing and polyadenylation signals, sequences that stabilize cytoplasmic mRNA, sequences that enhance translation efficacy (e.g., Kozak consensus sequence), sequences that enhance protein stability, and/or sequences that enhance protein processing and/or secretion.

[0189] According to the present invention, AAV particles for use in therapeutics and/or diagnostics comprise a virus that has been distilled or reduced to the minimum components necessary for transduction of a nucleic acid payload or cargo of interest. In this manner, AAV particles are engineered as vehicles for specific delivery while lacking the deleterious replication and/or integration features found in wild-type viruses.

[0190] AAV vectors of the present invention may be produced recombinantly and may be based on adeno-associated virus (AAV) parent or reference sequences. As used herein, a “vector” is any molecule or moiety which transports, transduces or otherwise acts as a carrier of a heterologous molecule such as the nucleic acids described herein.

[0191] In addition to single stranded AAV viral genomes (e.g., ssAAVs), the present invention also provides for self-complementary AAV (scAAVs) viral genomes, scAAV viral genomes contain DNA strands which anneal together to form double stranded DNA. By skipping second strand synthesis, scAAVs allow for rapid expression in the cell.

[0192] In one embodiment, the AAV particle of the present invention is an scAAV.

[0193] In one embodiment, the AAV particle of the present invention is an ssAAV.

[0194] Methods for producing and/or modifying AAV particles are disclosed in the art such as pseudotyped AAV vectors (PCT Patent Publication Nos. WO200028004; WO200123001; WO2004112727; WO 2005005610 and WO 2005072364, the content of each of which is incorporated herein by reference in its entirety).

[0195] AAV particles may be modified to enhance the efficiency of delivery. Such modified AAV particles can be packaged efficiently and be used to successfully infect the target cells at high frequency and with minimal toxicity. In some embodiments the capsids of the AAV particles are engineered according to the methods described in US Publication Number US 20130195801, the contents of which are incorporated herein by reference in their entirety.

[0196] In one embodiment, the AAV particles comprising a payload region encoding the polypeptides of the invention may be introduced into mammalian cells.

### AAV Serotypes

[0197] AAV particles of the present invention may comprise or be derived from any natural or recombinant AAV serotype. According to the present invention, the AAV particles may utilize or be based on a serotype selected from any of the following AAV1, AAV2, AAV2G9, AAV3, AAV3a, AAV3b, AAV3-3, AAV4, AAV4-4, AAV5, AAV6, AAV6.1, AAV6.2, AAV6.1.2, AAV7, AAV7.2, AAV8, AAV9, AAV9.11, AAV9.13, AAV9.16, AAV9.24, AAV9.45, AAV9.47, AAV9.61, AAV9.68, AAV9.84, AAV9.9, AAV10, AAV1, AAV12, AAV16.3, AAV24.1, AAV27.3, AAV42.12, AAV42-lb, AAV42-2, AAV42-3a, AAV42-3b, AAV42-4, AAV42-5a, AAV42-5b, AAV42-6b, AAV42-8, AAV42-10, AAV42-11, AAV42-12, AAV42-13, AAV42-15, AAV42-aa, AAV43-1, AAV43-12, AAV43-20, AAV43-21, AAV43-23, AAV43-25, AAV43-5, AAV44.1, AAV44.2, AAV44.5, AAV223.1, AAV223.2, AAV223.4, AAV223.5, AAV223.6, AAV223.7, AAV1-7/rh.48, AAV1-8/rh.49, AAV2-15/rh.62, AAV2-3/rh.61, AAV2-4/rh.50, AAV2-5/rh.51, AAV3.1/hu.6, AAV3.1/hu.9, AAV3-9/rh.52, AAV3-11/rh.53, AAV4-8/rl 1.64, AAV4-9/rh.54, AAV4-19/rh.55, AAV5-3/rh.57, AAV5-22/rh.58. AAV7.3/hu.7, AAV16.8/hu.10, AAV16.12/hu.11, AAV29.3/bb.1, AAV29.5/bb.2, AAV106.1/hu.37, AAV114.3/hu.40, AAV127.2/hu.41, AAV127.5/hu.42, AAV128.3/hu.44, AAV130.4/hu.48, AAV145.1/hu.53, AAV145.5/hu.54, AAV145.6/hu.55, AAV161.10/hu.60, AAV161.6/hu.61, AAV33.12/hu.17, AAV33.4/hu.15, AAV33.8/hu.16, AAV52/hu.19, AAV52.1/hu.20, AAV58.2/hu.25, AAVA3.3, AAVA3.4, AAVA3.5, AAVA3.7, AAVC1, AAVC2, AAVC5, AAV-DJ, AAV-DJ8, AAVF3, AAVF5, AAVH2, AAVrh.72, AAVhu.8, AAVrh.68, AAVrh.70, AAVpi.1, AAVpi.3, AAVpi.2, AAVrh.60, AAVrh.44, AAVrh.65, AAVrh.55, AAVrh.47, AAVrh.69, AAVrh.45, AAVrh.59, AAVhu.12, AAVH6, AAVLK03, AAVH-1/hu.1, AAVH-5/hu.3, AAVLG-10/rh.40, AAVLG-4/rh.38, AAVLG-9/hu.39, AAVN721-8/rh.43, AAVCh.5, AAVCh.5R1, AAVcy.2, AAVcy.3, AAVcy.4, AAVcy.5, AAVCy.5R1, AAVCy.5R2, AAVCy.5R3, AAVCy.5R4, AAVcy.6, AAVhu.1, AAVhu.2, AAVhu.3, AAVhu.4, AAVhu.5, AAVhu.6, AAVhu.7, AAVhu.9, AAVhu.10, AAVhu.11, AAVhu.13, AAVhu.15, AAVhu.16, AAVhu.17, AAVhu.18, AAVhu.20, AAVhu.21, AAVhu.22, AAVhu.23.2, AAVhu.24, AAVhu.25, AAVhu.27, AAVhu.28, AAVhu.29, AAVhu.29R, AAVhu.31, AAVhu.32, AAVhu.34, AAVhu.35, AAVhu.37, AAVhu.39. AAVhu.40, AAVhu.41, AAVhu.42, AAVhu.43, AAVhu.44, AAVhu.44R1, AAVhu.44R2, AAVhu.44R3, AAVhu.45, AAVhu.46, AAVhu.47, AAVhu.48, AAVhu.48R1, AAVhu.48R2, AAVhu.48R3, AAVhu.49, AAVhu.51, AAVhu.52, AAVhu.54, AAVhu.55, AAVhu.56. AAVhu.57, AAVhu.58, AAVhu.60, AAVhu.61, AAVhu.63, AAVhu.64, AAVhu.66, AAVhu.67, AAVhu.14/9, AAVhu.t 19, AAVrh.2, AAVrh.2R, AAVrh.8, AAVrh.8R, AAVrh.10, AAVrh.12, AAVrh.13, AAVrh.13R, AAVrh.14, AAVrh.17, AAVrh.18, AAVrh.19, AAVrh.20, AAVrh.21, AAVrh.22, AAVrh.23, AAVrh.24, AAVrh.25, AAVrh.31, AAVrh.32, AAVrh.33, AAVrh.34, AAVrh.35, AAVrh.36, AAVrh.37, AAVrh.37R2, AAVrh.38, AAVrh.39, AAVrh.40, AAVrh.46, AAVrh.48, AAVrh.48.1, AAVrh.48.1.2, AAVrh.48.2, AAVrh.49, AAVrh.51. AAVrh.52, AAVrh.53, AAVrh.54, AAVrh.56, AAVrh.57, AAVrh.58, AAVrh.61, AAVrh.64, AAVrh.64R1, AAVrh.64R2, AAVrh.67, AAVrh.73, AAVrh.74, AAVrh8R, AAVrh8R A586R mutant, AAVrh8R R533A mutant, AAAV, BAAV, caprine AAV, bovine AAV, ovine AAV, AAVhE1.1, AAVhEr1.5, AAVhER1.14, AAVhEr1.8, AAVhEr1.16, AAVhEr1.18, AAVhEr1.35, AAVhEr1.7, AAVhEr1.36, AAVhEr2.29, AAVhEr2.4, AAVhEr2.16, AAVhEr2.30, AAVhEr2.31, AAVhEr2.36, AAVhER1.23, AAVhEr3.1, AAV2.5T, AAV-PAEC, AAV-LK01, AAV-LK02, AAV-LK03, AAV-LK04, AAV-LK05, AAV-LK06, AAV-LK07, AAV-LK08, AAV-LK09, AAV-LK10, AAV-LK11, AAV-LK12, AAV-LK13, AAV-LK14, AAV-LK15, AAV-LK16, AAV-LK17, AAV-LK18, AAV-LK19, AAV-PAEC2, AAV-PAEC4, AAV-PAEC6, AAV-PAEC7, AAV-PAEC8, AAV-PAEC11, AAV-PAEC12, AAV-2-pre-miRNA-101, AAV-8h, AAV-8b, AAV-h, AAV-b, AAV SM 10-2, AAV Shuffle 100-1, AAV Shuffle 100-3, AAV Shuffle 100-7, AAV Shuffle 10-2, AAV Shuffle 10-6, AAV Shuffle 10-8, AAV Shuffle 100-2, AAV SM 10-1, AAV SM 10-8, AAV SM 100-3, AAV SM 100-10, BNP61 AAV, BNP62 AAV, BNP63 AAV, AAVrh.50, AAVrh.43, AAVrh.62, AAVrh.48, AAVhu.19, AAVhu.11, AAVhu.53, AAV4-8/rh.64, AAVLG-9/hu.39, AAV54.5/hu.23, AAV54.2/hu.22, AAV54.7/hu.24, AAV54.1/hu.21, AAV54.4R/hu.27, AAV46.2/hu.28. AAV46.6/hu.29, AAV128.1/hu.43, true type AAV (ttAAV), UPENN AAV10. Japanese AAV 10 serotypes, AAV CBr-7.1, AAV CBr-7.10, AAV CBr-7.2, AAV CBr-7.3, AAV CBr-7.4, AAV CBr-7.5, AAV CBr-7.7, AAV CBr-7.8, AAV CBr-B7.3, AAV CBr-B7.4, AAV CBr-E1, AAV CBr-E2, AAV CBr-E3, AAV CBr-E4, AAV CBr-E5, AAV CBr-e5, AAV CBr-E6, AAV CBr-E7, AAV CBr-E8, AAV CHt-1, AAV CHt-2, AAV CHt-3, AAV CHt-6.1, AAV CHt-6.10. AAV CHt-6.5, AAV CHt-6.6, AAV CHt-6.7, AAV CHt-6.8, AAV CHt-P1, AAV CHt-P2, AAV CHt-P5, AAV CHt-P6, AAV CHt-P8, AAV CHt-P9, AAV CKd-1, AAV CKd-10, AAV CKd-2, AAV CKd-3, AAV CKd-4, AAV CKd-6, AAV CKd-7, AAV CKd-8, AAV CKd-B1, AAV CKd-B2, AAV CKd-B3, AAV CKd-B4, AAV CKd-B5, AAV CKd-B6, AAV CKd-B7, AAV CKd-B8, AAV CKd-H1, AAV CKd-H2, AAV CKd-H3, AAV CKd-H4, AAV CKd-H5, AAV CKd-H6, AAV CKd-N3, AAV CKd-N4, AAV CKd-N9, AAV CLg-F1, AAV CLg-F2, AAV CLg-F3, AAV CLg-F4, AAV CLg-F5, AAV CLg-F6, AAV CLg-F7, AAV CLg-F8, AAV CLv-1, AAV CLv1-1, AAV Clv1-10, AAV CLv1-2, AAV CLv-12, AAV CLv1-3, AAV CLv-13, AAV CLv1-4, AAV Clv1-7, AAV Clv1-8, AAV Clv1-9, AAV CLv-2, AAV CLv-3, AAV CLv-4, AAV CLv-6, AAV CLv-8, AAV CLv-D1, AAV CLv-D2, AAV CLv-D3, AAV CLv-D4, AAV CLv-D5, AAV CLv-D6, AAV CLv-D7, AAV CLv-D8, AAV CLv-E1, AAV CLv-K1, AAV CLv-K3, AAV CLv-K6, AAV CLv-L4, AAV CLv-L5, AAV CLv-L6, AAV CLv-M1, AAV CLv-M11, AAV CLv-M2, AAV CLv-M5, AAV CLv-M6, AAV CLv-M7, AAV CLv-M8, AAV CLv-M9, AAV CLv-R1, AAV CLv-R2, AAV CLv-R3, AAV CLv-R4, AAV CLv-R5, AAV CLv-R6, AAV CLv-R7, AAV CLv-R8, AAV CLv-R9, AAV CSp-1, AAV CSp-10, AAV CSp-11, AAV CSp-2, AAV CSp-3, AAV CSp-4, AAV CSp-6, AAV CSp-7, AAV CSp-8, AAV CSp-8.10, AAV CSp-8.2, AAV CSp-8.4, AAV CSp-8.5, AAV CSp-8.6, AAV CSp-8.7, AAV CSp-8.8, AAV CSp-8.9, AAV CSp-9, AAV.hu.48R3, AAV.VR-355, AAV3B, AAV4, AAV5, AAVF1/HSC1, AAVF11/HSC11, AAVF12/HSC12, AAVF13/HSC13, AAVF14/HSC14, AAVF15/HSC15, AAVF16/HSC16, AAVF17/HSC17, AAVF2/HSC2, AAVF3/HSC3, AAVF4/HSC4, AAVF5/HSC5, AAVF6/HSC6, AAVF7/HSC7, AAVF8/HSC8, AAVF9/HSC9, AAV-PHP.B (PHP.B), AAV-PHP.A (PHP.A), G2B-26, G2B-13, TH1.1-32, TH1.1-35, AAVPHP.B2, AAVPHP.B3, AAVPHP.N/PHP.B-DGT, AAVPHP.B-EST, AAVPHP.B-GGT, AAVPHP.B-ATP, AAVPHP.B-ATf-T, AAVPHP.B-DGT-T, AAVPHP.B-GGT-T, AAVPHP.B-SGS, AAVPHP.B-AQP, AAVPHP.B-QQP, AAVPHP.B-SNP(3), AAVPHP.B-SNP, AAVPHP.B-QGT, AAVPHP.B-NQT, AAVPHP.B-EGS, AAVPHP.B-SGN, AAVPHP.B-EGT, AAVPHP.B-DST, AAVPHP.B-DST, AAVPHP.B-STP, AAVPHP.B-PQP, AAVPHP.B-SQP, AAVPHP.B-QLP, AAVPHP.B-TMP, AAVPHP.B-TTP, AAVPHP.S/G2A12, AAVG2A15/G2A3, AAVG2B4, AAVG2B5 and variants thereof.

[0198] In some embodiments, the AAV serotype may be, or have, a sequence as described in United States Publication No. US20030138772, the contents of which are herein incorporated by reference in their entirety, such as, but not limited to, AAV1 (SEQ ID NO: 6 and 64 of US20030138772), AAV2 (SEQ ID NO: 7 and 70 of US20030138772), AAV3 (SEQ ID NO: 8 and 71 of US20030138772), AAV4 (SEQ ID NO: 63 of US20030138772), AAV5 (SEQ ID NO: 114 of US20030138772), AAV6 (SEQ ID NO: 65 of US20030138772), AAV7 (SEQ ID NO: 1-3 of US20030138772), AAV8 (SEQ ID NO: 4 and 95 of US20030138772), AAV9 (SEQ ID NO: 5 and 100 of US20030138772), AAV10 (SEQ ID NO: 117 of US20030138772), AAV11 (SEQ ID NO: 118 of US20030138772), AAV12 (SEQ ID NO: 119 of US20030138772), AAVrh10 (amino acids 1 to 738 of SEQ ID NO: 81 of US20030138772), AAV16.3 (US20030138772 SEQ ID NO: 10), AAV29.3/bb.1 (US20030138772 SEQ ID NO: 11), AAV29.4 (US20030138772 SEQ ID NO: 12), AAV29.5/bb.2 (US20030138772 SEQ ID NO: 13), AAV1.3 (US20030138772 SEQ ID NO: 14), AAV13.3 (US20030138772 SEQ ID NO: 15), AAV24.1 (US20030138772 SEQ ID NO: 16), AAV27.3 (US20030138772 SEQ ID NO: 17), AAV7.2 (US20030138772 SEQ ID NO: 18), AAVC1 (US20030138772 SEQ ID NO: 19), AAVC3 (US20030138772 SEQ ID NO: 20), AAVC5 (US20030138772 SEQ ID NO: 21), AAVF1 (US20030138772 SEQ ID NO: 22), AAVF3 (US20030138772 SEQ ID NO: 23), AAVF5 (US20030138772 SEQ ID NO: 24), AAVH6 (US20030138772 SEQ ID NO: 25), AAVH2 (US20030138772 SEQ ID NO: 26), AAV42-8 (US20030138772 SEQ ID NO: 27), AAV42-15 (US20030138772 SEQ ID NO: 28), AAV42-5b (US20030138772 SEQ ID NO: 29), AAV42-lb (US20030138772 SEQ ID NO: 30), AAV42-13 (US20030138772 SEQ ID NO: 31), AAV42-3a (US20030138772 SEQ ID NO: 32), AAV42-4 (US20030138772 SEQ ID NO: 33), AAV42-5a (US20030138772 SEQ ID NO: 34), AAV42-10 (US20030138772 SEQ ID NO: 35), AAV42-3b (US20030138772 SEQ ID NO: 36), AAV42-11 (US20030138772 SEQ ID NO: 37), AAV42-6b (US20030138772 SEQ ID NO: 38), AAV43-1 (US20030138772 SEQ ID NO: 39), AAV43-5 (US20030138772 SEQ ID NO: 40), AAV43-12 (US20030138772 SEQ ID NO: 41), AAV43-20 (US20030138772 SEQ ID NO: 42), AAV43-21 (US20030138772 SEQ ID NO: 43), AAV43-23 (US20030138772 SEQ ID NO: 44), AAV43-25 (US20030138772 SEQ ID NO: 45), AAV44.1 (US20030138772 SEQ ID NO: 46), AAV44.5 (US20030138772 SEQ ID NO: 47), AAV223.1 (US20030138772 SEQ ID NO: 48), AAV223.2 (US20030138772 SEQ ID NO: 49), AAV223.4 (US20030138772 SEQ ID NO: 50), AAV223.5 (US20030138772 SEQ ID NO: 51), AAV223.6 (US20030138772 SEQ ID NO: 52), AAV223.7 (US20030138772 SEQ ID NO: 53), AAVA3.4 (US20030138772 SEQ ID NO: 54), AAVA3.5 (US20030138772 SEQ ID NO: 55), AAVA3.7 (US20030138772 SEQ ID NO: 56), AAVA3.3 (US20030138772 SEQ ID NO: 57), AAV42.12 (US20030138772 SEQ ID NO: 58), AAV44.2 (US20030138772 SEQ ID NO: 59), AAV42-2 (US20030138772 SEQ ID NO: 9), or variants thereof.

[0199] In some embodiments, the AAV serotype may be, or have, a sequence as described in United States Publication No. US20150159173, the contents of which are herein incorporated by reference in their entirety, such as, but not limited to, AAV2 (SEQ ID NO: 7 and 23 of US20150159173), rh20 (SEQ ID NO: 1 of US20150159173), rh32/33 (SEQ ID NO: 2 of US20150159173), rh39 (SEQ ID NO: 3, 20 and 36 of US20150159173), rh46 (SEQ ID NO: 4 and 22 of US20150159173), rh73 (SEQ ID NO: 5 of US20150159173), rh74 (SEQ ID NO: 6 of US20150159173), AAV6.1 (SEQ ID NO: 29 of US20150159173), rh.8 (SEQ ID NO: 41 of US20150159173), rh.48.1 (SEQ ID NO: 44 of US20150159173), hu.44 (SEQ ID NO: 45 of US20150159173), hu.29 (SEQ ID NO: 42 of US20150159173), hu.48 (SEQ ID NO: 38 of US20150159173), rh54 (SEQ ID NO: 49 of US20150159173), AAV2 (SEQ ID NO: 7 of US20150159173), cy.5 (SEQ ID NO: 8 and 24 of US20150159173), rh.10 (SEQ ID NO: 9 and 25 of US20150159173), rh.13 (SEQ ID NO: 10 and 26 of US20150159173), AAV1 (SEQ ID NO: 11 and 27 of US20150159173), AAV3 (SEQ ID NO: 12 and 28 of US20150159173), AAV6 (SEQ ID NO: 13 and 29 of US20150159173), AAV7 (SEQ ID NO: 14 and 30 of US20150159173), AAV8 (SEQ ID NO: 15 and 31 of US20150159173), hu.13 (SEQ ID NO: 16 and 32 of US20150159173), hu.26 (SEQ ID NO: 17 and 33 of US20150159173), hu.37 (SEQ ID NO: 18 and 34 of US20150159173), hu.53 (SEQ ID NO: 19 and 35 of US20150159173), rh.43 (SEQ ID NO: 21 and 37 of US20150159173), rh2 (SEQ ID NO: 39 of US20150159173), rh.37 (SEQ ID NO: 40 of US20150159173), rh.64 (SEQ ID NO: 43 of US20150159173), rh.48 (SEQ ID NO: 44 of US20150159173), ch.5 (SEQ ID NO 46 of US20150159173), rh.67 (SEQ ID NO: 47 of US20150159173), rh.58 (SEQ ID NO: 48 of US20150159173), or variants thereof including, but not limited to Cy5R1, Cy5R2, Cy5R3, Cy5R4, rh.13R, rh.37R2, rh.2R, rh.8R, rh.48.1, rh.48.2, rh.48.1.2, hu.44R1, hu.44R2, hu.44R3, hu.29R, ch.5R1, rh64R1, rh64R2, AAV6.2, AAV6.1, AAV6.12, hu.48R1, hu.48R2, and hu.48R3.

[0200] In some embodiments, the AAV serotype may be, or have, a sequence as described in U.S. Pat. No. 7,198,951, the contents of which are herein incorporated by reference in their entirety, such as, but not limited to, AAV9 (SEQ ID NO: 1-3 of U.S. Pat. No. 7,198,951), AAV2 (SEQ ID NO: 4 of U.S. Pat. No. 7,198,951), AAV1 (SEQ ID NO: 5 of U.S. Pat. No. 7,198,951), AAV3 (SEQ ID NO: 6 of U.S. Pat. No. 7,198,951), and AAV8 (SEQ ID NO: 7 of U.S. Pat. No. 7,198,951).

[0201] In some embodiments, the AAV serotype may be, or have, a mutation in the AAV9 sequence as described by N Pulicherla et al. (Molecular Therapy 19(6): 1070-1078 (2011), herein incorporated by reference in its entirety), such as but not limited to, AAV9.9, AAV9.11, AAV9.13, AAV9.16, AAV9.24, AAV9.45, AAV9.47, AAV9.61, AAV9.68, AAV9.84.

[0202] In some embodiments, the AAV serotype may be, or have, a sequence as described in U.S. Pat. No. 6,156,303, the contents of which are herein incorporated by reference in their entirety, such as, but not limited to, AAV3B (SEQ ID NO: 1 and 10 of U.S. Pat. No. 6,156,303), AAV6 (SEQ ID NO: 2, 7 and 11 of U.S. Pat. No. 6,156,303), AAV2 (SEQ ID NO: 3 and 8 of U.S. Pat. No. 6,156,303), AAV3A (SEQ ID NO: 4 and 9, of U.S. Pat. No. 6,156,303), or derivatives thereof.

[0203] In some embodiments, the AAV serotype may be, or have, a sequence as described in United States Publication No. US20140359799, the contents of which are herein incorporated by reference in their entirety, such as, but not limited to, AAV8 (SEQ ID NO: 1 of US20140359799), AAVDJ (SEQ ID NO: 2 and 3 of US20140359799), or variants thereof.

[0204] In some embodiments, the serotype may be AAVDJ (AAV-DJ) or a variant thereof, such as AAVDJ8 (or AAV-DJ8), as described by Grimm et al. (Journal of Virology 82(12): 5887-5911 (2008), herein incorporated by reference in its entirety). The amino acid sequence of AAVDJ8 may comprise two or more mutations in order to remove the heparin binding domain (HBD). As a non-limiting example, the AAV-DJ sequence described as SEQ ID NO: 1 in U.S. Pat. No. 7,588,772, the contents of which are herein incorporated by reference in their entirety, may comprise two mutations: (1) R587Q where arginine (R; Arg) at amino acid 587 is changed to glutamine (Q; Gin) and (2) R590T where arginine (R; Arg) at amino acid 590 is changed to threonine (T; Thr). As another non-limiting example, may comprise three mutations: (1) K406R where lysine (K; Lys) at amino acid 406 is changed to arginine (R Arg), (2) R587Q where arginine (R; Arg) at amino acid 587 is changed to glutamine (Q; Gln) and (3) R590T where arginine (R; Arg) at amino acid 590 is changed to threonine (T; Thr).

[0205] In some embodiments, the AAV serotype may be, or have, a sequence of AAV4 as described in International Publication No. WO1998011244, the contents of which are herein incorporated by reference in their entirety, such as, but not limited to AAV4 (SEQ ID NO: 1-20 of WO1998011244).

[0206] In some embodiments, the AAV serotype may be, or have, a mutation in the AAV2 sequence to generate AAV2G9 as described in International Publication No. WO2014144229 and herein incorporated by reference in its entirety.

[0207] In some embodiments, the AAV serotype may be, or have, a sequence as described in International Publication No. WO200503332 I, the contents of which are herein incorporated by reference in their entirety, such as, but not limited to AAV3-3 (SEQ ID NO: 217 of WO2005033321), AAV1 (SEQ ID NO: 219 and 202 of WO2005033321), AAV106.1/hu.37 (SEQ ID No: 10 of WO2005033321), AAV114.3/hu.40 (SEQ ID No: 11 of WO2005033321), AAV127.2/hu.41 (SEQ ID NO:6 and 8 of WO2005033321), AAV128.3/hu.44 (SEQ ID No: 81 of WO2005033321), AAV130.4/hu.48 (SEQ ID NO: 78 of WO2005033321), AAV145.1/hu.53 (SEQ ID No: 176 and 177 of WO2005033321), AAV45.6/hu.56 (SEQ ID NO: 168 and 192 of WO2005033321), AAV16.12/hu.11 (SEQ ID NO: 153 and 57 of WO2005033321), AAV16.8/hu.10 (SEQ ID NO: 156 and 56 of WO2005033321), AAV161.10/hu.60 (SEQ ID No: 170 of WO2005033321), AAV161.6/hu.61 (SEQ ID No: 174 of WO2005033321), AAV1-7/rh.48 (SEQ ID NO: 32 of WO2005033321), AAV1-8/rh.49 (SEQ ID NOs: 103 and 25 of WO2005033321), AAV2 (SEQ ID NO: 211 and 221 of WO2005033321), AAV2-15/rh.62 (SEQ ID No: 33 and 114 of WO2005033321), AAV2-3/rh.61 (SEQ ID NO: 21 of WO2005033321), AAV2-4/rh.50 (SEQ ID No: 23 and 108 of WO2005033321), AAV2-5/rh.51 (SEQ ID NO: 104 and 22 of WO2005033321), AAV3.1/hu.6 (SEQ ID NO: 5 and 84 of WO2005033321), AAV3.1/hu.9 (SEQ ID NO: 155 and 58 of WO2005033321), AAV3-11/rh.53 (SEQ ID NO: 186 and 176 of WO2005033321), AAV3-3 (SEQ ID NO: 200 of WO2005033321), AAV33.12/hu.17 (SEQ ID NO:4 of WO2005033321), AAV33.4/hu.15 (SEQ ID No: 50 of WO2005033321), AAV33.8/hu.16 (SEQ ID No: 51 of WO2005033321), AAV3-9/rh.52 (SEQ ID NO: 96 and 18 of WO2005033321), AAV4-19/rh.55 (SEQ ID NO: 117 of WO2005033321), AAV4-4 (SEQ ID NO: 201 and 218 of WO2005033321), AAV4-9/rh.54 (SEQ ID NO: 116 of WO2005033321), AAV5 (SEQ ID NO: 199 and 216 of WO2005033321), AAV52.1/hu.20 (SEQ ID NO: 63 of WO2005033321), AAV52/hu.19 (SEQ ID NO: 133 of WO2005033321), AAV5-22/rh.58 (SEQ ID No: 27 of WO2005033321), AAV5-3/rh.57 (SEQ ID NO: 105 of WO2005033321), AAV5-3/rh.57 (SEQ ID No: 26 of WO2005033321), AAV58.2/hu.25 (SEQ ID No: 49 of WO02005033321), AAV6 (SEQ ID NO: 203 and 220 of WO2005033321), AAV7 (SEQ ID NO: 222 and 213 of WO2005033321), AAV7.3/hu.7 (SEQ ID No: 55 of WO2005033321), AAV8 (SEQ ID NO: 223 and 214 of WO2005033321), AAVH-1/hu.1 (SEQ ID No: 46 of WO2005033321), AAVH-5/hu.3 (SEQ ID No: 44 of WO2005033321), AAVhu.1 (SEQ ID NO: 144 of WO2005033321), AAVhu.10 (SEQ ID NO: 156 of WO2005033321), AAVhu.11 (SEQ ID NO: 153 of WO2005033321), AAVhu.12 (WO2005033321 SEQ ID NO: 59), AAVhu.13 (SEQ ID NO: 129 of WO2005033321), AAVhu.14/AAV9 (SEQ ID NO: 123 and 3 of WO02005033321), AAVhu.15 (SEQ ID NO: 147 of WO2005033321), AAVhu.16 (SEQ ID NO: 148 of WO2005033321), AAVhu.17 (SEQ ID NO: 83 of WO2005033321), AAVhu.18 (SEQ ID NO: 149 of WO2005033321), AAVhu.19 (SEQ ID NO: 133 of WO2005033321), AAVhu.2 (SEQ ID NO: 143 of WO2005033321), AAVhu.20 (SEQ ID NO: 134 of WO2005033321), AAVhu.21 (SEQ ID NO: 135 of WO2005033321), AAVhu.22 (SEQ ID NO: 138 of WO2005033321), AAVhu.23.2 (SEQ ID NO: 137 of WO02005033321), AAVhu.24 (SEQ ID NO: 136 of WO2005033321), AAVhu.25 (SEQ ID NO: 146 of WO2005033321), AAVhu.27 (SEQ ID NO: 140 of WO2005033321), AAVhu.29 (SEQ ID NO: 132 of WO2005033321), AAVhu.3 (SEQ ID NO: 145 of WO2005033321), AAVhu.31 (SEQ ID NO: 121 of WO2005033321), AAVhu.32 (SEQ ID NO: 122 of WO2005033321), AAVhu.34 (SEQ ID NO: 125 of WO2005033321), AAVhu.35 (SEQ ID NO: 164 of WO2005033321), AAVhu.37 (SEQ ID NO: 88 of WO2005033321), AAVhu.39 (SEQ ID NO: 102 of WO2005033321), AAVhu.4 (SEQ ID NO: 141 of WO02005033321), AAVhu.40 (SEQ ID NO: 87 of WO2005033321), AAVhu.41 (SEQ ID NO: 91 of WO2005033321), AAVhu.42 (SEQ ID NO: 85 of WO2005033321), AAVhu.43 (SEQ ID NO: 160 of WO2005033321), AAVhu.44 (SEQ ID NO: 144 of WO2005033321), AAVhu.45 (SEQ ID NO: 127 of WO2005033321), AAVhu.46 (SEQ ID NO: 159 of WO2005033321), AAVhu.47 (SEQ ID NO: 128 of WO2005033321), AAVhu.48 (SEQ ID NO: 157 of WO2005033321), AAVhu.49 (SEQ ID NO: 189 of WO2005033321), AAVhu.51 (SEQ ID NO: 190 of WO2005033321), AAVhu.52 (SEQ ID NO: 191 of WO02005033321), AAVhu.53 (SEQ ID NO: 186 of WO2005033321), AAVhu.54 (SEQ ID NO: 188 of WO2005033321), AAVhu.55 (SEQ ID NO: 187 of WO2005033321), AAVhu.56 (SEQ ID NO: 192 of WO2005033321), AAVhu.57 (SEQ ID NO: 193 of WO2005033321), AAVhu.58 (SEQ ID NO: 194 of WO2005033321), AAVhu.6 (SEQ ID NO: 84 of WO2005033321), AAVhu.60 (SEQ ID NO: 184 of WO2005033321), AAVhu.61 (SEQ ID NO: 185 of WO2005033321), AAVhu.63 (SEQ ID NO: 195 of WO2005033321), AAVhu.64 (SEQ ID NO: 196 of WO2005033321), AAVhu.66 (SEQ ID NO: 197 of WO2005033321), AAVhu.67 (SEQ ID NO: 198 of WO2005033321), AAVhu.7 (SEQ ID NO: 150 of WO2005033321), AAVhu.8 (WO2005033321 SEQ ID NO: 12), AAVhu.9 (SEQ ID NO: 155 of WO2005033321), AAVLG-10/rh.40 (SEQ ID No: 14 of WO2005033321), AAVLG-4/rh.38 (SEQ ID NO: 86 of WO2005033321), AAVLG-4/rh.38 (SEQ ID No: 7 of WO2005033321), AAVN721-8/rh.43 (SEQ ID NO: 163 of WO2005033321), AAVN721-8/rh.43 (SEQ ID No: 43 of WO2005033321), AAVpi.1 (WO2005033321 SEQ ID NO: 28), AAVpi.2 (WO2005033321 SEQ ID NO: 30), AAVpi.3 (WO2005033321 SEQ ID NO: 29), AAVrh.38 (SEQ ID NO: 86 of WO02005033321), AAVrh.40 (SEQ ID NO: 92 of WO2005033321), AAVrh.43 (SEQ ID NO: 163 of WO2005033321), AAVrh.44 (WO2005033321 SEQ ID NO: 34), AAVrh.45 (WO2005033321 SEQ ID NO: 41), AAVrh.47 (WO2005033321 SEQ ID NO: 38), AAVrh.48 (SEQ ID NO: 115 of WO2005033321), AAVrh.49 (SEQ ID NO: 103 of WO2005033321), AAVrh.50 (SEQ ID NO: 108 of WO2005033321), AAVrh.51 (SEQ ID NO: 104 of WO2005033321), AAVrh.52 (SEQ ID NO: 96 of WO2005033321), AAVrh.53 (SEQ ID NO: 97 of WO2005033321), AAVrh.55 (WO 2005033321 SEQ ID NO: 37), AAVrh.56 (SEQ ID NO: 152 of WO2005033321), AAVrh.57 (SEQ ID NO: 105 of WO2005033321), AAVrh.58 (SEQ ID NO: 106 of WO2005033321), AAVrh.59 (WO2005033321 SEQ ID NO: 42), AAVrh.60 (WO2005033321 SEQ ID NO: 31), AAVrh.61 (SEQ ID NO: 107 of WO2005033321), AAVrh.62 (SEQ ID NO: 114 of WO2005033321), AAVrh.64 (SEQ ID NO: 99 of WO2005033321), AAVrh.65 (WO2005033321 SEQ ID NO: 35), AAVrh.68 (WO2005033321 SEQ ID NO: 16), AAVrh.69 (WO2005033321 SEQ ID NO: 39), AAVrh.70 (WO2005033321 SEQ ID NO: 20), AAVrh.72 (WO2005033321 SEQ ID NO: 9), or variants thereof including, but not limited to, AAVcy.2, AAVcy.3, AAVcy.4, AAVcy.5, AAVcy.6, AAVrh.12, AAVrh.17, AAVrh.18, AAVrh.19, AAVrh.21, AAVrh.22, AAVrh.23, AAVrh.24, AAVrh.25, AAVrh.25/42 15, AAVrh.31, AAVrh.32, AAVrh.33, AAVrh.34, AAVrh.35, AAVrh.36, AAVrh.37, AAVrh14. Non limiting examples of variants include SEQ ID NO: 13, 15, 17, 19, 24, 36, 40, 45, 47, 48, 51-54, 60-62, 64-77, 79, 80, 82, 89, 90, 93-95, 98, 100, 101, 109-113, 118-120, 124, 126, 131, 139, 142, 151,154, 158, 161, 162, 165-183, 202, 204-212, 215, 219, 224-236, of WO2005033321, the contents of which are herein incorporated by reference in their entirety.

[0208] In some embodiments, the AAV serotype may be, or have, a sequence as described in International Publication No. WO2015168666, the contents of which are herein incorporated by reference in their entirety, such as, but not limited to, AAVrh8R (SEQ ID NO: 9 of WO2015168666), AAVrh8R A586R mutant (SEQ ID NO: 10 of WO2015168666), AAVrh8R R533A mutant (SEQ ID NO: 11 of WO2015168666), or variants thereof.

[0209] In some embodiments, the AAV serotype may be, or have, a sequence as described in U.S. Pat. No. 9,233,131, the contents of which are herein incorporated by reference in their entirety, such as, but not limited to, AAVhE1.1 (SEQ ID NO:44 of U.S. Pat. No. 9,233,131), AAVhEr1.5 (SEQ ID NO:45 of U.S. Pat. No. 9,233,131), AAVhER1.14 (SEQ ID NO:46 of U.S. Pat. No. 9,233,131), AAVhEr1.8 (SEQ ID NO:47 of U.S. Pat. No. 9,233,131), AAVhEr1.16 (SEQ ID NO:48 of U.S. Pat. No. 9,233,131), AAVhEr1.18 (SEQ ID NO:49 of U.S. Pat. No. 9,233,131), AAVhEr1.35 (SEQ ID NO:50 of U.S. Pat. No. 9,233,131), AAVhEr1.7 (SEQ ID NO:51 of U.S. Pat. No. 9,233,131), AAVhEr1.36 (SEQ ID NO:52 of U.S. Pat. No. 9,233,131), AAVhEr2.29 (SEQ ID NO:53 of U.S. Pat. No. 9,233,131), AAVhEr2.4 (SEQ ID NO:54 of U.S. Pat. No. 9,233,131), AAVhEr2.16 (SEQ ID NO:55 of U.S. Pat. No. 9,233,131), AAVhEr2.30 (SEQ ID NO:56 of U.S. Pat. No. 9,233,131), AAVhEr2.31 (SEQ ID NO:58 of U.S. Pat. No. 9,233,131), AAVhEr2.36 (SEQ ID NO:57 of U.S. Pat. No. 9,233,131), AAVhER1.23 (SEQ ID NO:53 of U.S. Pat. No. 9,233,131), AAVhEr3.1 (SEQ ID NO:59 of U.S. Pat. No. 9,233,131), AAV2.5T (SEQ ID NO:42 of U.S. Pat. No. 9,233,131), or variants thereof.

[0210] In some embodiments, the AAV serotype may be, or have, a sequence as described in United States Patent Publication No. US20150376607, the contents of which are herein incorporated by reference in their entirety, such as, but not limited to, AAV-PAEC (SEQ ID NO:1 of US20150376607), AAV-LK01 (SEQ ID NO:2 of US20150376607), AAV-LK02 (SEQ ID NO:3 of US20150376607), AAV-LK03 (SEQ ID NO:4 of US20150376607), AAV-LK04 (SEQ ID NO:5 of US20150376607), AAV-LK05 (SEQ ID NO:6 of US20150376607), AAV-LK06 (SEQ ID NO:7 of US20150376607), AAV-LK07 (SEQ ID NO:8 of US20150376607), AAV-LK08 (SEQ ID NO:9 of US20150376607), AAV-LK09 (SEQ ID NO: 10 of US20150376607), AAV-LK10 (SEQ ID NO: 11 of US20150376607), AAV-LK11 (SEQ ID NO:12 of US20150376607), AAV-LK12 (SEQ ID NO:13 of US20150376607), AAV-LK13 (SEQ ID NO: 14 of US20150376607), AAV-LK14 (SEQ ID NO:15 of US20150376607), AAV-LK15 (SEQ ID NO: 16 of US20150376607), AAV-LK16 (SEQ ID NO: 17 of US20150376607), AAV-LK17 (SEQ ID NO:18 of US20150376607), AAV-LK18 (SEQ ID NO:19 of US20150376607), AAV-LK19 (SEQ ID NO:20 of US20150376607), AAV-PAEC2 (SEQ ID NO:21 of US20150376607), AAV-PAEC4 (SEQ ID NO:22 of US20150376607), AAV-PAEC6 (SEQ ID NO:23 of US20150376607), AAV-PAEC7 (SEQ ID NO:24 of US20150376607), AAV-PAEC8 (SEQ ID NO:25 of US20150376607), AAV-PAEC11 (SEQ ID NO:26 of US20150376607), AAV-PAEC12 (SEQ ID NO:27, of US20150376607), or variants thereof.

[0211] In some embodiments, the AAV serotype may be, or have, a sequence as described in U.S. Pat. No. 9,163,261, the contents of which are herein incorporated by reference in their entirety, such as, but not limited to, AAV-2-pre-miRNA-101 (SEQ ID NO: 1 U.S. Pat. No. 9,163,261), or variants thereof.

[0212] In some embodiments, the AAV serotype may be, or have, a sequence as described in United States Patent Publication No. US20150376240, the contents of which are herein incorporated by reference in their entirety, such as, but not limited to, AAV-8h (SEQ ID NO: 6 of US20150376240), AAV-8b (SEQ ID NO: 5 of US20150376240), AAV-h (SEQ ID NO: 2 of US20150376240), AAV-b (SEQ ID NO: 1 of US20150376240), or variants thereof.

[0213] In some embodiments, the AAV serotype may be, or have, a sequence as described in United States Patent Publication No. US20160017295, the contents of which are herein incorporated by reference in their entirety, such as, but not limited to, AAV SM 10-2 (SEQ ID NO: 22 of US20160017295), AAV Shuffle 100-1 (SEQ ID NO: 23 of US20160017295), AAV Shuffle 100-3 (SEQ ID NO: 24 of US20160017295), AAV Shuffle 100-7 (SEQ ID NO: 25 of US20160017295), AAV Shuffle 10-2 (SEQ ID NO: 34 of US20160017295), AAV Shuffle 10-6 (SEQ ID NO: 35 of US20160017295), AAV Shuffle 10-8 (SEQ ID NO: 36 of US20160017295), AAV Shuffle 100-2 (SEQ ID NO: 37 of US20160017295), AAV SM 10-1 (SEQ ID NO: 38 of US20160017295), AAV SM 10-8 (SEQ ID NO: 39 of US20160017295), AAV SM 100-3 (SEQ ID NO: 40 of US20160017295), AAV SM 100-10 (SEQ ID NO: 41 of US20160017295), or variants thereof.

[0214] In some embodiments, the AAV serotype may be, or have, a sequence as described in United States Patent Publication No. US20150238550, the contents of which are herein incorporated by reference in their entirety, such as, but not limited to, BNP61 AAV (SEQ ID NO: 1 of US20150238550), BNP62 AAV (SEQ ID NO: 3 of US20150238550), BNP63 AAV (SEQ ID NO: 4 of US20150238550), or variants thereof.

[0215] In some embodiments, the AAV serotype may be or may have a sequence as described in United States Patent Publication No. US20150315612, the contents of which are herein incorporated by reference in their entirety, such as, but not limited to, AAVrh.50 (SEQ ID NO: 108 of US20150315612), AAVrh.43 (SEQ ID NO: 163 of US20150315612), AAVrh.62 (SEQ ID NO: 114 of US20150315612), AAVrh.48 (SEQ ID NO: 115 of US20150315612), AAVhu.19 (SEQ ID NO: 133 of US20150315612), AAVhu.11 (SEQ ID NO: 153 of US20150315612), AAVhu.53 (SEQ ID NO: 186 of US20150315612), AAV4-8/rh.64 (SEQ ID No: 15 of US20150315612), AAVLG-9/hu.39 (SEQ ID No: 24 of US20150315612), AAV54.5/hu.23 (SEQ ID No: 60 of US20150315612), AAV54.2/hu.22 (SEQ ID No: 67 of US20150315612), AAV54.7/hu.24 (SEQ ID No: 66 of US20150315612), AAV54.1/hu.21 (SEQ ID No: 65 of US20150315612), AAV54.4R/hu.27 (SEQ ID No: 64 of US20150315612), AAV46.2/hu.28 (SEQ ID No: 68 of US20150315612), AAV46.6/hu.29 (SEQ ID No: 69 of US20150315612), AAV128.1/hu.43 (SEQ ID No: 80 of US20150315612), or variants thereof.

[0216] In some embodiments, the AAV serotype may be, or have, a sequence as described in International Publication No. WO2015121501, the contents of which are herein incorporated by reference in their entirety, such as, but not limited to, true type AAV (ttAAV) (SEQ ID NO: 2 of WO2015121501), “UPenn AAV10” (SEQ ID NO: 8 of WO2015121501), “Japanese AAV10” (SEQ ID NO: 9 of WO2015121501), or variants thereof.

[0217] According to the present invention, AAV capsid serotype selection or use may be from a variety of species. In one embodiment, the AAV may be an avian AAV (AAAV). The AAAV serotype may be, or have, a sequence as described in U.S. Pat. No. 9,238,800, the contents of which are herein incorporated by reference in their entirety, such as, but not limited to, AAAV (SEQ ID NO: 1, 2, 4, 6, 8, 10, 12, and 14 of U.S. Pat. No. 9,238,800), or variants thereof.

[0218] In one embodiment, the AAV may be a bovine AAV (BAAV). The BAAV serotype may be, or have, a sequence as described in U.S. Pat. No. 9,193,769, the contents of which are herein incorporated by reference in their entirety, such as, but not limited to, BAAV (SEQ ID NO: 1 and 6 of U.S. Pat. No. 9,193,769), or variants thereof. The BAAV serotype may be or have a sequence as described in U.S. Pat. No. 7,427,396, the contents of which are herein incorporated by reference in their entirety, such as, but not limited to, BAAV (SEQ ID NO: 5 and 6 of U.S. Pat. No. 7,427,396), or variants thereof.

[0219] In one embodiment, the AAV may be a caprine AAV. The caprine AAV serotype may be, or have, a sequence as described in U.S. Pat. No. 7,427,396, the contents of which are herein incorporated by reference in their entirety, such as, but not limited to, caprine AAV (SEQ ID NO: 3 of U.S. Pat. No. 7,427,396), or variants thereof.

[0220] In other embodiments the AAV may be engineered as a hybrid AAV from two or more parental serotypes. In one embodiment, the AAV may be AAV2G9 which comprises sequences from AAV2 and AAV9. The AAV2G9 AAV serotype may be, or have, a sequence as described in United States Patent Publication No. US20160017005, the contents of which are herein incorporated by reference in its entirety.

[0221] In one embodiment, the AAV may be a serotype generated by the AAV9 capsid library with mutations in amino acids 390-627 (VP1 numbering) as described by Pulicherla et al. (Molecular Therapy 19(6): 1070-1078 (2011), the contents of which are herein incorporated by reference in their entirety. The serotype and corresponding nucleotide and amino acid substitutions may be, but is not limited to, AAV9.1 (G1594C D532H), AAV6.2 (T1418A and T1436X; V473D and 1479K), AAV9.3 (T1238A; F413Y), AAV9.4 (T1250C and A1617T; F417S), AAV9.5 (A1235G, A1314T, A1642G, C1760T; Q412R, T548A, A587V), AAV9.6 (T1231A; F411I), AAV9.9 (G1203A, G1785T; W595C), AAV9.10 (A1500G, T1676C; M559T), AAV9.11 (A1425T, A1702C, A1769T; T568P, Q590L), AAV9.13 (A1369C, A1720T; N457H, T574S), AAV9.14 (T1340A, T1362C, T1560C, G1713A; L447H), AAV9.16 (A1775T; Q592L), AAV9.24 (T1507C, T1521G; W503R), AAV9.26 (A1337G, A1769C; Y446C, Q590P), AAV9.33 (A1667C; D556A), AAV9.34 (A1534G, C1794T N512D), AAV9.35 (A1289T, T1450A, C1494T, A1515T, C1794A, G1816A; Q430L, Y484N, N98K, V6061), AAV9.40 (A1694T, E565V), AAV9.41 (A1348T, T1362C; T450S), AAV9.44 (A1684C, A1701T, A1737G; N562H, K567N), AAV9.45 (A1492T, C1804T; N498Y, L602F), AAV9.46 (G1441C, T1525C, T1549G; G481R. W509R, L517V), 9.47 (G1241A, G1358A, A1669G, C1745T; S414N, G453D, K557E, T5821), AAV9.48 (C1445T, A1736T; P482L, Q579L), AAV9.50 (A1638T, C1683T, T1805A; Q546H, L602H), AAV9.53 (G1301A, A1405C, C1664T, G1811T; R134Q. S469R, A555V, G604V), AAV9.54 (C1531A, T1609A; L511I, L537M), AAV9.55 (T1605A; F535L), AAV9.58 (C1475T, C1579A; T4921. H527N), AAV.59 (T1336C; Y446H), AAV9.61 (A1493T; N498I), AAV9.64 (C1531A, A1617T; L5111), AAV9.65 (C1335T, T1530C, C1568A; A523D), AAV9.68 (C1510A; P504T), AAV9.80 (G1441A, G481R), AAV9.83 (C1402A, A1500T; P468T, E500D), AAV9.87 (T1464C, T1468C; S490P), AAV9.90 (A1196T; Y399F), AAV9.91 (T1316G, A1583T, C1782G, T1806C; L439R, K5281), AAV9.93 (A1273G, A1421G, A1638C, C1712T, G1732A, A1744T, A1832T; S425G, Q474R, Q546H, P571L, G578R, T582S, D61 IV), AAV9.94 (A1675T; M559L) and AAV9.95 (T1605A; F535L).

[0222] In some embodiments, the AAV serotype may be, or have, a sequence as described in International Publication No. WO2016049230, the contents of which are herein incorporated by reference in their entirety, such as, but not limited to AAVF1/HSC1 (SEQ ID NO: 2 and 20 of WO2016049230), AAVF2/HSC2 (SEQ ID NO: 3 and 21 of WO2016049230), AAVF3/HSC3 (SEQ ID NO: 5 and 22 of WO2016049230), AAVF4/HSC4 (SEQ ID NO: 6 and 23 of WO2016049230), AAVF5/HSC5 (SEQ ID NO: 11 and 25 of WO2016049230), AAVF6/HSC6 (SEQ ID NO: 7 and 24 of WO2016049230), AAVF7/HSC7 (SEQ ID NO: 8 and 27 of WO2016049230), AAVF8/HSC8 (SEQ ID NO: 9 and 28 of WO2016049230), AAVF9/HSC9 (SEQ ID NO: 10 and 29 of WO2016049230), AAVF11/HSC11 (SEQ ID NO: 4 and 26 of WO2016049230), AAVF12/HSC12 (SEQ ID NO: 12 and 30 of WO2016049230), AAVF13/HSC13 (SEQ ID NO: 14 and 31 of WO2016049230), AAVF14/HSC14 (SEQ ID NO: 15 and 32 of WO2016049230), AAVF15/HSC15 (SEQ ID NO: 16 and 33 of WO2016049230), AAVF16/HSC16 (SEQ ID NO: 17 and 34 of WO2016049230), AAVF17/HSC17 (SEQ ID NO: 13 and 35 of WO2016049230), or variants or derivatives thereof.

[0223] In some embodiments, the AAV serotype may be, or have, a sequence as described in U.S. Pat. No. 8,734,809, the contents of which are herein incorporated by reference in their entirety, such as, but not limited to, AAV CBr-E1 (SEQ ID NO: 13 and 87 of U.S. Pat. No. 8,734,809), AAV CBr-E2 (SEQ ID NO: 14 and 88 of U.S. Pat. No. 8,734,809), AAV CBr-E3 (SEQ ID NO: 15 and 89 of U.S. Pat. No. 8,734,809), AAV CBr-E4 (SEQ ID NO: 16 and 90 of U.S. Pat. No. 8,734,809), AAV CBr-E5 (SEQ ID NO: 17 and 91 of U.S. Pat. No. 8,734,809), AAV CBr-c5 (SEQ ID NO: 18 and 92 of U.S. Pat. No. 8,734,809), AAV CBr-E6 (SEQ ID NO: 19 and 93 of U.S. Pat. No. 8,734,809), AAV CBr-E7 (SEQ ID NO: 20 and 94 of U.S. Pat. No. 8,734,809), AAV CBr-E8 (SEQ ID NO: 21 and 95 of U.S. Pat. No. 8,734,809), AAV CLv-D1 (SEQ ID NO: 22 and 96 of US8734809), AAV CLv-D2 (SEQ ID NO: 23 and 97 of U.S. Pat. No. 8,734,809), AAV CLv-D3 (SEQ ID NO: 24 and 98 of U.S. Pat. No. 8,734,809), AAV CLv-D4 (SEQ ID NO: 25 and 99 of U.S. Pat. No. 8,734,809), AAV CLv-D5 (SEQ ID NO: 26 and 100 of U.S. Pat. No. 8,734,809), AAV CLv-D6 (SEQ ID NO: 27 and 101 of U.S. Pat. No. 8,734,809), AAV CLv-D7 (SEQ ID NO: 28 and 102 of U.S. Pat. No. 8,734,809), AAV CLv-D8 (SEQ ID NO: 29 and 103 of U.S. Pat. No. 8,734,809), AAV CLv-E1 (SEQ ID NO: 13 and 87 of U.S. Pat. No. 8,734,809), AAV CLv-R1 (SEQ ID NO: 30 and 104 of U.S. Pat. No. 8,734,809), AAV CLv-R2 (SEQ ID NO: 31 and 105 of U.S. Pat. No. 8,734,809), AAV CLv-R3 (SEQ ID NO: 32 and 106 of U.S. Pat. No. 8,734,809), AAV CLv-R4 (SEQ ID NO: 33 and 107 of U.S. Pat. No. 8,734,809), AAV CLv-R1 (SEQ ID NO: 34 and 108 of U.S. Pat. No. 8,734,809), AAV CLv-R6 (SEQ ID NO: 35 and 109 of U.S. Pat. No. 8,734,809), AAV CLv-R7 (SEQ ID NO: 36 and 110 of U.S. Pat. No. 8,734,809), AAV CLv-R8 (SEQ ID NO: 37 and 111 of U.S. Pat. No. 8,734,809), AAV CLv-R9 (SEQ ID NO: 38 and 112 of U.S. Pat. No. 8,734,809), AAV CLg-F1 (SEQ ID NO: 39 and 113 of U.S. Pat. No. 8,734,809), AAV CLg-F2 (SEQ ID NO: 40 and 114 of U.S. Pat. No. 8,734,809), AAV CLg-F3 (SEQ ID NO: 41 and 115 of U.S. Pat. No. 8,734,809), AAV CLg-F4 (SEQ ID NO: 42 and 116 of U.S. Pat. No. 8,734,809), AAV CLg-F5 (SEQ ID NO: 43 and 117 of U.S. Pat. No. 8,734,809), AAV CLg-F6 (SEQ ID NO: 43 and 117 of U.S. Pat. No. 8,734,809), AAV CLg-F7 (SEQ ID NO: 44 and 118 of U.S. Pat. No. 8,734,809), AAV CLg-F8 (SEQ ID NO: 43 and 117 of U.S. Pat. No. 8,734,809), AAV CSp-1 (SEQ ID NO: 45 and 119 of U.S. Pat. No. 8,734,809), AAV CSp-10 (SEQ ID NO: 46 and 120 of U.S. Pat. No. 8,734,809), AAV CSp-11 (SEQ ID NO: 47 and 121 of U.S. Pat. No. 8,734,809), AAV CSp-2 (SEQ ID NO: 48 and 122 of U.S. Pat. No. 8,734,809), AAV CSp-3 (SEQ ID NO: 49 and 123 of U.S. Pat. No. 8,734,809), AAV CSp-4 (SEQ ID NO: 50 and 124 of U.S. Pat. No. 8,734,809), AAV CSp-6 (SEQ ID NO: 51 and 125 of U.S. Pat. No. 8,734,809), AAV CSp-7 (SEQ ID NO: 52 and 126 of U.S. Pat. No. 8,734,809), AAV CSp-8 (SEQ ID NO: 53 and 127 of U.S. Pat. No. 8,734,809), AAV CSp-9 (SEQ ID NO: 54 and 128 of U.S. Pat. No. 8,734,809), AAV CHt-2 (SEQ ID NO: 55 and 129 of U.S. Pat. No. 8,734,809), AAV CHt-3 (SEQ ID NO: 56 and 130 of U.S. Pat. No. 8,734,809), AAV CKd-1 (SEQ ID NO: 57 and 131 of U.S. Pat. No. 8,734,809), AAV CKd-10 (SEQ ID NO: 58 and 132 of U.S. Pat. No. 8,734,809), AAV CKd-2 (SEQ ID NO: 59 and 133 of U.S. Pat. No. 8,734,809), AAV CKd-3 (SEQ ID NO: 60 and 134 of U.S. Pat. No. 8,734,809), AAV CKd-4 (SEQ ID NO: 61 and 135 of U.S. Pat. No. 8,734,809), AAV CKd-6 (SEQ ID NO: 62 and 136 of U.S. Pat. No. 8,734,809), AAV CKd-7 (SEQ ID NO: 63 and 137 of U.S. Pat. No. 8,734,809), AAV CKd-8 (SEQ ID NO: 64 and 138 of U.S. Pat. No. 8,734,809), AAV CLv-1 (SEQ ID NO: 35 and 139 of U.S. Pat. No. 8,734,809), AAV CLv-12 (SEQ ID NO: 66 and 140 of U.S. Pat. No. 8,734,809), AAV CLv-13 (SEQ ID NO: 67 and 141 of U.S. Pat. No. 8,734,809), AAV CLv-2 (SEQ ID NO: 68 and 142 of U.S. Pat. No. 8,734,809), AAV CLv-3 (SEQ ID NO: 69 and 143 of U.S. Pat. No. 8,734,809), AAV CLv-4 (SEQ ID NO: 70 and 144 of U.S. Pat. No. 8,734,809), AAV CLv-6 (SEQ ID NO: 71 and 145 of U.S. Pat. No. 8,734,809), AAV CLv-8 (SEQ ID NO: 72 and 146 of U.S. Pat. No. 8,734,809), AAV CKd-B1 (SEQ ID NO: 73 and 147 of U.S. Pat. No. 8,734,809), AAV CKd-B2 (SEQ ID NO: 74 and 148 of U.S. Pat. No. 8,734,809), AAV CKd-B3 (SEQ ID NO: 75 and 149 of U.S. Pat. No. 8,734,809), AAV CKd-B4 (SEQ ID NO: 76 and 150 of U.S. Pat. No. 8,734,809), AAV CKd-B5 (SEQ ID NO: 77 and 151 of U.S. Pat. No. 8,734,809), AAV CKd-B6 (SEQ ID NO: 78 and 152 of U.S. Pat. No. 8,734,809), AAV CKd-B7 (SEQ ID NO: 79 and 153 of U.S. Pat. No. 8,734,809), AAV CKd-B8 (SEQ ID NO: 80 and 154 of U.S. Pat. No. 8,734,809), AAV CKd-H1 (SEQ ID NO: 81 and 155 of U.S. Pat. No. 8,734,809), AAV CKd-H2 (SEQ ID NO: 82 and 156 of U.S. Pat. No. 8,734,809), AAV CKd-H3 (SEQ ID NO: 83 and 157 of U.S. Pat. No. 8,734,809), AAV CKd-H4 (SEQ ID NO: 84 and 158 of U.S. Pat. No. 8,734,809), AAV CKd-H5 (SEQ ID NO: 85 and 159 of U.S. Pat. No. 8,734,809), AAV CKd-H6 (SEQ ID NO: 77 and 151 of U.S. Pat. No. 8,734,809), AAV CHt-1 (SEQ ID NO: 86 and 160 of U.S. Pat. No. 8,734,809), AAV CLv1-1 (SEQ ID NO: 171 of U.S. Pat. No. 8,734,809), AAV CLv1-2 (SEQ ID NO: 172 of U.S. Pat. No. 8,734,809), AAV CLv1-3 (SEQ ID NO: 173 of U.S. Pat. No. 8,734,809), AAV CLv1-4 (SEQ ID NO: 174 of U.S. Pat. No. 8,734,809), AAV Clv1-7 (SEQ ID NO: 175 of U.S. Pat. No. 8,734,809), AAV Clv1-8 (SEQ ID NO: 176 of U.S. Pat. No. 8,734,809), AAV Clv1-9 (SEQ ID NO: 177 of U.S. Pat. No. 8,734,809), AAV Clv1-10 (SEQ ID NO: 178 of U.S. Pat. No. 8,734,809), AAV.VR-355 (SEQ ID NO: 181 of U.S. Pat. No. 8,734,809), AAV.hu.48R3 (SEQ ID NO: 183 of U.S. Pat. No. 8,734,809), or variants or derivatives thereof.

[0224] In some embodiments, the AAV serotype may be, or have, a sequence as described in International Publication No. WO2016065001, the contents of which are herein incorporated by reference in their entirety, such as, but not limited to AAV CHt-P2 (SEQ ID NO: 1 and 51 of WO2016065001), AAV CHt-P5 (SEQ ID NO: 2 and 52 of WO2016065001), AAV CHt-P9 (SEQ ID NO: 3 and 53 of WO2016065001), AAV CBr-7.1 (SEQ ID NO: 4 and 54 of WO2016065001), AAV CBr-7.2 (SEQ ID NO: 5 and 55 of WO2016065001), AAV CBr-7.3 (SEQ ID NO: 6 and 56 of WO2016065001), AAV CBr-7.4 (SEQ ID NO: 7 and 57 of WO2016065001), AAV CBr-7.5 (SEQ ID NO: 8 and 58 of WO2016065001), AAV CBr-7.7 (SEQ ID NO: 9 and 59 of WO2016065001), AAV CBr-7.8 (SEQ ID NO: 10 and 60 of WO2016065001), AAV CBr-7.10 (SEQ ID NO: 11 and 61 of WO2016065001), AAV CKd-N3 (SEQ ID NO: 12 and 62 of WO2016065001), AAV CKd-N4 (SEQ ID NO: 13 and 63 of WO2016065001), AAV CKd-N9 (SEQ ID NO: 14 and 64 of WO2016065001), AAV CLv-L4 (SEQ ID NO: 15 and 65 of WO2016065001), AAV CLv-L5 (SEQ ID NO: 16 and 66 of WO2016065001), AAV CLv-L6 (SEQ ID NO: 17 and 67 of WO2016065001), AAV CLv-K1 (SEQ ID NO: 18 and 68 of WO2016065001), AAV CLv-K3 (SEQ ID NO: 19 and 69 of WO02016065001), AAV CLv-K6 (SEQ ID NO: 20 and 70 of WO2016065001), AAV CLv-M1 (SEQ ID NO: 21 and 71 of WO2016065001), AAV CLv-M11 (SEQ ID NO: 22 and 72 of WO2016065001), AAV CLv-M2 (SEQ ID NO: 23 and 73 of WO2016065001), AAV CLv-M5 (SEQ ID NO: 24 and 74 of WO2016065001), AAV CLv-M6 (SEQ ID NO: 25 and 75 of WO2016065001), AAV CLv-M7 (SEQ ID NO: 26 and 76 of WO2016065001), AAV CLv-M8 (SEQ ID NO: 27 and 77 of WO2016065001), AAV CLv-M9 (SEQ ID NO: 28 and 78 of WO2016065001), AAV CHt-P1 (SEQ ID NO: 29 and 79 of WO2016065001), AAV CHt-P6 (SEQ ID NO: 30 and 80 of WO2016065001), AAV CHt-P8 (SEQ ID NO: 31 and 81 of WO2016065001), AAV CHt-6.1 (SEQ ID NO: 32 and 82 of WO2016065001), AAV CHt-6.10 (SEQ ID NO: 33 and 83 of WO2016065001), AAV CHt-6.5 (SEQ ID NO: 34 and 84 of WO2016065001), AAV CHt-6.6 (SEQ ID NO: 35 and 85 of WO2016065001), AAV CHt-6.7 (SEQ ID NO: 36 and 86 of WO2016065001), AAV CHt-6.8 (SEQ ID NO: 37 and 87 of WO2016065001), AAV CSp-8.10 (SEQ ID NO: 38 and 88 of WO2016065001), AAV CSp-8.2 (SEQ ID NO: 39 and 89 of WO2016065001), AAV CSp-8.4 (SEQ ID NO: 40 and 90 of WO2016065001), AAV CSp-8.5 (SEQ ID NO: 41 and 91 of WO2016065001), AAV CSp-8.6 (SEQ ID NO: 42 and 92 of WO2016065001), AAV CSp-8.7 (SEQ ID NO: 43 and 93 of WO2016065001), AAV CSp-8.8 (SEQ ID NO: 44 and 94 of WO2016065001), AAV CSp-8.9 (SEQ ID NO: 45 and 95 of WO2016065001), AAV CBr-B7.3 (SEQ ID NO: 46 and 96 of WO2016065001), AAV CBr-B7.4 (SEQ ID NO: 47 and 97 of WO2016065001), AAV3B (SEQ ID NO: 48 and 98 of WO2016065001), AAV4 (SEQ ID NO: 49 and 99 of WO2016065001), AAV5 (SEQ ID NO: 50 and 100 of WO2016065001), or variants or derivatives thereof.

[0225] In some embodiments, the AAV serotype may be, or have, a modification as described in United States Publication No. US 20160361439, the contents of which are herein incorporated by reference in their entirety, such as but not limited to, Y252F, Y272F, Y444F, Y500F, Y700F, Y704F, Y730F, Y275F, Y281F, Y508F, Y576F, Y612G, Y673F, and Y720F of the wild-type AAV1, AAV2, AAV3, AAV4, AAV5, AAV6, AAV7, AAV8, AAV9, AAV10, AAV11, AAV12, and hybrids thereof.

[0226] In some embodiments, the AAV serotype may be, or have, a mutation as described in U.S. Pat. No. 9,546,112, the contents of which are herein incorporated by reference in their entirety, such as, but not limited to, at least two, but not all the F129L, D418E. K531E, L584F, V598A and H642N mutations in the sequence of AAV6 (SEQ ID NO:4 of U.S. Pat. No. 9,546,112), AAV1 (SEQ ID NO:6 of U.S. Pat. No. 9,546,112), AAV2, AAV3, AAV4, AAV5, AAV7, AAV9, AAV10 or AAV11 or derivatives thereof. In yet another embodiment, the AAV serotype may be, or have, an AAV6 sequence comprising the K531E mutation (SEQ ID NO:5 of U.S. Pat. No. 9,546,112).

[0227] In some embodiments, the AAV serotype may be, or have, a mutation in the AAV1 sequence, as described in United States Publication No. US 20130224836, the contents of which are herein incorporated by reference in their entirety, such as, but not limited to, at least one of the surface-exposed tyrosine residues, preferably, at positions 252, 273, 445, 701, 705 and 731 of AAV1 (SEQ ID NO: 2 of US 20130224836) substituted with another amino acid, preferably with a phenylalanine residue. In one embodiment, the AAV serotype may be, or have, a mutation in the AAV9 sequence, such as, but not limited to, at least one of the surface-exposed tyrosine residues, preferably, at positions 252, 272, 444, 500, 700, 704 and 730 of AAV2 (SEQ ID NO: 4 of US 20130224836) substituted with another amino acid, preferably with a phenylalanine residue. In one embodiment, the tyrosine residue at position 446 of AAV9 (SEQ ID NO: 6 US 20130224836) is substituted with a phenylalanine residue.

[0228] In some embodiments, the serotype may be AAV2 or a variant thereof, as described in International Publication No. WO2016130589, herein incorporated by reference in its entirety. The amino acid sequence of AAV2 may comprise N587A, E548A, or N708A mutations. In one embodiment, the amino acid sequence of any AAV may comprise a V708K mutation.

[0229] In one embodiment, the AAV may be a serotype selected from any of those found in Table 1.

[0230] In one embodiment, the AAV may comprise a sequence, fragment or variant thereof, of the sequences in Table 1.

[0231] In one embodiment, the AAV may be encoded by a sequence, fragment or variant as described in Table 1.

TABLE 1
AAV Serotypes

| | SEQ | |
|---|---|---|
| | ID | |
| Serotype | NO | Reference Information |
| AAV1 | 1 | US20150159173 SEQ ID NO: 11, |
| | | US20150315612 SEQ ID NO: 202 |
| AAV1 | 2 | US20160017295 SEQ ID NO: 1 |
| | | US20030138772 SEQ ID NO: 64, |
| | | US20150159173 SEQ ID NO: 27, |
| | | US20150315612 SEQ ID NO: 219, |
| | | U.S. Pat. No. 7,198,951 SEQ ID NO: 5 |
| AAV1 | 3 | US20030138772 SEQ ID NO: 6 |
| AAV1.3 | 4 | US20030138772 SEQ ID NO: 14 |
| AAV10 | 5 | US20030138772 SEQ ID NO: 117 |
| AAV10 | 6 | WO2015121501 SEQ ID NO: 9 |
| AAV10 | 7 | WO2015121501 SEQ ID NO: 8 |
| AAV11 | 8 | US20030138772 SEQ ID NO: 118 |
| AAV12 | 9 | US20030138772 SEQ ID NO: 119 |
| AAV2 | 10 | US20150159173 SEQ ID NO: 7, |
| | | US20150315612 SEQ ID NO: 211 |
| AAV2 | 11 | US20030138772 SEQ ID NO: 70, |
| | | US20150159173 SEQ ID NO: 23, |
| | | US20150315612 SEQ ID NO: 221, |
| | | US20160017295 SEQ ID NO: 2, |
| | | U.S. Pat. No. 6,156,303 SEQ ID NO: 4, |
| | | U.S. Pat. No. 7,198,951 SEQ ID NO: 4, |
| | | WO2015121501 SEQ ID NO: 1 |
| AAV2 | 12 | U.S. Pat. No. 6,156,303 SEQ ID NO: 8 |
| AAV2 | 13 | US20030138772 SEQ ID NO: 7 |
| AAV2 | 14 | U.S. Pat. No. 6,156,303 SEQ ID NO: 3 |
| AAV2.5T | 15 | U.S. Pat. No. 9,233,131 SEQ ID NO: 42 |
| AAV223.10 | 16 | US20030138772 SEQ ID NO: 75 |
| AAV223.2 | 17 | US20030138772 SEQ ID NO: 49 |
| AAV223.2 | 18 | US20030138772 SEQ ID NO: 76 |
| AAV223.4 | 19 | US20030138772 SEQ ID NO: 50 |
| AAV223.4 | 20 | US20030138772 SEQ ID NO: 73 |
| AAV223.5 | 21 | US20030138772 SEQ ID NO: 51 |
| AAV223.5 | 22 | US20030138772 SEQ ID NO: 74 |
| AAV223.6 | 23 | US20030138772 SEQ ID NO: 52 |
| AAV223.6 | 24 | US20030138772 SEQ ID NO: 78 |
| AAV223.7 | 25 | US20030138772 SEQ ID NO: 53 |
| AAV223.7 | 26 | US20030138772 SEQ ID NO: 77 |
| AAV29.3 | 27 | US20030138772 SEQ ID NO: 82 |
| AAV29.4 | 28 | US20030138772 SEQ ID NO: 12 |
| AAV29.5 | 29 | US20030138772 SEQ ID NO: 83 |
| AAV29.5 | 30 | US20030138772 SEQ ID NO: 13 |
| (AAVbb.2) | | |
| AAV3 | 31 | US20150159173 SEQ ID NO: 12 |
| AAV3 | 32 | US20030138772 SEQ ID NO: 71, |
| | | US20150159173 SEQ ID NO: 28, |
| | | US20160017295 SEQ ID NO: 3, |
| | | U.S. Pat. No. 7,198,951 SEQ ID NO: 6 |
| AAV3 | 33 | US20030138772 SEQ ID NO: 8 |
| AAV3.3b | 34 | US20030138772 SEQ ID NO: 72 |
| AAV3-3 | 35 | US20150315612 SEQ ID NO: 200 |
| AAV3-3 | 36 | US20150315612 SEQ ID NO: 217 |
| AAV3a | 37 | U.S. Pat. No. 6,156,303 SEQ ID NO: 5 |
| AAV3a | 38 | U.S. Pat. No. 6,156,303 SEQ ID NO: 9 |
| AAV3b | 39 | U.S. Pat. No. 6,156,303 SEQ ID NO: 6 |
| AAV3b | 40 | U.S. Pat. No. 6,156,303 SEQ ID NO: 10 |
| AAV3b | 41 | U.S. Pat. No. 6,156,303 SEQ ID NO: 1 |
| AAV4 | 42 | US20140348794 SEQ ID NO: 17 |
| AAV4 | 43 | US20140348794 SEQ ID NO: 5 |
| AAV4 | 44 | US20140348794 SEQ ID NO: 3 |
| AAV4 | 45 | US20140348794 SEQ ID NO: 14 |
| AAV4 | 46 | US20140348794 SEQ ID NO: 15 |
| AAV4 | 47 | US20140348794 SEQ ID NO: 19 |
| AAV4 | 48 | US20140348794 SEQ ID NO: 12 |
| AAV4 | 49 | US20140348794 SEQ ID NO: 13 |
| AAV4 | 50 | US20140348794 SEQ ID NO: 7 |
| AAV4 | 51 | US20140348794 SEQ ID NO: 8 |
| AAV4 | 52 | US20140348794 SEQ ID NO: 9 |
| AAV4 | 53 | US20140348794 SEQ ID NO: 2 |
| AAV4 | 54 | US20140348794 SEQ ID NO: 10 |
| AAV4 | 55 | US20140348794 SEQ ID NO: 11 |
| AAV4 | 56 | US20140348794 SEQ ID NO: 18 |
| AAV4 | 57 | US20030138772 SEQ ID NO: 63, |
| | | US20160017295 SEQ ID NO: 4, |
| | | US20140348794 SEQ ID NO: 4 |
| AAV4 | 58 | US20140348794 SEQ ID NO: 16 |
| AAV4 | 59 | US20140348794 SEQ ID NO: 20 |
| AAV4 | 60 | US20140348794 SEQ ID NO: 6 |
| AAV4 | 61 | US20140348794 SEQ ID NO: 1 |
| AAV42.2 | 62 | US20030138772 SEQ ID NO: 9 |
| AAV42.2 | 63 | US20030138772 SEQ ID NO: 102 |
| AAV42.3b | 64 | US20030138772 SEQ ID NO: 36 |
| AAV42.3B | 65 | US20030138772 SEQ ID NO: 107 |
| AAV42.4 | 66 | US20030138772 SEQ ID NO: 33 |
| AAV42.4 | 67 | US20030138772 SEQ ID NO: 88 |
| AAV42.8 | 68 | US20030138772 SEQ ID NO: 27 |
| AAV42.8 | 69 | US20030138772 SEQ ID NO: 85 |
| AAV43.1 | 70 | US20030138772 SEQ ID NO: 39 |
| AAV43.1 | 71 | US20030138772 SEQ ID NO: 92 |
| AAV43.12 | 72 | US20030138772 SEQ ID NO: 41 |
| AAV43.12 | 73 | US20030138772 SEQ ID NO: 93 |
| AAV43.20 | 74 | US20030138772 SEQ ID NO: 42 |
| AAV43.20 | 75 | US20030138772 SEQ ID NO: 99 |
| AAV43.21 | 76 | US20030138772 SEQ ID NO: 43 |
| AAV43.21 | 77 | US20030138772 SEQ ID NO: 96 |
| AAV43.23 | 78 | US20030138772 SEQ ID NO: 44 |
| AAV43.23 | 79 | US20030138772 SEQ ID NO: 98 |
| AAV43.25 | 80 | US20030138772 SEQ ID NO: 45 |
| AAV43.25 | 81 | US20030138772 SEQ ID NO: 97 |
| AAV43.5 | 82 | US20030138772 SEQ ID NO: 40 |
| AAV43.5 | 83 | US20030138772 SEQ ID NO: 94 |
| AAV4-4 | 84 | US20150315612 SEQ ID NO: 201 |
| AAV4-4 | 85 | US20150315612 SEQ ID NO: 218 |
| AAV44.1 | 86 | US20030138772 SEQ ID NO: 46 |
| AAV44.1 | 87 | US20030138772 SEQ ID NO: 79 |
| AAV44.5 | 88 | US20030138772 SEQ ID NO: 47 |
| AAV44.5 | 89 | US20030138772 SEQ ID NO: 80 |
| AAV4407 | 90 | US20150315612 SEQ ID NO: 90 |
| AAV5 | 91 | U.S. Pat. No. 7,427,396 SEQ ID NO: 1 |
| AAV5 | 92 | US20030138772 SEQ ID NO: 114 |
| AAV5 | 93 | US20160017295 SEQ ID NO: 5, |
| | | U.S. Pat. No. 7,427,396 SEQ ID NO: 2, |
| | | US20150315612 SEQ ID NO: 216 |
| AAV5 | 94 | US20150315612 SEQ ID NO: 199 |
| AAV6 | 95 | US20150159173 SEQ ID NO: 13 |
| AAV6 | 96 | US20030138772 SEQ ID NO: 65, |
| | | US20150159173 SEQ ID NO: 29, |
| | | US20160017295 SEQ ID NO: 6, |
| | | U.S. Pat. No. 6,156,303 SEQ ID NO: 7 |
| AAV6 | 97 | U.S. Pat. No. 6,156,303 SEQ ID NO: 11 |
| AAV6 | 98 | U.S. Pat. No. 6,156,303 SEQ ID NO: 2 |
| AAV6 | 99 | US20150315612 SEQ ID NO: 203 |
| AAV6 | 100 | US20150315612 SEQ ID NO: 220 |
| AAV6.1 | 101 | US20150159173 |
| AAV6.12 | 102 | US20150159173 |
| AAV6.2 | 103 | US20150159173 |
| AAV7 | 104 | US20150159173 SEQ ID NO: 14 |
| AAV7 | 105 | US20150315612 SEQ ID NO: 183 |
| AAV7 | 106 | US20030138772 SEQ ID NO: 2, |
| | | US20150159173 SEQ ID NO: 30, |
| | | US20150315612 SEQ ID NO: 181, |
| | | US20160017295 SEQ ID NO: 7 |
| AAV7 | 107 | US20030138772 SEQ ID NO: 3 |
| AAV7 | 108 | US20030138772 SEQ ID NO: 1, |
| | | US20150315612 SEQ ID NO: 180 |
| AAV7 | 109 | US20150315612 SEQ ID NO: 213 |
| AAV7 | 110 | US20150315612 SEQ ID NO: 222 |
| AAV8 | 111 | US20150159173 SEQ ID NO: 15 |
| AAV8 | 112 | US20150376240 SEQ ID NO: 7 |
| AAV8 | 113 | US20030138772 SEQ ID NO: 4, |
| | | US20150315612 SEQ ID NO: 182 |
| AAV8 | 114 | US20030138772 SEQ ID NO: 95, |
| | | US20140359799 SEQ ID NO: 1, |
| | | US20150159173 SEQ ID NO: 31, |
| | | US20160017295 SEQ ID NO: 8, |
| | | U.S. Pat. No. 7,198,951 SEQ ID NO: 7, |
| | | US20150315612 SEQ ID NO: 223 |
| AAV8 | 115 | US20150376240 SEQ ID NO: 8 |
| AAV8 | 116 | US20150315612 SEQ ID NO: 214 |
| AAV-8b | 117 | US20150376240 SEQ ID NO: 5 |
| AAV-8b | 118 | US20150376240 SEQ ID NO: 3 |
| AAV-8h | 119 | US20150376240 SEQ ID NO: 6 |
| AAV-8h | 120 | US20150376240 SEQ ID NO: 4 |
| AAV9 | 121 | US20030138772 SEQ ID NO: 5 |
| AAV9 | 122 | U.S. Pat. No. 7,198,951 SEQ ID NO: 1 |
| AAV9 | 123 | US20160017295 SEQ ID NO: 9 |
| AAV9 | 124 | US20030138772 SEQ ID NO: 100, |
| | | U.S. Pat. No. 7,198,951 SEQ ID NO: 2 |
| AAV9 | 125 | U.S. Pat. No. 7,198,951 SEQ ID NO: 3 |
| AAV9 | 126 | U.S. Pat. No. 7,906,111 SEQ ID NO: 3; |
| (AAVhu.14) | | WO2015038958 SEQ ID NO: 11 |
| AAV9 | 127 | U.S. Pat. No. 7,906,111 SEQ ID NO: 123: |
| (AAVhu.14) | | WO2015038958 SEQ ID NO: 2 |
| AAVA3.1 | 128 | US20030138772 SEQ ID NO: 120 |
| AAVA3.3 | 129 | US20030138772 SEQ ID NO: 57 |
| AAVA3.3 | 130 | US20030138772 SEQ ID NO: 66 |
| AAVA3.4 | 131 | US20030138772 SEQ ID NO: 54 |
| AAVA3.4 | 132 | US20030138772 SEQ ID NO: 68 |
| AAVA3.5 | 133 | US20030138772 SEQ ID NO: 55 |
| AAVA3.5 | 134 | US20030138772 SEQ ID NO: 69 |
| AAVA3.7 | 135 | US20030138772 SEQ ID NO: 56 |
| AAVA3.7 | 136 | US20030138772 SEQ ID NO: 67 |
| AAV29.3 | 137 | US20030138772 SEQ ID NO: 11 |
| (AAVbb.1) | | |
| AAVC2 | 138 | US20030138772 SEQ ID NO: 61 |
| AAVCh.5 | 139 | US20150159173 SEQ ID NO: 46, |
| | | US20150315612 SEQ ID NO: 234 |
| AAVcy.2 | 140 | US20030138772 SEQ ID NO: 15 |
| (AAV13.3) | | |
| AAV24.1 | 141 | US20030138772 SEQ ID NO: 101 |
| AAVcy.3 | 142 | US20030138772 SEQ ID NO: 16 |
| (AAV24.1) | | |
| AAV27.3 | 143 | US20030138772 SEQ ID NO: 104 |
| AAVcy.4 | 144 | US20030138772 SEQ ID NO: 17 |
| (AAV27.3) | | |
| AAVcy.5 | 145 | US20150315612 SEQ ID NO: 227 |
| AAV7.2 | 146 | US20030138772 SEQ ID NO: 103 |
| AAVcy.5 | 147 | US20030138772 SEQ ID NO: 18 |
| (AAV7.2) | | |
| AAV16.3 | 148 | US20030138772 SEQ ID NO: 105 |
| AAVcy.6 | 149 | US20030138772 SEQ ID NO: 10 |
| (AAV16.3) | | |
| AAVcy.5 | 150 | US20150159173 SEQ ID NO: 8 |
| AAVcy.5 | 151 | US20150159173 SEQ ID NO: 24 |
| AAVCy.5R1 | 152 | US20150159173 |
| AAVCy.5R2 | 153 | US20150159173 |
| AAVCy.5R3 | 154 | US20150159173 |
| AAVCy.5R4 | 155 | US20150159173 |
| AAVDJ | 156 | US20140359799 SEQ ID NO: 3, |
| | | U.S. Pat. No. 7,588,772 SEQ ID NO: 2 |
| AAVDJ | 157 | US20140359799 SEQ ID NO: 2, |
| | | U.S. Pat. No. 7,588,772 SEQ ID NO: 1 |
| AAVDJ-8 | 158 | U.S. Pat. No. 7,588,772; Grimm et al 2008 |
| AAVDJ-8 | 159 | U.S. Pat. No. 7,588,772; Grimm et al 2008 |
| AAVF5 | 160 | US20030138772 SEQ ID NO: 110 |
| AAVH2 | 161 | US20030138772 SEQ ID NO: 26 |
| AAVH6 | 162 | US20030138772 SEQ ID NO: 25 |
| AAVhE1.1 | 163 | U.S. Pat. No. 9,233,131 SEQ ID NO: 44 |
| AAVhEr1.14 | 164 | U.S. Pat. No. 9,233,131 SEQ ID NO: 46 |
| AAVhEr1.16 | 165 | U.S. Pat. No. 9,233,131 SEQ ID NO: 48 |
| AAVhEr1.18 | 166 | U.S. Pat. No. 9,233,131 SEQ ID NO: 49 |
| AAVhEr1.23 | 167 | U.S. Pat. No. 9,233,131 SEQ ID NO: 53 |
| (AAVhEr2.29) | | |
| AAVhEr1.35 | 168 | U.S. Pat. No. 9,233,131 SEQ ID NO: 50 |
| AAVhEr1.36 | 169 | U.S. Pat. No. 9,233,131 SEQ ID NO: 52 |
| AAVhEr1.5 | 170 | U.S. Pat. No. 9,233,131 SEQ ID NO: 45 |
| AAVhEr1.7 | 171 | U.S. Pat. No. 9,233,131 SEQ ID NO: 51 |
| AAVhEr1.8 | 172 | U.S. Pat. No. 9,233,131 SEQ ID NO: 47 |
| AAVhEr2.16 | 173 | U.S. Pat. No. 9,233,131 SEQ ID NO: 55 |
| AAVhEr2.30 | 174 | U.S. Pat. No. 9,233,131 SEQ ID NO: 56 |
| AAVhEr2.31 | 175 | U.S. Pat. No. 9,233,131 SEQ ID NO: 58 |
| AAVhEr2.36 | 176 | U.S. Pat. No. 9,233,131 SEQ ID NO: 57 |
| AAVhEr2.4 | 177 | U.S. Pat. No. 9,233,131 SEQ ID NO: 54 |
| AAVhEr3.1 | 178 | U.S. Pat. No. 9,233,131 SEQ ID NO: 59 |
| AAVhu.1 | 179 | US20150315612 SEQ ID NO: 46 |
| AAVhu.1 | 180 | US20150315612 SEQ ID NO: 144 |
| AAVhu.10 | 181 | US20150315612 SEQ ID NO: 56 |
| (AAV16.8) | | |
| AAVhu.10 | 182 | US20150315612 SEQ ID NO: 156 |
| (AAV16.8) | | |
| AAVhu.11 | 183 | US20150315612 SEQ ID NO: 57 |
| (AAV16.12) | | |
| AAVhu.11 | 184 | US20150315612 SEQ ID NO: 153 |
| (AAV16.12) | | |
| AAVhu.12 | 185 | US20150315612 SEQ ID NO: 59 |
| AAVhu.12 | 186 | US20150315612 SEQ ID NO: 154 |
| AAVhu.13 | 187 | US20150159173 SEQ ID NO: 16, |
| | | US20150315612 SEQ ID NO: 71 |
| AAVhu.13 | 188 | US20150159173 SEQ ID NO: 32, |
| | | US20150315612 SEQ ID NO: 129 |
| AAVhu.136.1 | 189 | US20150315612 SEQ ID NO: 165 |
| AAVhu.140.1 | 190 | US20150315612 SEQ ID NO: 166 |
| AAVhu.140.2 | 191 | US20150315612 SEQ ID NO: 167 |
| AAVhu.145.6 | 192 | US20150315612 SEQ ID NO: 178 |
| AAVhu.15 | 193 | US20150315612 SEQ ID NO: 147 |
| AAVhu.15 | 194 | US20150315612 SEQ ID NO: 50 |
| (AAV33.4) | | |
| AAVhu.156.1 | 195 | US20150315612 SEQ ID NO: 179 |
| AAVhu.16 | 196 | US20150315612 SEQ ID NO: 148 |
| AAVhu.16 | 197 | US20150315612 SEQ ID NO: 51 |
| (AAV33.8) | | |
| AAVhu.17 | 198 | US20150315612 SEQ ID NO: 83 |
| AAVhu.17 | 199 | US20150315612 SEQ ID NO: 4 |
| (AAV33.12) | | |
| AAVhu.172.1 | 200 | US20150315612 SEQ ID NO: 171 |
| AAVhu.172.2 | 201 | US20150315612 SEQ ID NO: 172 |
| AAVhu.173.4 | 202 | US20150315612 SEQ ID NO: 173 |
| AAVhu.173.8 | 203 | US20150315612 SEQ ID NO: 175 |
| AAVhu.18 | 204 | US20150315612 SEQ ID NO: 52 |
| AAVhu.18 | 205 | US20150315612 SEQ ID NO: 149 |
| AAVhu.19 | 206 | US20150315612 SEQ ID NO: 62 |
| AAVhu.19 | 207 | US20150315612 SEQ ID NO: 133 |
| AAVhu.2 | 208 | US20150315612 SEQ ID NO: 48 |
| AAVhu.2 | 209 | US20150315612 SEQ ID NO: 143 |
| AAVhu.20 | 210 | US20150315612 SEQ ID NO: 63 |
| AAVhu.20 | 213 | US20150315612 SEQ ID NO: 134 |
| AAVhu.21 | 212 | US20150315612 SEQ ID NO: 65 |
| AAVhu.21 | 213 | US20150315612 SEQ ID NO: 135 |
| AAVhu.22 | 214 | US20150315612 SEQ ID NO: 67 |
| AAVhu.22 | 215 | US20150315612 SEQ ID NO: 138 |
| AAVhu.23 | 216 | US20150315612 SEQ ID NO: 60 |
| AAVhu.23.2 | 217 | US20150315612 SEQ ID NO: 137 |
| AAVhu.24 | 218 | US20150315612 SEQ ID NO: 66 |
| AAVhu.24 | 219 | US20150315612 SEQ ID NO: 136 |
| AAVhu.25 | 220 | US20150315612 SEQ ID NO: 49 |
| AAVhu.25 | 221 | US20150315612 SEQ ID NO: 146 |
| AAVhu.26 | 222 | US20150159173 SEQ ID NO: 17, |
| | | US20150315612 SEQ ID NO: 61 |
| AAVhu.26 | 223 | US20150159173 SEQ ID NO: 33, |
| | | US20150315612 SEQ ID NO: 139 |
| AAVhu.27 | 224 | US20150315612 SEQ ID NO: 64 |
| AAVhu.27 | 225 | US20150315612 SEQ ID NO: 140 |
| AAVhu.28 | 226 | US20150315612 SEQ ID NO: 68 |
| AAVhu.28 | 227 | US20150315612 SEQ ID NO: 130 |
| AAVhu.29 | 228 | US20150315612 SEQ ID NO: 69 |
| AAVhu.29 | 229 | US20150159173 SEQ ID NO: 42, |
| | | US20150315612 SEQ ID NO: 132 |
| AAVhu.29 | 230 | US20150315612 SEQ ID NO: 225 |
| AAVhu.29R | 231 | US20150159173 |
| AAVhu.3 | 232 | US20150315612 SEQ ID NO: 44 |
| AAVhu.3 | 233 | US20150315612 SEQ ID NO: 145 |
| AAVhu.30 | 234 | US20150315612 SEQ ID NO: 70 |
| AAVhu.30 | 235 | US20150315612 SEQ ID NO: 131 |
| AAVhu.31 | 236 | US20150315612 SEQ ID NO: 1 |
| AAVhu.31 | 237 | US20150315612 SEQ ID NO: 121 |
| AAVhu.32 | 238 | US20150315612 SEQ ID NO: 2 |
| AAVhu.32 | 239 | US20150315612 SEQ ID NO: 122 |
| AAVhu.33 | 240 | US20150315612 SEQ ID NO: 75 |
| AAVhu.33 | 241 | US20150315612 SEQ ID NO: 124 |
| AAVhu.34 | 242 | US20150315612 SEQ ID NO: 72 |
| AAVhu.34 | 243 | US20150315612 SEQ ID NO: 125 |
| AAVhu.35 | 244 | US20150315612 SEQ ID NO: 73 |
| AAVhu.35 | 245 | US20150315612 SEQ ID NO: 164 |
| AAVhu.36 | 246 | US20150315612 SEQ ID NO: 74 |
| AAVhu.36 | 247 | US20150315612 SEQ ID NO: 126 |
| AAVhu.37 | 248 | US20150159173 SEQ ID NO: 34, |
| | | US20150315612 SEQ ID NO: 88 |
| AAVhu.37 | 249 | US20150315612 SEQ ID NO: 10, |
| (AAV106.1) | | US20150159173 SEQ ID NO: 18 |
| AAVhu.38 | 250 | US20150315612 SEQ ID NO: 161 |
| AAVhu.39 | 251 | US20150315612 SEQ ID NO: 102 |
| AAVhu.39 | 252 | US20150315612 SEQ ID NO: 24 |
| (AAVLG-9) | | |
| AAVhu.4 | 253 | US20150315612 SEQ ID NO: 47 |
| AAVhu.4 | 254 | US20150315612 SEQ ID NO: 141 |
| AAVhu.40 | 255 | US20150315612 SEQ ID NO: 87 |
| AAVhu.40 | 256 | US20150315612 SEQ ID NO: 11 |
| (AAV114.3) | | |
| AAVhu.41 | 257 | US20150315612 SEQ ID NO: 91 |
| AAVhu.41 | 258 | US20150315612 SEQ ID NO: 6 |
| (AAV127.2) | | |
| AAVhu.42 | 259 | US20150315612 SEQ ID NO: 85 |
| AAVhu.42 | 260 | US20150315612 SEQ ID NO: 8 |
| (AAV127.5) | | |
| AAVhu.43 | 261 | US20150315612 SEQ ID NO: 160 |
| AAVhu.43 | 262 | US20150315612 SEQ ID NO: 236 |
| AAVhu.43 | 263 | US20150315612 SEQ ID NO: 80 |
| (AAV128.1) | | |
| AAVhu.44 | 264 | US20150159173 SEQ ID NO: 45, |
| | | US20150315612 SEQ ID NO: 158 |
| AAVhu.44 | 265 | US20150315612 SEQ ID NO: 81 |
| (AAV128.3) | | |
| AAVhu.44R1 | 266 | US20150159173 |
| AAVhu.44R2 | 267 | US20150159173 |
| AAVhu.44R3 | 268 | US20150159173 |
| AAVhu.45 | 269 | US20150315612 SEQ ID NO: 76 |
| AAVhu.45 | 270 | US20150315612 SEQ ID NO: 127 |
| AAVhu.46 | 271 | US20150315612 SEQ ID NO: 82 |
| AAVhu.46 | 272 | US20150315612 SEQ ID NO: 159 |
| AAVhu.46 | 273 | US20150315612 SEQ ID NO: 224 |
| AAVhu.47 | 274 | US20150315612 SEQ ID NO: 77 |
| AAVhu.47 | 275 | US20150315612 SEQ ID NO: 128 |
| AAVhu.48 | 276 | US20150159173 SEQ ID NO: 38 |
| AAVhu.48 | 277 | US20150315612 SEQ ID NO: 157 |
| AAVhu.48 | 278 | US20150315612 SEQ ID NO: 78 |
| (AAV130.4) | | |
| AAVhu.48R1 | 279 | US20150159173 |
| AAVhu.48R2 | 280 | US20150159173 |
| AAVhu.48R3 | 281 | US20150159173 |
| AAVhu.49 | 282 | US20150315612 SEQ ID NO: 209 |
| AAVhu.49 | 283 | US20150315612 SEQ ID NO: 189 |
| AAVhu.5 | 284 | US20150315612 SEQ ID NO: 45 |
| AAVhu.5 | 285 | US20150315612 SEQ ID NO: 142 |
| AAVhu.51 | 286 | US20150315612 SEQ ID NO: 208 |
| AAVhu.51 | 287 | US20150315612 SEQ ID NO: 190 |
| AAVhu.52 | 288 | US20150315612 SEQ ID NO: 210 |
| AAVhu.52 | 289 | US20150315612 SEQ ID NO: 191 |
| AAVhu.53 | 290 | US20150159173 SEQ ID NO: 19 |
| AAVhu.53 | 291 | US20150159173 SEQ ID NO: 35 |
| AAVhu.53 | 292 | US20150315612 SEQ ID NO: 176 |
| (AAV145.1) | | |
| AAVhu.54 | 293 | US20150315612 SEQ ID NO: 188 |
| AAVhu.54 | 294 | US20150315612 SEQ ID NO: 177 |
| (AAV145.5) | | |
| AAVhu.55 | 295 | US20150315612 SEQ ID NO: 187 |
| AAVhu.56 | 296 | US20150315612 SEQ ID NO: 205 |
| AAVhu.56 | 297 | US20150315612 SEQ ID NO: 168 |
| (AAV145.6) | | |
| AAVhu.56 | 298 | US20150315612 SEQ ID NO: 192 |
| (AAV145.6) | | |
| AAVhu.57 | 299 | US20150315612 SEQ ID NO: 206 |
| AAVhu.57 | 300 | US20150315612 SEQ ID NO: 169 |
| AAVhu.57 | 301 | US20150315612 SEQ ID NO: 193 |
| AAVhu.58 | 302 | US20150315612 SEQ ID NO: 207 |
| AAVhu.58 | 303 | US20150315612 SEQ ID NO: 194 |
| AAVhu.6 | 304 | US20150315612 SEQ ID NO: 5 |
| (AAV3.1) | | |
| AAVhu.6 | 305 | US20150315612 SEQ ID NO: 84 |
| (AAV3.1) | | |
| AAVhu.60 | 306 | US20150315612 SEQ ID NO: 184 |
| AAVhu.60 | 307 | US20150315612 SEQ ID NO: 170 |
| (AAV161.10) | | |
| AAVhu.61 | 308 | US20150315612 SEQ ID NO: 185 |
| AAVhu.61 | 309 | US20150315612 SEQ ID NO: 174 |
| (AAV161.6) | | |
| AAVhu.63 | 310 | US20150315612 SEQ ID NO: 204 |
| AAVhu.63 | 311 | US20150315612 SEQ ID NO: 195 |
| AAVhu.64 | 312 | US20150315612 SEQ ID NO: 212 |
| AAVhu.64 | 313 | US20150315612 SEQ ID NO: 196 |
| AAVhu.66 | 314 | US20150315612 SEQ ID NO: 197 |
| AAVhu.67 | 315 | US20150315612 SEQ ID NO: 215 |
| AAVhu.67 | 316 | US20150315612 SEQ ID NO: 198 |
| AAVhu.7 | 317 | US20150315612 SEQ ID NO: 226 |
| AAVhu.7 | 318 | US20150315612 SEQ ID NO: 150 |
| AAVhu.7 | 319 | US20150315612 SEQ ID NO: 55 |
| (AAV7.3) | | |
| AAVhu.71 | 320 | US20150315612 SEQ ID NO: 79 |
| AAVhu.8 | 321 | US20150315612 SEQ ID NO: 53 |
| AAVhu.8 | 322 | US20150315612 SEQ ID NO: 12 |
| AAVhu.8 | 323 | US20150315612 SEQ ID NO: 151 |
| AAVhu.9 | 324 | US20150315612 SEQ ID NO: 58 |
| (AAV3.1) | | |
| AAVhu.9 | 325 | US20150315612 SEQ ID NO: 155 |
| (AAV3.1) | | |
| AAV-LK01 | 326 | US20150376607 SEQ ID NO: 2 |
| AAV-LK01 | 327 | US20150376607 SEQ ID NO: 29 |
| AAV-LK02 | 328 | US20150376607 SEQ ID NO: 3 |
| AAV-LK02 | 329 | US20150376607 SEQ ID NO: 30 |
| AAV-LK03 | 330 | US20150376607 SEQ ID NO: 4 |
| AAV-LK03 | 331 | WO2015121501 SEQ ID NO: 12, |
| | | US20150376607 SEQ ID NO: 31 |
| AAV-LK04 | 332 | US20150376607 SEQ ID NO: 5 |
| AAV-LK04 | 333 | US20150376607 SEQ ID NO: 32 |
| AAV-LK05 | 334 | US20150376607 SEQ ID NO: 6 |
| AAV-LK05 | 335 | US20150376607 SEQ ID NO: 33 |
| AAV-LK06 | 336 | US20150376607 SEQ ID NO: 7 |
| AAV-LK06 | 337 | US20150376607 SEQ ID NO: 34 |
| AAV-LK07 | 338 | US20150376607 SEQ ID NO: 8 |
| AAV-LK08 | 339 | US20150376607 SEQ ID NO: 35 |
| AAV-LK08 | 340 | US20150376607 SEQ ID NO: 9 |
| AAV-LK08 | 341 | US20150376607 SEQ ID NO: 36 |
| AAV-LK09 | 342 | US20150376607 SEQ ID NO: 10 |
| AAV-LK09 | 343 | US20150376607 SEQ ID NO: 37 |
| AAV-LK10 | 344 | US20150376607 SEQ ID NO: 11 |
| AAV-LK10 | 345 | US20150376607 SEQ ID NO: 38 |
| AAV-LK11 | 346 | US20150376607 SEQ ID NO: 12 |
| AAV-LK11 | 347 | US20150376607 SEQ ID NO: 39 |
| AAV-LK12 | 348 | US20150376607 SEQ ID NO: 13 |
| AAV-LK12 | 349 | US20150376607 SEQ ID NO: 40 |
| AAV-LK13 | 350 | US20150376607 SEQ ID NO: 14 |
| AAV-LK13 | 351 | US20150376607 SEQ ID NO: 41 |
| AAV-LK14 | 352 | US20150376607 SEQ ID NO: 15 |
| AAV-LK14 | 353 | US20150376607 SEQ ID NO: 42 |
| AAV-LK15 | 354 | US20150376607 SEQ ID NO: 16 |
| AAV-LK15 | 355 | US20150376607 SEQ ID NO: 43 |
| AAV-LK16 | 356 | US20150376607 SEQ ID NO: 17 |
| AAV-LK16 | 357 | US20150376607 SEQ ID NO: 44 |
| AAV-LK17 | 358 | US20150376607 SEQ ID NO: 18 |
| AAV-LK17 | 359 | US20150376607 SEQ ID NO: 45 |
| AAV-LK18 | 360 | US20150376607 SEQ ID NO: 19 |
| AAV-LK18 | 361 | US20150376607 SEQ ID NO: 46 |
| AAV-LK19 | 362 | US20150376607 SEQ ID NO: 20 |
| AAV-LK19 | 363 | US20150376607 SEQ ID NO: 47 |
| AAV-PAEC | 364 | US20150376607 SEQ ID NO: 1 |
| AAV-PAEC | 365 | US20150376607 SEQ ID NO: 48 |
| AAV- | 366 | US20150376607 SEQ ID NO: 26 |
| PAEC11 | | |
| AAV- | 367 | US20150376607 SEQ ID NO: 54 |
| PAEC11 | | |
| AAV- | 368 | US20150376607 SEQ ID NO: 27 |
| PAEC12 | | |
| AAV- | 369 | US20150376607 SEQ ID NO: 51 |
| PAEC12 | | |
| AAV- | 370 | US20150376607 SEQ ID NO: 28 |
| PAEC13 | | |
| AAV- | 371 | US20150376607 SEQ ID NO: 49 |
| PAEC13 | | |
| AAV-PAEC2 | 372 | US20150376607 SEQ ID NO: 21 |
| AAV-PAEC2 | 373 | US20150376607 SEQ ID NO: 56 |
| AAV-PAEC4 | 374 | US20150376607 SEQ ID NO: 22 |
| AAV-PAEC4 | 375 | US20150376607 SEQ ID NO: 55 |
| AAV-PAEC6 | 376 | US20150376607 SEQ ID NO: 23 |
| AAV-PAEC6 | 377 | US20150376607 SEQ ID NO: 52 |
| AAV-PAEC7 | 378 | US20150376607 SEQ ID NO: 24 |
| AAV-PAEC7 | 379 | US20150376607 SEQ ID NO: 53 |
| AAV-PAEC8 | 380 | US20150376607 SEQ ID NO: 25 |
| AAV-PAEC8 | 381 | US20150376607 SEQ ID NO: 50 |
| AAVpi.1 | 382 | US20150315612 SEQ ID NO: 28 |
| AAVpi.1 | 383 | US20150315612 SEQ ID NO: 93 |
| AAVpi.2 | 384 | US20150315612 SEQ ID NO: 30 |
| AAVpi.2 | 385 | US20150315612 SEQ ID NO: 95 |
| AAVpi.3 | 386 | US20150315612 SEQ ID NO: 29 |
| AAVpi.3 | 387 | US20150315612 SEQ ID NO: 94 |
| AAVrh.10 | 388 | US20150159173 SEQ ID NO: 9 |
| AAVrh.10 | 389 | US20150159173 SEQ ID NO: 25 |
| AAV44.2 | 390 | US20030138772 SEQ ID NO: 59 |
| AAVrh.10 | 391 | US20030138772 SEQ ID NO: 81 |
| (AAV44.2) | | |
| AAV42.1B | 392 | US20030138772 SEQ ID NO: 90 |
| AAVrh.12 | 393 | US20030138772 SEQ ID NO: 30 |
| (AAV42.1b) | | |
| AAVrh.13 | 394 | US20150159173 SEQ ID NO: 10 |
| AAVrh.13 | 395 | US20150159173 SEQ ID NO: 26 |
| AAVrh.13 | 396 | US20150315612 SEQ ID NO: 228 |
| AAVrh.13R | 397 | US20150159173 |
| AAV42.3A | 398 | US20030138772 SEQ ID NO: 87 |
| AAVrh.14 | 399 | US20030138772 SEQ ID NO: 32 |
| (AAV42.3a) | | |
| AAV42.5A | 400 | US20030138772 SEQ ID NO: 89 |
| AAVrh.17 | 401 | US20030138772 SEQ ID NO: 34 |
| (AAV42.5a) | | |
| AAV42.5B | 402 | US20030138772 SEQ ID NO: 91 |
| AAVrh.18 | 403 | US20030138772 SEQ ID NO: 29 |
| (AAV42.5b) | | |
| AAV42.6B | 404 | US20030138772 SEQ ID NO: 112 |
| AAVrh.19 | 405 | US20030138772 SEQ ID NO: 38 |
| (AAV42.6b) | | |
| AAVrh.2 | 406 | US20150159173 SEQ ID NO: 39 |
| AAVrh.2 | 407 | US20150315612 SEQ ID NO: 231 |
| AAVrh.20 | 408 | US20150159173 SEQ ID NO: 1 |
| AAV42.10 | 409 | US20030138772 SEQ ID NO: 106 |
| AAVrh.21 | 410 | US20030138772 SEQ ID NO: 35 |
| (AAV42.10) | | |
| AAV42.11 | 411 | US20030138772 SEQ ID NO: 108 |
| AAVrh.22 | 412 | US20030138772 SEQ ID NO: 37 |
| (AAV42.11) | | |
| AAV42.12 | 413 | US20030138772 SEQ ID NO: 113 |
| AAVrh.23 | 414 | US20030138772 SEQ ID NO: 58 |
| (AAV42.12) | | |
| AAV42.13 | 415 | US20030138772 SEQ ID NO: 86 |
| AAVrh.24 | 416 | US20030138772 SEQ ID NO: 31 |
| (AAV42.13) | | |
| AAV42.15 | 417 | US20030138772 SEQ ID NO: 84 |
| AAVrh.25 | 418 | US20030138772 SEQ ID NO: 28 |
| (AAV42.15) | | |
| AAVrh.2R | 419 | US20150159173 |
| AAVrh.31 | 420 | US20030138772 SEQ ID NO: 48 |
| (AAV223.1) | | |
| AAVC1 | 421 | US20030138772 SEQ ID NO: 60 |
| AAVrh.32 | 422 | US20030138772 SEQ ID NO: 19 |
| (AAVC1) | | |
| AAVrh.32/33 | 423 | US20150159173 SEQ ID NO: 2 |
| AAVrh.33 | 424 | US20030138772 SEQ ID NO: 20 |
| (AAVC3) | | |
| AAVC5 | 425 | US20030138772 SEQ ID NO: 62 |
| AAVrh.34 | 426 | US20030138772 SEQ ID NO: 21 |
| (AAVC5) | | |
| AAVF1 | 427 | US20030138772 SEQ ID NO: 109 |
| AAVrh.35 | 428 | US20030138772 SEQ ID NO: 22 |
| (AAVF1) | | |
| AAVF3 | 429 | US20030138772 SEQ ID NO: 111 |
| AAVrh.36 | 430 | US20030138772 SEQ ID NO: 23 |
| (AAVF3) | | |
| AAVrh.37 | 431 | US20030138772 SEQ ID NO: 24 |
| AAVrh.37 | 432 | US20150159173 SEQ ID NO: 40 |
| AAVrh.37 | 433 | US20150315612 SEQ ID NO: 229 |
| AAVrh.37R2 | 434 | US20150159173 |
| AAVrh.38 | 435 | US20150315612 SEQ ID NO: 7 |
| (AAVLG-4) | | |
| AAVrh.38 | 436 | US20150315612 SEQ ID NO: 86 |
| (AAVLG-4) | | |
| AAVrh.39 | 437 | US20150159173 SEQ ID NO: 20, |
| | | US20150315612 SEQ ID NO: 13 |
| AAVrh.39 | 438 | US20150159173 SEQ ID NO: 3, |
| | | US20150159173 SEQ ID NO: 36, |
| | | US20150315612 SEQ ID NO: 89 |
| AAVrh.40 | 439 | US20150315612 SEQ ID NO: 92 |
| AAVrh.40 | 440 | US20150315612 SEQ ID NO: 34 |
| (AAVLG-10) | | |
| AAVrh.43 | 441 | US20150315612 SEQ ID NO: 43, |
| (AAVN721-8) | | US20150159173 SEQ ID NO: 21 |
| AAVrh.43 | 442 | US20150315612 SEQ ID NO: 163, |
| (AAVN721-8) | | US20150159173 SEQ ID NO: 37 |
| AAVrh.44 | 443 | US20150315612 SEQ ID NO: 34 |
| AAVrh.44 | 444 | US20150315612 SEQ ID NO: 111 |
| AAVrh.45 | 445 | US20150315612 SEQ ID NO: 41 |
| AAVrh.45 | 446 | US20150315612 SEQ ID NO: 109 |
| AAVrh.46 | 447 | US20150159173 SEQ ID NO: 22, |
| | | US20150315612 SEQ ID NO: 19 |
| AAVrh.46 | 448 | US20150159173 SEQ ID NO: 4, |
| | | US20150315612 SEQ ID NO: 101 |
| AAVrh.47 | 449 | US20150315612 SEQ ID NO: 38 |
| AAVrh.47 | 450 | US20150315612 SEQ ID NO: 118 |
| AAVrh.48 | 451 | US20150159173 SEQ ID NO: 44, |
| | | US20150315612 SEQ ID NO: 115 |
| AAVrh.48.1 | 452 | US20150159173 |
| AAVrh.48.1.2 | 453 | US20150159173 |
| AAVrh.48.2 | 454 | US20150159173 |
| AAVrh.48 | 455 | US20150315612 SEQ ID NO: 32 |
| (AAV1-7) | | |
| AAVrh.49 | 456 | US20150315612 SEQ ID NO: 25 |
| (AAV1-8) | | |
| AAVrh.49 | 457 | US20150315612 SEQ ID NO: 103 |
| (AAV1-8) | | |
| AAVrh.50 | 458 | US20150315612 SEQ ID NO: 23 |
| (AAV2-4) | | |
| AAVrh.50 | 459 | US20150315612 SEQ ID NO: 108 |
| (AAV2-4) | | |
| AAVrh.51 | 460 | US20150315612 SEQ ID NO: 22 |
| (AAV2-5) | | |
| AAVrh.51 | 461 | US20150315612 SEQ ID NO: 104 |
| (AAV2-5) | | |
| AAVrh.52 | 462 | US20150315612 SEQ ID NO: 18 |
| (AAV3-9) | | |
| AAVrh.52 | 463 | US20150315612 SEQ ID NO: 96 |
| (AAV3-9) | | |
| AAVrh.53 | 464 | US20150315612 SEQ ID NO: 97 |
| AAVrh.53 | 465 | US20150315612 SEQ ID NO: 17 |
| (AAV3-11) | | |
| AAVrh.53 | 466 | US20150315612 SEQ ID NO: 186 |
| (AAV3-11) | | |
| AAVrh.54 | 467 | US20150315612 SEQ ID NO: 40 |
| AAVrh.54 | 468 | US20150159173 SEQ ID NO: 49, |
| | | US20150315612 SEQ ID NO: 116 |
| AAVrh.55 | 469 | US20150315612 SEQ ID NO: 37 |
| AAVrh.55 | 470 | US20150315612 SEQ ID NO: 117 |
| (AAV4-19) | | |
| AAVrh.56 | 471 | US20150315612 SEQ ID NO: 54 |
| AAVrh.56 | 472 | US20150315612 SEQ ID NO: 152 |
| AAVrh.57 | 473 | US20150315612 SEQ ID NO: 26 |
| AAVrh.57 | 474 | US20150315612 SEQ ID NO: 105 |
| AAVrh.58 | 475 | US20150315612 SEQ ID NO: 27 |
| AAVrh.58 | 476 | US20150159173 SEQ ID NO: 48, |
| | | US20150315612 SEQ ID NO: 106 |
| AAVrh.58 | 477 | US20150315612 SEQ ID NO: 232 |
| AAVrh.59 | 478 | US20150315612 SEQ ID NO: 42 |
| AAVrh.59 | 479 | US20150315612 SEQ ID NO: 110 |
| AAVrh.60 | 480 | US20150315612 SEQ ID NO: 31 |
| AAVrh.60 | 481 | US20150315612 SEQ ID NO: 120 |
| AAVrh.61 | 482 | US20150315612 SEQ ID NO: 107 |
| AAVrh.61 | 483 | US20150315612 SEQ ID NO: 21 |
| (AAV2-3) | | |
| AAVrh.62 | 484 | US20150315612 SEQ ID NO: 33 |
| (AAV2-15) | | |
| AAVrh.62 | 485 | US20150315612 SEQ ID NO: 114 |
| (AAV2-15) | | |
| AAVrh.64 | 486 | US20150315612 SEQ ID NO: 15 |
| AAVrh.64 | 487 | US20150159173 SEQ ID NO: 43, |
| | | US20150315612 SEQ ID NO: 99 |
| AAVrh.64 | 488 | US20150315612 SEQ ID NO: 233 |
| AAVRh.64R1 | 489 | US20150159173 |
| AAVRh.64R2 | 490 | US20150159173 |
| AAVrh.65 | 491 | US20150315612 SEQ ID NO: 35 |
| AAVrh.65 | 492 | US20150315612 SEQ ID NO: 112 |
| AAVrh.67 | 493 | US20150315612 SEQ ID NO: 36 |
| AAVrh.67 | 494 | US20150315612 SEQ ID NO: 230 |
| AAVrh.67 | 495 | US20150159173 SEQ ID NO: 47, |
| | | US20150315612 SEQ ID NO: 113 |
| AAVrh.68 | 496 | US20150315612 SEQ ID NO: 16 |
| AAVrh.68 | 497 | US20150315612 SEQ ID NO: 100 |
| AAVrh.69 | 498 | US20150315612 SEQ ID NO: 39 |
| AAVrh.69 | 499 | US20150315612 SEQ ID NO: 119 |
| AAVrh.70 | 500 | US20150315612 SEQ ID NO: 20 |
| AAVrh.70 | 501 | US20150315612 SEQ ID NO: 98 |
| AAVrh.71 | 502 | US20150315612 SEQ ID NO: 162 |
| AAVrh.72 | 503 | US20150315612 SEQ ID NO: 9 |
| AAVrh.73 | 504 | US20150159173 SEQ ID NO: 5 |
| AAVrh.74 | 505 | US20150159173 SEQ ID NO: 6 |
| AAVrh.8 | 506 | US20150159173 SEQ ID NO: 41 |
| AAVrh.8 | 507 | US20150315612 SEQ ID NO: 235 |
| AAVrh.SR | 508 | US20150159173, |
| | | WO2015168666 SEQ ID NO: 9 |
| AAVrh.8R | 509 | WO2015168666 SEQ ID NO: 10 |
| A586R | | |
| mutant | | |
| AAVrh.8R | 510 | WO2015168666 SEQ ID NO: 11 |
| R533A | | |
| mutant | | |
| BAAV | 511 | U.S. Pat. No. 9,193,769 SEQ ID NO: 8 |
| (bovine | | |
| AAV) | | |
| BAAV | 512 | U.S. Pat. No. 9,193,769 SEQ ID NO: 10 |
| (bovine | | |
| AAV) | | |
| BAAV | 513 | U.S. Pat. No. 9,193,769 SEQ ID NO: 4 |
| (bovine | | |
| AAV) | | |
| BAAV | 514 | U.S. Pat. No. 9,193,769 SEQ ID NO: 2 |
| (bovine | | |
| AAV) | | |
| BAAV | 515 | U.S. Pat. No. 9,193,769 SEQ ID NO: 6 |
| (bovine | | |
| AAV) | | |
| BAAV | 516 | U.S. Pat. No. 9,193,769 SEQ ID NO: 1 |
| (bovine | | |
| AAV) | | |
| BAAV | 517 | U.S. Pat. No. 9,193,769 SEQ ID NO: 5 |
| (bovine | | |
| AAV) | | |
| BAAV | 518 | U.S. Pat. No. 9,193,769 SEQ ID NO: 3 |
| (bovine | | |
| AAV) | | |
| BAAV | 519 | U.S. Pat. No. 9,193,769 SEQ ID NO: 11 |
| (bovine | | |
| AAV) | | |
| BAAV | 520 | U.S. Pat. No. 7,427,396 SEQ ID NO: 5 |
| (bovine | | |
| AAV) | | |
| BAAV | 521 | U.S. Pat. No. 7,427,396 SEQ ID NO: 6 |
| (bovine | | |
| AAV) | | |
| BAAV | 522 | U.S. Pat. No. 9,193,769 SEQ ID NO: 7 |
| (bovine | | |
| AAV) | | |
| BAAV | 523 | U.S. Pat. No. 9,193,769 SEQ ID NO: 9 |
| (bovine | | |
| AAV) | | |
| BNP61 AAV | 524 | US20150238550 SEQ ID NO: 1 |
| BNP61 AAV | 525 | US20150238550 SEQ ID NO: 2 |
| BNP62 AAV | 526 | US20150238550 SEQ ID NO: 3 |
| BNP63 AAV | 527 | US20150238550 SEQ ID NO: 4 |
| caprine AAV | 528 | U.S. Pat. No. 7,427,396 SEQ ID NO: 3 |
| caprine AAV | 529 | U.S. Pat. No. 7,427,396 SEQ ID NO: 4 |
| true type | 530 | WO2015121501 SEQ ID NO: 2 |
| AAV | | |
| (ttAAV) | | |
| AAAV | 531 | U.S. Pat. No. 9,238,800 SEQ ID NO: 12 |
| (Avian AAV) | | |
| AAAV | 532 | U.S. Pat. No. 9,238,800 SEQ ID NO: 2 |
| (Avian AAV) | | |
| AAAV | 533 | U.S. Pat. No. 9,238,800 SEQ ID NO: 6 |
| (Avian AAV) | | |
| AAAV | 534 | U.S. Pat. No. 9,238,800 SEQ ID NO: 4 |
| (Avian AAV) | | |
| AAAV | 535 | U.S. Pat. No. 9,238,800 SEQ ID NO: 8 |
| (Avian AAV) | | |
| AAAV | 536 | U.S. Pat. No. 9,238,800 SEQ ID NO: 14 |
| (Avian AAV) | | |
| AAAV | 537 | U.S. Pat. No. 9,238,800 SEQ ID NO: 10 |
| (Avian AAV) | | |
| AAAV | 538 | U.S. Pat. No. 9,238,800 SEQ ID NO: 15 |
| (Avian AAV) | | |
| AAAV | 539 | U.S. Pat. No. 9,238,800 SEQ ID NO: 5 |
| (Avian AAV) | | |
| AAAV | 540 | U.S. Pat. No. 9,238,800 SEQ ID NO: 9 |
| (Avian AAV) | | |
| AAAV | 541 | U.S. Pat. No. 9,238,800 SEQ ID NO: 3 |
| (Avian AAV) | | |
| AAAV | 542 | U.S. Pat. No. 9,238,800 SEQ ID NO: 7 |
| (Avian AAV) | | |
| AAAV | 543 | U.S. Pat. No. 9,238,800 SEQ ID NO: 11 |
| (Avian AAV) | | |
| AAAV | 544 | U.S. Pat. No. 9,238,800 SEQ ID NO: 13 |
| (Avian AAV) | | |
| AAAV | 545 | U.S. Pat. No. 9,238,800 SEQ ID NO: 1 |
| (Avian AAV) | | |
| AAV Shuffle | 546 | US20160017295 SEQ ID NO: 23 |
| 100-1 | | |
| AAV Shuffle | 547 | US20160017295 SEQ ID NO: 11 |
| 100-1 | | |
| AAV Shuffle | 548 | US20160017295 SEQ ID NO: 37 |
| 100-2 | | |
| AAV Shuffle | 549 | US20160017295 SEQ ID NO: 29 |
| 100-2 | | |
| AAV Shuffle | 550 | US20160017295 SEQ ID NO: 24 |
| 100-3 | | |
| AAV Shuffle | 551 | US20160017295 SEQ ID NO: 12 |
| 100-3 | | |
| AAV Shuffle | 552 | US20160017295 SEQ ID NO: 25 |
| 100-7 | | |
| AAV Shuffle | 553 | US20160017295 SEQ ID NO: 13 |
| 100-7 | | |
| AAV Shuffle | 554 | US20160017295 SEQ ID NO: 34 |
| 10-2 | | |
| AAV Shuffle | 555 | US20160017295 SEQ ID NO: 26 |
| 10-2 | | |
| AAV Shuffle | 556 | US20160017295 SEQ ID NO: 35 |
| 10-6 | | |
| AAV Shuffle | 557 | US20160017295 SEQ ID NO: 27 |
| 10-6 | | |
| AAV Shuffle | 558 | US20160017295 SEQ ID NO: 36 |
| 10-8 | | |
| AAV Shuffle | 559 | US20160017295 SEQ ID NO: 28 |
| 10-8 | | |
| AAV SM | 560 | US20160017295 SEQ ID NO: 41 |
| 100-10 | | |
| AAV SM | 561 | US20160017295 SEQ ID NO: 33 |
| 100-10 | | |
| AAV SM | 562 | US20160017295 SEQ ID NO: 40 |
| 100-3 | | |
| AAV SM | 563 | US20160017295 SEQ ID NO: 32 |
| 100-3 | | |
| AAV SM | 564 | US20160017295 SEQ ID NO: 38 |
| 10-1 | | |
| AAV SM | 565 | US20160017295 SEQ ID NO: 30 |
| 10-1 | | |
| AAV SM | 566 | US20160017295 SEQ ID NO: 10 |
| 10-2 | | |
| AAV SM | 567 | US20160017295 SEQ ID NO: 22 |
| 10-2 | | |
| AAV SM | 568 | US20160017295 SEQ ID NO: 39 |
| 10-8 | | |
| AAV SM | 569 | US20160017295 SEQ ID NO: 31 |
| 10-8 | | |
| AAV SM | 560 | US20160017295 SEQ ID NO: 41 |
| 100-10 | | |
| AAV SM | 561 | US20160017295 SEQ ID NO: 33 |
| 100-10 | | |
| AAV SM | 562 | US20160017295 SEQ ID NO: 40 |
| 300-3 | | |
| AAV SM | 563 | US20160017295 SEQ ID NO: 32 |
| 100-3 | | |
| AAV SM | 564 | US20160017295 SEQ ID NO: 38 |
| 10-1 | | |
| AAV SM | 565 | US20160017295 SEQ ID NO: 30 |
| 10-1 | | |
| AAV SM | 566 | US20160017295 SEQ ID NO: 10 |
| 10-2 | | |
| AAV SM | 567 | US20160017295 SEQ ID NO: 22 |
| 10-2 | | |
| AAV SM | 568 | US20160017295 SEQ ID NO: 39 |
| 10-8 | | |
| AAV SM | 569 | US20160017295 SEQ ID NO: 31 |
| 10-8 | | |
| AAVF1/ | 570 | WO2016049230 SEQ ID NO: 20 |
| HSC1 | | |
| AAVF2/ | 571 | WO2016049230 SEQ ID NO: 21 |
| HSC2 | | |
| AAVF3/ | 572 | WO2016049230 SEQ ID NO: 22 |
| HSC3 | | |
| AAVF4/ | 573 | WO2016049230 SEQ ID NO: 23 |
| HSC4 | | |
| AAVF5/ | 574 | WO2016049230 SEQ ID NO: 25 |
| HSC5 | | |
| AAVF6/ | 575 | WO2016049230 SEQ ID NO: 24 |
| HSC6 | | |
| AAVF7/ | 576 | WO2016049230 SEQ ID NO: 27 |
| HSC | | |
| AAVF8/ | 577 | WO2016049230 SEQ ID NO: 28 |
| HSC8 | | |
| AAVF9/ | 578 | WO2016049230 SEQ ID NO: 29 |
| HSC9 | | |
| AAVF11/ | 579 | WO2016049230 SEQ ID NO: 26 |
| HSC11 | | |
| AAVF12/ | 580 | WO2016049230 SEQ ID NO: 30 |
| HSC12 | | |
| AAVF13/ | 581 | WO2016049230 SEQ ID NO: 31 |
| HSC13 | | |
| AAVF14/ | 582 | WO2016049230 SEQ ID NO: 32 |
| HSC14 | | |
| AAVF15/ | 583 | WO2016049230 SEQ ID NO: 33 |
| HSC15 | | |
| AAVF16/ | 584 | WO2016049230 SEQ ID NO: 34 |
| HSC16 | | |
| AAVF17/ | 585 | WO2016049230 SEQ ID NO: 35 |
| HSC17 | | |
| AAVF1/HSC1 | 586 | WO2016049230 SEQ ID NO: 2 |
| AAVF2/HSC2 | 587 | WO2016049230 SEQ ID NO: 3 |
| AAVF3/HSC3 | 588 | WO2016049230 SEQ ID NO: 5 |
| AAVF4/HSC4 | 589 | WO2016049230 SEQ ID NO: 6 |
| AAVF5/HSC5 | 590 | WO2016049230 SEQ ID NO: 11 |
| AAVF6/HSC6 | 591 | WO2016049230 SEQ ID NO: 7 |
| AAVF7/HSC7 | 592 | WO2016049230 SEQ ID NO: 8 |
| AAVF8/HSC8 | 593 | WO2016049230 SEQ ID NO: 9 |
| AAVF9/HSC9 | 594 | WO2016049230 SEQ ID NO: 10 |
| AAVF11/HSC | 595 | WO2016049230 SEQ ID NO: 4 |
| AAVF12/ | 596 | WO2016049230 SEQ ID NO: 12 |
| HSC12 | | |
| AAVF13/ | 597 | WO2016049230 SEQ ID NO: 14 |
| HSC13 | | |
| AAVF14/ | 598 | WO2016049230 SEQ ID NO: 15 |
| HSC14 | | |
| AAVF15/ | 599 | WO2016049230 SEQ ID NO: 16 |
| HSC15 | | |
| AAVF16/ | 600 | WO2016049230 SEQ ID NO: 17 |
| HSC16 | | |
| AAVF17/ | 601 | WO2016049230 SEQ ID NO: 13 |
| HSC17 | | |
| AAV CBr-E1 | 602 | U.S. Pat. No. 8,734,809 SEQ ID NO: 13 |
| AAV CBr-E2 | 603 | U.S. Pat. No. 8,734,809 SEQ ID NO: 14 |
| AAV CBr-E3 | 604 | U.S. Pat. No. 8,734,809 SEQ ID NO: 15 |
| AAV CBr-E4 | 605 | U.S. Pat. No. 8,734,809 SEQ ID NO: 16 |
| AAV CBr-E5 | 606 | U.S. Pat. No. 8,734,809 SEQ ID NO: 17 |
| AAV CBr-e5 | 607 | U.S. Pat. No. 8,734,809 SEQ ID NO: 18 |
| AAV CBr-E6 | 608 | U.S. Pat. No. 8,734,809 SEQ ID NO: 19 |
| AAV CBr-E7 | 609 | U.S. Pat. No. 8,734,809 SEQ ID NO: 20 |
| AAV CBr-E8 | 610 | U.S. Pat. No. 8,734,809 SEQ ID NO: 21 |
| AAV CLv-D1 | 611 | U.S. Pat. No. 8,734,809 SEQ ID NO: 22 |
| AAV CLv-D2 | 612 | U.S. Pat. No. 8,734,809 SEQ ID NO: 23 |
| AAV CLv-D3 | 613 | U.S. Pat. No. 8,734,809 SEQ ID NO: 24 |
| AAV CLv-D4 | 614 | U.S. Pat. No. 8,734,809 SEQ ID NO: 25 |
| AAV CLv-D5 | 615 | U.S. Pat. No. 8,734,809 SEQ ID NO: 26 |
| AAV CLv-D6 | 616 | U.S. Pat. No. 8,734,809 SEQ ID NO: 27 |
| AAV CLv-D7 | 617 | U.S. Pat. No. 8,734,809 SEQ ID NO: 28 |
| AAV CLv-D8 | 618 | U.S. Pat. No. 8,734,809 SEQ ID NO: 29 |
| AAV CLv-E1 | 619 | U.S. Pat. No. 8,734,809 SEQ ID NO: 13 |
| AAV CLv-R1 | 620 | U.S. Pat. No. 8,734,809 SEQ ID NO: 30 |
| AAV CLv-R2 | 621 | U.S. Pat. No. 8,734,809 SEQ ID NO: 31 |
| AAV CLv-R3 | 622 | U.S. Pat. No. 8,734,809 SEQ ID NO: 32 |
| AAV CLv-R4 | 623 | U.S. Pat. No. 8,734,809 SEQ ID NO: 33 |
| AAV CLv-R5 | 624 | U.S. Pat. No. 8,734,809 SEQ ID NO: 34 |
| AAV CLv-R6 | 625 | U.S. Pat. No. 8,734,809 SEQ ID NO: 35 |
| AAV CLv-R7 | 626 | U.S. Pat. No. 8,734,809 SEQ ID NO: 36 |
| AAV CLv-R8 | 627 | U.S. Pat. No. 8,734,809 SEQ ID NO: 37 |
| AAV CLv-R9 | 628 | U.S. Pat. No. 8,734,809 SEQ ID NO: 38 |
| AAV CLg-F1 | 629 | U.S. Pat. No. 8,734,809 SEQ ID NO: 39 |
| AAV CLg-F2 | 630 | U.S. Pat. No. 8,734,809 SEQ ID NO: 40 |
| AAV CLg-F3 | 631 | U.S. Pat. No. 8,734,809 SEQ ID NO: 41 |
| AAV CLg-F4 | 632 | U.S. Pat. No. 8,734,809 SEQ ID NO: 42 |
| AAV CLg-F5 | 633 | U.S. Pat. No. 8,734,809 SEQ ID NO: 43 |
| AAV CLg-F6 | 634 | U.S. Pat. No. 8,734,809 SEQ ID NO: 43 |
| AAV CLg-F7 | 635 | U.S. Pat. No. 8,734,809 SEQ ID NO: 44 |
| AAV CLg-F8 | 636 | U.S. Pat. No. 8,734,809 SEQ ID NO: 43 |
| AAV CSp-1 | 637 | U.S. Pat. No. 8,734,809 SEQ ID NO: 45 |
| AAV CSp-10 | 638 | U.S. Pat. No. 8,734,809 SEQ ID NO: 46 |
| AAV CSp-11 | 639 | U.S. Pat. No. 8,734,809 SEQ ID NO: 47 |
| AAV CSp-2 | 640 | U.S. Pat. No. 8,734,809 SEQ ID NO: 48 |
| AAV CSp-3 | 641 | U.S. Pat. No. 8,734,809 SEQ ID NO: 49 |
| AAV CSp-4 | 642 | U.S. Pat. No. 8,734,809 SEQ ID NO: 50 |
| AAV CSp-6 | 643 | U.S. Pat. No. 8,734,809 SEQ ID NO: 51 |
| AAV CSp-7 | 644 | U.S. Pat. No. 8,734,809 SEQ ID NO: 52 |
| AAV CSp-8 | 645 | U.S. Pat. No. 8,734,809 SEQ ID NO: 53 |
| AAV CSp-9 | 646 | U.S. Pat. No. 8,734,809 SEQ ID NO: 54 |
| AAV CHt-2 | 647 | U.S. Pat. No. 8,734,809 SEQ ID NO: 55 |
| AAV CHt-3 | 648 | U.S. Pat. No. 8,734,809 SEQ ID NO: 56 |
| AAV CKd-1 | 649 | U.S. Pat. No. 8,734,809 SEQ ID NO: 57 |
| AAV CKd-10 | 650 | U.S. Pat. No. 8,734,809 SEQ ID NO: 58 |
| AAV CKd-2 | 651 | U.S. Pat. No. 8,734,809 SEQ ID NO: 59 |
| AAV CKd-3 | 652 | U.S. Pat. No. 8,734,809 SEQ ID NO: 60 |
| AAV CKd-4 | 653 | U.S. Pat. No. 8,734,809 SEQ ID NO: 61 |
| AAV CKd-6 | 654 | U.S. Pat. No. 8,734,809 SEQ ID NO: 62 |
| AAV CKd-7 | 655 | U.S. Pat. No. 8,734,809 SEQ ID NO: 63 |
| AAV CKd-8 | 656 | U.S. Pat. No. 8,734,809 SEQ ID NO: 64 |
| AAV CLv-1 | 657 | U.S. Pat. No. 8,734,809 SEQ ID NO: 65 |
| AAV CLv-12 | 658 | U.S. Pat. No. 8,734,809 SEQ ID NO: 66 |
| AAV CLv-13 | 659 | U.S. Pat. No. 8,734,809 SEQ ID NO: 67 |
| AAV CLv-2 | 660 | U.S. Pat. No. 8,734,809 SEQ ID NO: 68 |
| AAV CLv-3 | 661 | U.S. Pat. No. 8,734,809 SEQ ID NO: 69 |
| AAV CLv-4 | 662 | U.S. Pat. No. 8,734,809 SEQ ID NO: 70 |
| AAV CLv-6 | 663 | U.S. Pat. No. 8,734,809 SEQ ID NO: 71 |
| AAV CLv-8 | 664 | U.S. Pat. No. 8,734,809 SEQ ID NO: 72 |
| AAV CKd-B1 | 665 | U.S. Pat. No. 8,734,809 SEQ ID NO: 73 |
| AAV CKd-B2 | 666 | U.S. Pat. No. 8,734,809 SEQ ID NO: 74 |
| AAV CKd-B3 | 667 | U.S. Pat. No. 8,734,809 SEQ ID NO: 75 |
| AAV CKd-B4 | 668 | U.S. Pat. No. 8,734,809 SEQ ID NO: 76 |
| AAV CKd-B5 | 669 | U.S. Pat. No. 8,734,809 SEQ ID NO: 77 |
| AAV CKd-B6 | 670 | U.S. Pat. No. 8,734,809 SEQ ID NO: 78 |
| AAV CKd-B7 | 671 | U.S. Pat. No. 8,734,809 SEQ ID NO: 79 |
| AAV CKd-B8 | 672 | U.S. Pat. No. 8,734,809 SEQ ID NO: 80 |
| AAV CKd-H1 | 673 | U.S. Pat. No. 8,734,809 SEQ ID NO: 81 |
| AAV CKd-H2 | 674 | U.S. Pat. No. 8,734,809 SEQ ID NO: 82 |
| AAV CKd-H3 | 675 | U.S. Pat. No. 8,734,809 SEQ ID NO: 83 |
| AAV CKd-H4 | 676 | U.S. Pat. No. 8,734,809 SEQ ID NO: 84 |
| AAV CKd-H5 | 677 | U.S. Pat. No. 8,734,809 SEQ ID NO: 85 |
| AAV CKd-H6 | 678 | U.S. Pat. No. 8,734,809 SEQ ID NO: 77 |
| AAV CHt-l | 679 | U.S. Pat. No. 8,734,809 SEQ ID NO: 86 |
| AAV CLv1-1 | 680 | U.S. Pat. No. 8,734,809 SEQ ID NO: 171 |
| AAV CLv1-2 | 681 | U.S. Pat. No. 8,734,809 SEQ ID NO: 172 |
| AAV CLv1-3 | 682 | U.S. Pat. No. 8,734,809 SEQ ID NO: 173 |
| AAV CLv1-4 | 683 | U.S. Pat. No. 8,734,809 SEQ ID NO: 174 |
| AAV Clv1-7 | 684 | U.S. Pat. No. 8,734,809 SEQ ID NO: 175 |
| AAV Clv1-8 | 685 | U.S. Pat. No. 8,734,809 SEQ ID NO: 176 |
| AAV Clv1-9 | 686 | U.S. Pat. No. 8,734,809 SEQ ID NO: 177 |
| AAV Clvl-10 | 687 | U.S. Pat. No. 8,734,809 SEQ ID NO: 178 |
| AAV.VR-355 | 688 | U.S. Pat. No. 8,734,809 SEQ ID NO: 181 |
| AAV.hu.48R3 | 689 | U.S. Pat. No. 8,734,809 SEQ ID NO: 183 |
| AAV CBr-1 | 690 | U.S. Pat. No. 8,734,809 SEQ ID NO: 87 |
| AAV CBr-E2 | 691 | U.S. Pat. No. 8,734,809 SEQ ID NO: 88 |
| AAV CBr-E3 | 692 | U.S. Pat. No. 8,734,809 SEQ ID NO: 89 |
| AAV CBr-E4 | 693 | U.S. Pat. No. 8,734,809 SEQ ID NO: 90 |
| AAV CBr-E5 | 694 | U.S. Pat. No. 8,734,809 SEQ ID NO: 91 |
| AAV CBr-e3 | 695 | U.S. Pat. No. 8,734,809 SEQ ID NO: 92 |
| AAV CBr-E6 | 696 | U.S. Pat. No. 8,734,809 SEQ ID NO: 93 |
| AAV CBr-E7 | 697 | U.S. Pat. No. 8,734,809 SEQ ID NO: 94 |
| AAV CBr-E8 | 698 | U.S. Pat. No. 8,734,809 SEQ ID NO: 95 |
| AAV CLv-D1 | 699 | U.S. Pat. No. 8,734,809 SEQ ID NO: 96 |
| AAV CLv-D2 | 700 | U.S. Pat. No. 8,734,809 SEQ ID NO: 97 |
| AAV CLv-D3 | 701 | U.S. Pat. No. 8,734,809 SEQ ID NO: 98 |
| AAV CLv-D4 | 702 | U.S. Pat. No. 8,734,809 SEQ ID NO: 99 |
| AAV CLv-D5 | 703 | U.S. Pat. No. 8,734,809 SEQ ID NO: 100 |
| AAV CLv-D6 | 704 | U.S. Pat. No. 8,734,809 SEQ ID NO: 101 |
| AAV CLv-D7 | 705 | U.S. Pat. No. 8,734,809 SEQ ID NO: 102 |
| AAV CLv-D8 | 706 | U.S. Pat. No. 8,734,809 SEQ ID NO: 103 |
| AAV CLv-E1 | 707 | U.S. Pat. No. 8,734,809 SEQ ID NO: 87 |
| AAV CLv-R1 | 708 | U.S. Pat. No. 8,734,809 SEQ ID NO: 104 |
| AAV CLv-R2 | 709 | U.S. Pat. No. 8,734,809 SEQ ID NO: 105 |
| AAV CLv-R3 | 710 | U.S. Pat. No. 8,734,809 SEQ ID NO: 106 |
| AAV CLv-R4 | 711 | U.S. Pat. No. 8,734,809 SEQ ID NO: 107 |
| AAV CLv-R5 | 712 | U.S. Pat. No. 8,734,809 SEQ ID NO: 108 |
| AAV CLv-R6 | 713 | U.S. Pat. No. 8,734,809 SEQ ID NO: 109 |
| AAV CLv-R7 | 714 | U.S. Pat. No. 8,734,809 SEQ ID NO: 110 |
| AAV CLv-R8 | 715 | U.S. Pat. No. 8,734,809 SEQ ID NO: 111 |
| AAV CLv-R9 | 716 | U.S. Pat. No. 8,734,809 SEQ ID NO: 112 |
| AAV CLg-F1 | 717 | U.S. Pat. No. 8,734,809 SEQ ID NO: 113 |
| AAV CLg-F2 | 718 | U.S. Pat. No. 8,734,809 SEQ ID NO: 114 |
| AAV CLg-F3 | 719 | U.S. Pat. No. 8,734,809 SEQ ID NO: 115 |
| AAV CLg-F4 | 720 | U.S. Pat. No. 8,734,809 SEQ ID NO: 116 |
| AAV CLg-F5 | 721 | U.S. Pat. No. 8,734,809 SEQ ID NO: 117 |
| AAV CLg-F6 | 722 | U.S. Pat. No. 8,734,809 SEQ ID NO: 117 |
| AAV CLg-F7 | 723 | U.S. Pat. No. 8,734,809 SEQ ID NO: 118 |
| AAV CLg-F8 | 724 | U.S. Pat. No. 8,734,809 SEQ ID NO: 117 |
| AAV CSp-1 | 725 | U.S. Pat. No. 8,734,809 SEQ ID NO: 119 |
| AAV CSp-10 | 726 | U.S. Pat. No. 8,734,809 SEQ ID NO: 120 |
| AAV CSp-11 | 727 | U.S. Pat. No. 8,734,809 SEQ ID NO: 121 |
| AAV CSp-2 | 728 | U.S. Pat. No. 8,734,809 SEQ ID NO: 122 |
| AAV CSp-3 | 729 | U.S. Pat. No. 8,734,809 SEQ ID NO: 123 |
| AAV CSp-4 | 730 | U.S. Pat. No. 8,734,809 SEQ ID NO: 124 |
| AAV CSp-6 | 731 | U.S. Pat. No. 8,734,809 SEQ ID NO: 125 |
| AAV CSp-7 | 732 | U.S. Pat. No. 8,734,809 SEQ ID NO: 126 |
| AAV CSp-8 | 733 | U.S. Pat. No. 8,734,809 SEQ ID NO: 127 |
| AAV CSp-9 | 734 | U.S. Pat. No. 8,734,809 SEQ ID NO: 128 |
| AAV CHt-2 | 735 | U.S. Pat. No. 8,734,809 SEQ ID NO: 129 |
| AAV CHt-3 | 736 | U.S. Pat. No. 8,734,809 SEQ ID NO: 130 |
| AAV CKd-1 | 737 | U.S. Pat. No. 8,734,809 SEQ ID NO: 131 |
| AAV CKd-10 | 738 | U.S. Pat. No. 8,734,809 SEQ ID NO: 132 |
| AAV CKd-2 | 739 | U.S. Pat. No. 8,734,809 SEQ ID NO: 133 |
| AAV CKd-3 | 740 | U.S. Pat. No. 8,734,809 SEQ ID NO: 134 |
| AAV CKd-4 | 741 | U.S. Pat. No. 8,734,809 SEQ ID NO: 135 |
| AAV CKd-6 | 742 | U.S. Pat. No. 8,734,809 SEQ ID NO: 136 |
| AAV CKd-7 | 743 | U.S. Pat. No. 8,734,809 SEQ ID NO: 137 |
| AAV CKd-8 | 744 | U.S. Pat. No. 8,734,809 SEQ ID NO: 138 |
| AAV CLv-1 | 745 | U.S. Pat. No. 8,734,809 SEQ ID NO: 139 |
| AAV CLv-12 | 746 | U.S. Pat. No. 8,734,809 SEQ ID NO: 140 |
| AAV CLv-13 | 747 | U.S. Pat. No. 8,734,809 SEQ ID NO: 141 |
| AAV CLv-2 | 748 | U.S. Pat. No. 8,734,809 SEQ ID NO: 142 |
| AAV CLv-3 | 749 | U.S. Pat. No. 8,734,809 SEQ ID NO: 143 |
| AAV CLv-4 | 750 | U.S. Pat. No. 8,734,809 SEQ ID NO: 144 |
| AAV CLv-6 | 751 | U.S. Pat. No. 8,734,809 SEQ ID NO: 145 |
| AAV CLv-8 | 752 | U.S. Pat. No. 8,734,809 SEQ ID NO: 146 |
| AAV CKd-B1 | 753 | U.S. Pat. No. 8,734,809 SEQ ID NO: 147 |
| AAV CKd-B2 | 754 | U.S. Pat. No. 8,734,809 SEQ ID NO: 148 |
| AAV CKd-B3 | 755 | U.S. Pat. No. 8,734,809 SEQ ID NO: 149 |
| AAV CKd-B4 | 756 | U.S. Pat. No. 8,734,809 SEQ ID NO: 150 |
| AAV CKd-B5 | 757 | U.S. Pat. No. 8,734,809 SEQ ID NO: 151 |
| AAV CKd-B6 | 758 | U.S. Pat. No. 8,734,809 SEQ ID NO: 152. |
| AAV CKd-B7 | 759 | U.S. Pat. No. 8,734,809 SEQ ID NO: 153 |
| AAV CKd-B8 | 760 | U.S. Pat. No. 8,734,809 SEQ ID NO: 154 |
| AAV CKd-H1 | 761 | U.S. Pat. No. 8,734,809 SEQ ID NO: 155 |
| AAV CKd-H2 | 762 | U.S. Pat. No. 8,734,809 SEQ ID NO: 156 |
| AAV CKd-H3 | 763 | U.S. Pat. No. 8,734,809 SEQ ID NO: 157 |
| AAV CKd-H4 | 764 | U.S. Pat. No. 8,734,809 SEQ ID NO: 158 |
| AAV CKd-H5 | 765 | U.S. Pat. No. 8,734,809 SEQ ID NO: 159 |
| AAV CKd-H6 | 766 | U.S. Pat. No. 8,734,809 SEQ ID NO: 151 |
| AAV CHt-1 | 767 | U.S. Pat. No. 8,734,809 SEQ ID NO: 160 |
| AAV CHt-P2 | 768 | WO2016065001 SEQ ID NO: 1 |
| AAV CHt-P5 | 769 | WO2016065001 SEQ ID NO: 2 |
| AAV CHt-P9 | 770 | WO2016065001 SEQ ID NO: 3 |
| AAV CBr-7.1 | 771 | WO2016065001 SEQ ID NO: 4 |
| AAV CBr-7.2 | 772 | WO2016065001 SEQ ID NO: 5 |
| AAV CBr-7.3 | 773 | WO2016065001 SEQ ID NO: 6 |
| AAV CBr-7.4 | 774 | WO2016065001 SEQ ID NO: 7 |
| AAV CBr-7.5 | 775 | WO2016065001 SEQ ID NO: 8 |
| AAV CBr-7.7 | 776 | WO2016065001 SEQ ID NO: 9 |
| AAV CBr-7.8 | 777 | WO2016065001 SEQ ID NO: 10 |
| AAV CBr-7.10 | 778 | WO2016065001 SEQ ID NO: 11 |
| AAV CKd-N3 | 779 | WO2016065001 SEQ ID NO: 12 |
| AAV CKd-N4 | 780 | WO2016065001 SEQ ID NO: 13 |
| AAV CKd-N9 | 781 | WO2016065001 SEQ ID NO: 14 |
| AAV CLv-L4 | 782 | WO2016065001 SEQ ID NO: 15 |
| AAV CLv-L5 | 783 | WO2016065001 SEQ ID NO: 16 |
| AAV CLv-L6 | 784 | WO2016065001 SEQ ID NO: 17 |
| AAV CLv-K1 | 785 | WO2016065001 SEQ ID NO: 18 |
| AAV CLv-K3 | 786 | WO2016065001 SEQ ID NO: 19 |
| AAV CLv-K6 | 787 | WO2016065001 SEQ ID NO: 20 |
| AAV CLv-M1 | 788 | WO2016065001 SEQ ID NO: 21 |
| AAV CLv-M11 | 789 | WO2016065001 SEQ ID NO: 22 |
| AAV CLv-M2 | 790 | WG2016065001 SEQ ID NO: 23 |
| AAV CLv-M5 | 791 | WO2016065001 SEQ ID NO: 24 |
| AAV CLv-M6 | 792 | WO2016065001 SEQ ID NO: 25 |
| AAV CLv-M7 | 793 | WO2016065001 SEQ ID NO: 26 |
| AAV CLv-M8 | 794 | WO2016065001 SEQ ID NO: 27 |
| AAV CLv-M9 | 795 | WO2016065001 SEQ ID NO: 28 |
| AAV CHt-P1 | 796 | WO2016065001 SEQ ID NO: 29 |
| AAV CHt-P6 | 797 | WO2016065001 SEQ ID NO: 30 |
| AAV CHt-P8 | 798 | WO2016065001 SEQ ID NO: 31 |
| AAV CHt-6.1 | 799 | WO2016065001 SEQ ID NO: 32 |
| AAV CHt-6.10 | 800 | WO2016065001 SEQ ID NO: 33 |
| AAV CHt-6.5 | 801 | WO2016065001 SEQ ID NO: 34 |
| AAV CHt-6.6 | 802 | WO2016065001 SEQ ID NO: 35 |
| AAV CHt-6.7 | 803 | WO2016065001 SEQ ID NO: 36 |
| AAV CHt-6.8 | 804 | WO2016065001 SEQ ID NO: 37 |
| AAV CSp-8.10 | 805 | WO2016065001 SEQ ID NO: 38 |
| AAV CSp-8.2 | 806 | WO2016065001 SEQ ID NO: 39 |
| AAV CSp-8.4 | 807 | WO2016065001 SEQ ID NO: 40 |
| AAV CSp-8.5 | 808 | WO2016065001 SEQ ID NO: 41 |
| AAV CSp-8.6 | 809 | WO2016065001 SEQ ID NO: 42 |
| AAV CSp-8.7 | 810 | WO2016065001 SEQ ID NO: 43 |
| AAV CSp-8.8 | 811 | WO2016065001 SEQ ID NO: 44 |
| AAV CSp-8.9 | 812 | WO2016065001 SEQ ID NO: 45 |
| AAV CBr-B7.3 | 813 | WO2016065001 SEQ ID NO: 46 |
| AAV CBr-B7.4 | 814 | WO2016065001 SEQ ID NO: 47 |
| AAV3B | 815 | WO2016065001 SEQ ID NO: 48 |
| AAV4 | 816 | WO2016065001 SEQ ID NO: 49 |
| AAV5 | 817 | WO2016065001 SEQ ID NO: 50 |
| AAV CHt-P2 | 818 | WO2016065001 SEQ ID NO: 51 |
| AAV CHt-P5 | 819 | WO2016065001 SEQ ID NO: 52 |
| AAV CHt-P9 | 820 | WO2016065001 SEQ ID NO: 53 |
| AAV CBr-7.1 | 821 | WO2016065001 SEQ ID NO: 54 |
| AAV CBr-7.2 | 822 | WO2016065001 SEQ ID NO: 55 |
| AAV CBr-7.3 | 823 | WO2016065001 SEQ ID NO: 56 |
| AAV CBr-7.4 | 824 | WO2016065001 SEQ ID NO: 57 |
| AAV CBr-7.5 | 825 | WO2016065001 SEQ ID NO: 58 |
| AAV CBr-7.7 | 826 | WO2016065001 SEQ ID NO: 59 |
| AAV CBr-7.8 | 827 | WO2016065001 SEQ ID NO: 60 |
| AAV CBr-7.10 | 828 | WO2016065001 SEQ ID NO: 61 |
| AAV CKd-N3 | 829 | WO2016065001 SEQ ID NO: 62 |
| AAV CKd-N4 | 830 | WO2016065001 SEQ ID NO: 63 |
| AAV CKd-N9 | 831 | WO2016065001 SEQ ID NO: 64 |
| AAV CLv-L4 | 832 | WO2016065001 SEQ ID NO: 65 |
| AAV CLV-L5 | 833 | WO2016065001 SEQ ID NO: 66 |
| AAV CLv-L6 | 834 | WO2016065001 SEQ ID NO: 67 |
| AAV CLv-K1 | 835 | WO2016065001 SEQ ID NO: 68 |
| AAV CLv-K3 | 836 | WO2016065001 SEQ ID NO: 69 |
| AAV CLv-K6 | 837 | WO2016065001 SEQ ID NO: 70 |
| AAV CLv-M1 | 838 | WO2016065001 SEQ ID NO: 71 |
| AAV CLv-M11 | 839 | WO2016065001 SEQ ID NO: 72 |
| AAV CLv-M2 | 840 | WO2016065001 SEQ ID NO: 73 |
| AAV CLv-M5 | 841 | WO2016065001 SEQ ID NO: 74 |
| AAV CLv-M6 | 842 | WO2016065001 SEQ ID NO: 75 |
| AAV CLv-M7 | 843 | WO2016065001 SEQ ID NO: 76 |
| AAV CLv-M8 | 844 | WO2016065001 SEQ ID NO: 77 |
| AAV CLv-M9 | 845 | WO2016065001 SEQ ID NO: 78 |
| AAV CHt-P1 | 846 | WO2016065001 SEQ ID NO: 79 |
| AAV CH5-P6 | 847 | WO2016065001 SEQ ID NO: 80 |
| AAV CHt-P8 | 848 | WO2016065001 SEQ ID NO: 81 |
| AAV CHt-6.1 | 849 | WO2016065001 SEQ ID NO: 82 |
| AAV CHt-6.10 | 850 | WO2016065001 SEQ ID NO: 83 |
| AAV CHt-6.5 | 851 | WO2016065001 SEQ ID NO: 84 |
| AAV CHt-6.6 | 852 | WO2016065001 SEQ ID NO: 85 |
| AAV CHt-6.7 | 853 | WO2016065001 SEQ ID NO: 86 |
| AAV CHt-6.8 | 854 | WO2016065001 SEQ ID NO: 87 |
| AAV CSp-8.10 | 855 | WO2016065001 SEQ ID NO: 88 |
| AAV CSp-8.2 | 856 | WO2016065001 SEQ ID NO: 89 |
| AAV CSp-8.4 | 857 | WO2016065001 SEQ ID NO: 90 |
| AAV CSp-8.5 | 858 | WO2016065001 SEQ ID NO: 91 |
| AAV CSp-8.6 | 859 | WO2016065001 SEQ ID NO: 92 |
| AAV CSp-8.7 | 860 | WO2016065001 SEQ ID NO: 93 |
| AAV CSp-8.8 | 861 | WO2016065001 SEQ ID NO: 94 |
| AAV CSp-8.9 | 862 | WO2016065001 SEQ ID NO: 95 |
| AAV CBr-B7.3 | 863 | WO2016065001 SEQ ID NO: 96 |
| AAV CBr-B7.4 | 864 | WO2016065001 SEQ ID NO: 97 |
| AAV3B | 865 | WO2016065001 SEQ ID NO: 98 |
| AAV4 | 866 | WO2016065001 SEQ ID NO: 99 |
| AAV5 | 867 | WO2016065001 SEQ ID NO: 100 |
| AAVPHP.B | 868 | WO2015038958 SEQ ID NO: 8 |
| or G2B-26 | | |
| | | and 13; GenBankALU85156.1 |
| AAVPHP.B | 869 | WO2015038958 SEQ ID NO: 9 |
| AAVG2B-13 | 870 | WO2015038958 SEQ ID NO: 12 |
| AAVTH1.1-32 | 871 | WO2015038958 SEQ ID NO: 14 |
| AAVTH1.1-35 | 872 | WO2015038958 SEQ ID NO: 15 |
| PHP.N/ | 1859 | WO2017100671 SEQ ID NO: 46 |
| PHP.B-DGT | | |
| PHP.S/G2A12 | 1860 | WO2017100671 SEQ ID NO: 47 |
| AAV9/hu.14 | 1861 | WO2017100671 SEQ ID NO: 45 |
| K449R | | |
| GPV | 1862 | US9624274B2 SEQ ID NO: 192 |
| B19 | 1863 | US9624274B2 SEQ ID NO: 193 |
| MVM | 1864 | US9624274B2 SEQ ID NO: 194 |
| CPV | 1865 | US9624274B2 SEQ ID NO: 195 |
| CPV | 1866 | US9624274B2 SEQ ID NO: 196 |
| AAV6 | 1867 | US9546112B2 SEQ ID NO: 5 |
| AAV6 | 1868 | US9457103B2 SEQ ID NO: 1 |
| AAV2 | 1869 | US9457103B2 SEQ ID NO: 2 |
| ShH10 | 1870 | US9457103B2 SEQ ID NO: 3 |
| ShH13 | 1871 | US9457103B2 SEQ ID NO: 4 |
| ShH10 | 1872 | US9457103B2 SEQ ID NO: 5 |
| ShH10 | 1873 | US9457103B2 SEQ ID NO: 6 |
| ShH10 | 1874 | US9457103B2 SEQ ID NO: 7 |
| ShH10 | 1875 | US9457103B2 SEQ ID NO: 8 |
| ShH10 | 1876 | US9457103B2 SEQ ID NO: 9 |
| rh74 | 1877 | US9434928B2 SEQ ID NO: 1, |
| | | US2015023924A1 SEQ ID NO: 2 |
| rh74 | 1878 | US9434928B2 SEQ ID NO: 2, |
| | | US2015023924A1 SEQ ID NO: 1 |
| AAV8 | 1879 | US9434928B2 SEQ ID NO: 4 |
| rh74 | 1880 | US9434928B2 SEQ ID NO: 5 |
| rh74 | 1881 | US2015023924A1 SEQ ID NO: 5, |
| (RHM4-1) | | US20160375110A1 SEQ ID NO: 4 |
| rh74 | 1882 | US2015023924A1 SEQ ID NO: 6, |
| (RHM15-1) | | US20160375110A1 SEQ ID NO: 5 |
| rh74 | 1883 | US2015023924A1 SEQ ID NO: 7, |
| (RHM15-2) | | US20160375110A1 SEQ ID NO: 6 |
| rh74 | 1884 | US2015023924A1 SEQ ID NO: 8, |
| (RHM15- | | US20160375110A1 SEQ ID NO: 7 |
| 3/RHM15-5) | | |
| rh74 | 1885 | US2015023924A1 SEQ ID NO: 9, |
| (RHM15-4) | | US20160375110A1 SEQ ID NO: 8 |
| rh74 | 1886 | US2015023924A1 SEQ ID NO: 10, |
| (RHM15-6) | | US20160375110A1 SEQ ID NO: 9 |
| rh74 | 1887 | US2015023924A1 SEQ ID NO: 11 |
| (RHM4-1) | | |
| rh74 | 1888 | US2015023924A1 SEQ ID NO: 12 |
| (RHM15-1) | | |
| rh74 | 1889 | US2015023924A1 SEQ ID NO: 13 |
| (RHM15-2) | | |
| rh74 | 1890 | US2015023924A1 SEQ ID NO: 14 |
| (RHM15-3/ | | |
| RHM15-5) | | |
| rh74 | 1891 | US2015023924A1 SEQ ID NO: 15 |
| (RHM15-4) | | |
| rh74 | 1892 | US2015023924A1 SEQ ID NO: 16 |
| (RHM15-6) | | |
| AAV2 | 1893 | US20160175389A1 SEQ ID NO: 9 |
| (comprising | | |
| lung specific | | |
| polypeptide) | | |
| AAV2 | 1894 | US20160175389A1 SEQ ID NO: 10 |
| (comprising | | |
| lung specific | | |
| polypeptide) | | |
| Anc80 | 1895 | US20170051257A1 SEQ ID NO: 1 |
| Anc80 | 1896 | US20170051257A1 SEQ ID NO: 2 |
| Anc81 | 1897 | US20170051257A1 SEQ ID NO: 3 |
| Anc80 | 1898 | US20170051257A1 SEQ ID NO: 4 |
| Anc82 | 1899 | US20170051257A1 SEQ ID NO: 5 |
| Anc82 | 1900 | US20170051257A1 SEQ ID NO: 6 |
| Anc83 | 1901 | US20170051257A1 SEQ ID NO: 7 |
| Anc83 | 1902 | US20170051257A1 SEQ ID NO: 8 |
| Anc84 | 1903 | US20170051257A1 SEQ ID NO: 9 |
| Anc84 | 1904 | US20170051257A1 SEQ ID NO: 10 |
| Anc94 | 1905 | US20170051257A1 SEQ ID NO: 11 |
| Anc94 | 1906 | US20170051257A1 SEQ ID NO: 12 |
| Anc113 | 1907 | US20170051257A1 SEQ ID NO: 13 |
| Anc113 | 1908 | US20170051257A1 SEQ ID NO: 14 |
| Anc126 | 1909 | US20170051257A1 SEQ ID NO: 15 |
| Anc126 | 1910 | US20170051257A1 SEQ ID NO: 16 |
| Anc127 | 1911 | US20170051257A1 SEQ ID NO: 17 |
| Anc127 | 1912 | US20170051257A1 SEQ ID NO: 18 |
| Anc80L27 | 1913 | US20170051257A1 SEQ ID NO: 19 |
| Anc80L59 | 1914 | US20170051257A1 SEQ ID NO: 20 |
| Anc80L60 | 1915 | US20170051257A1 SEQ ID NO: 21 |
| Anc80L62 | 1916 | US20170051257A1 SEQ ID NO: 22 |
| Anc80L65 | 1917 | US20170051257A1 SEQ ID NO: 23 |
| Anc80L33 | 1918 | US20170051257A1 SEQ ID NO: 24 |
| Anc80L36 | 1919 | US20170051257A1 SEQ ID NO: 25 |
| Anc80L44 | 1920 | US20170051257A1 SEQ ID NO: 26 |
| Anc80L1 | 1921 | US20170051257A1 SEQ ID NO: 35 |
| Anc80L1 | 1922 | US20170051257A1 SEQ ID NO: 36 |
| AAV-X1 | 1923 | US8283151B2 SEQ ID NO: 11 |
| AAV-X1b | 1924 | US8283151B2 SEQ ID NO: 12 |
| AAV-X5 | 1925 | US8283151B2 SEQ ID NO: 13 |
| AAV-X19 | 1926 | US8283151B2 SEQ ID NO: 14 |
| AAV-X22 | 1927 | US8283151B2 SEQ ID NO: 15 |
| AAV-X22 | 1928 | US8283151B2 SEQ ID NO: 16 |
| AAV-X23 | 1929 | US8283151B2 SEQ ID NO: 17 |
| AAV-X24 | 1930 | US8283151B2 SEQ ID NO: 18 |
| AAV-X25 | 1931 | US8283151B2 SEQ ID NO: 19 |
| AAV-X26 | 1932 | US8283151B2 SEQ ID NO: 20 |
| AAV-X1 | 1933 | US8283151B2 SEQ ID NO: 21 |
| AAV-X1b | 1934 | US8283151B2 SEQ ID NO: 22 |
| AAV-X5 | 1935 | US8283151B2 SEQ ID NO: 23 |
| AAV-X19 | 1936 | US8283151B2 SEQ ID NO: 24 |
| AAV-X21 | 1937 | US8283151B2 SEQ ID NO: 25 |
| AAV-X22 | 1938 | US8283151B2 SEQ ID NO: 26 |
| AAV-X23 | 1939 | US8283151B2 SEQ ID NO: 27 |
| AAV-X24 | 1940 | US8283151B2 SEQ ID NO: 28 |
| AAV-X25 | 1941 | US8283151B2 SEQ ID NO: 29 |
| AAV-X26 | 1942 | US8283151B2 SEQ ID NO: 30 |
| AAVrh8 | 1943 | WO2016054554A1 SEQ ID NO: 8 |
| AAVrh8VP2 | 1944 | WO2016054554A1 SEQ ID NO: 9 |
| FC5 | | |
| AAVrh8VP2 | 1945 | WO2016054554A1 SEQ ID NO: 30 |
| FC44 | | |
| AAVrh8VP2 | 1946 | WO2016054554A1 SEQ ID NO: 11 |
| ApoB100 | | |
| AAVrh8VP2 | 1947 | WO2016054554A1 SEQ ID NO: 12 |
| RVG | | |
| AAVrh8VP2 | 1948 | WO2016054554A1 SEQ ID NO: 13 |
| Angiopep-2 | | |
| VP2 | | |
| AAV9.47VP | 1949 | WO2016054554A1 SEQ ID NO: 14 |
| 1.3 | | |
| AAV9.47VP | 1950 | WO2016054554A1 SEQ ID NO: 15 |
| 2ICAMg3 | | |
| AAV9.47VP | 1951 | WO2016054554A1 SEQ ID NO: 16 |
| 2RVG | | |
| AAV9.47VP | 1952 | WO2016054554A1 SEQ ID NO: 17 |
| 2Angiopep-2 | | |
| AAV9.47VP | 1953 | WO2016054554A1 SEQ ID NO: 18 |
| 2A-siring | | |
| AAVrh8VP | 1954 | WO2016054554A1 SEQ ID NO: 19 |
| 2FC5 VP2 | | |
| AAVrh8VP | 1955 | WO2016054554A1 SEQ ID NO: 20 |
| 2FC44 VP2 | | |
| AAVrb8VP2 | 1956 | WO2016054554A1 SEQ ID NO: 21 |
| ApoB100 | | |
| VP2 | | |
| AAVrh8VP2 | 1957 | WO2016054554A1 SEQ ID NO: 22 |
| RVG VP2 | | |
| AAVrh8VP2 | 1958 | WO2016054554A1 SEQ ID NO: 23 |
| Angiopep-2 | | |
| VP2 | | |
| AAV9.47VP | 1959 | WO2016054554A1 SEQ ID NO: 24 |
| 2ICAMg3 | | |
| VP2 | | |
| AAV9.47VP | I960 | WO2016054554A1 SEQ ID NO: 25 |
| 2RVG VP2 | | |
| AAV9.47VP | 1961 | WO2016054554A1 SEQ ID NO: 26 |
| 2Angiopep-2 | | |
| VP2 | | |
| AAV9.47VP | 1962 | WO2016054554A1 SEQ ID NO: 2.7 |
| 2A-string | | |
| VP2 | | |
| rAAV-B1 | 1963 | WO2016054557A1 SEQ ID NO: 1 |
| rAAV-B2 | 1964 | WO2016054557A1 SEQ ID NO: 2 |
| rAAV-B3 | 1965 | WO2016054557A1 SEQ ID NO: 3 |
| rAAV-B4 | 1966 | WO2016054557A1 SEQ ID NO: 4 |
| rAAV-B1 | 1967 | WO2016054557A1 SEQ ID NO: 5 |
| rAAV-B2 | 1968 | WO2016054557A1 SEQ ID NO: 6 |
| rAAV-B3 | 1969 | WO2016054557A1 SEQ ID NO: 7 |
| rAAV-B4 | 1970 | WO2016054557A1 SEQ ID NO: 8 |
| rAAV-L1 | 1971 | WO2016054557A1 SEQ ID NO: 9 |
| rAAV-L2 | 1972 | WO2016054557A1 SEQ ID NO: 10 |
| rAAV-L3 | 1973 | WO2016054557A1 SEQ ID NO: 11 |
| rAAV-L4 | 1974 | WO2016054557A1 SEQ ID NO: 12 |
| rAAV-L1 | 1975 | WO2016054557A1 SEQ ID NO: 13 |
| rAAV-L2 | 1976 | WO2016054557A1 SEQ ID NO: 14 |
| rAAV-L3 | 1977 | WO2016054557A1 SEQ ID NO: 15 |
| rAAV-L4 | 1978 | WO2016054557A1 SEQ ID NO: 16 |
| AAV9 | 1979 | WO2016073739A1 SEQ ID NO: 3 |
| rAAV | 1980 | WO2016081811A1 SEQ ID NO: 1 |
| rAAV | 1981 | WO2016081811A1 SEQ ID NO: 2 |
| rAAV | 1982 | WO2016081811A1 SEQ ID NO: 3 |
| rAAV | 1983 | WO2016081811A1 SEQ ID NO: 4 |
| rAAV | 1984 | WO2016081811A1 SEQ ID NO: 5 |
| rAAV | 1985 | WO2016081811A1 SEQ ID NO: 6 |
| rAAV | 1986 | WO2016081811A1 SEQ ID NO: 7 |
| rAAV | 1987 | WO2016081811A1 SEQ ID NO: 8 |
| rAAV | 1988 | WO2016081811A1 SEQ ID NO: 9 |
| rAAV | 1989 | WO2016081811A1 SEQ ID NO: 10 |
| rAAV | 1990 | WO2016081811A1 SEQ ID NO: 11 |
| rAAV | 1991 | WO2016081811A1 SEQ ID NO: 12 |
| rAAV | 1992 | WO2016081811A1 SEQ ID NO: 13 |
| rAAV | 1997 | WO2016081811A1 SEQ ID NO: 14 |
| rAAV | 1994 | WO2016081811A1 SEQ ID NO: 15 |
| rAAV | 1995 | WO2016081811A1 SEQ ID NO: 16 |
| rAAV | 1996 | WO2016081811A1 SEQ ID NO: 17 |
| rAAV | 1997 | WO2016081811A1 SEQ ID NO: 18 |
| rAAV | 1998 | WO2016081811A1 SEQ ID NO: 19 |
| rAAV | 1999 | WO2016081811A1 SEQ ID NO: 20 |
| rAAV | 2000 | WO2016081811A1 SEQ ID NO: 21 |
| rAAV | 2001 | WO2016081811A1 SEQ ID NO: 22 |
| rAAV | 2002 | WO2016081811A1 SEQ ID NO: 23 |
| rAAV | 2003 | WO2016081811A1 SEQ ID NO: 24 |
| rAAV | 2004 | WO2016081811A1 SEQ ID NO: 25 |
| rAAV | 2005 | WO2016081811A1 SEQ ID NO: 26 |
| rAAV | 2006 | WO2016081811A1 SEQ ID NO: 27 |
| rAAV | 2007 | WO2016081811A1 SEQ ID NO: 28 |
| rAAV | 2008 | WO2016081811A1 SEQ ID NO: 29 |
| rAAV | 2009 | WO2016081811A1 SEQ ID NO: 30 |
| rAAV | 2010 | WO2016081811A1 SEQ ID NO: 31 |
| rAAV | 2011 | WO2016081811A1 SEQ ID NO: 32 |
| rAAV | 2012 | WO2016081811A1 SEQ ID NO: 33 |
| rAAV | 2013 | WO2016081811A1 SEQ ID NO: 34 |
| rAAV | 2014 | WO2016081811A1 SEQ ID NO: 35 |
| rAAV | 2015 | WO2016081811A1 SEQ ID NO: 36 |
| rAAV | 2016 | WO2016081811A1 SEQ ID NO: 37 |
| rAAV | 2017 | WO2016081811A1 SEQ ID NO: 38 |
| rAAV | 2018 | WO2016081811A1 SEQ ID NO: 39 |
| rAAV | 2019 | WO2016081811A1 SEQ ID NO: 40 |
| rAAV | 2020 | WO2016081811A1 SEQ ID NO: 41 |
| rAAV | 2021 | WO2016081811A1 SEQ ID NO: 42 |
| rAAV | 2022 | WO2016081811A1 SEQ ID NO: 43 |
| rAAV | 2023 | WO2016081811A1 SEQ ID NO: 44 |
| rAAV | 2024 | WO2016081811A1 SEQ ID NO: 45 |
| rAAV | 2025 | WO2016081811A1 SEQ ID NO: 46 |
| rAAV | 2026 | WO2016081811A1 SEQ ID NO: 47 |
| rAAV | 2027 | WO2016081811A1 SEQ ID NO: 48 |
| rAAV | 2028 | WO2016081811A1 SEQ ID NO: 49 |
| rAAV | 2029 | WO2016081811A1 SEQ ID NO: 50 |
| rAAV | 2030 | WO2016081811A1 SEQ ID NO: 51 |
| rAAV | 2031 | WO2016081811A1 SEQ ID NO: 52 |
| rAAV | 2032 | WO2016081811A1 SEQ ID NO: 53 |
| rAAV | 2033 | WO2016081811A1 SEQ ID NO: 54 |
| rAAV | 2034 | WO2016081811A1 SEQ ID NO: 55 |
| rAAV | 2035 | WO2016081811A1 SEQ ID NO: 56 |
| rAAV | 2036 | WO2016081811A1 SEQ ID NO: 57 |
| rAAV | 2037 | WO2016081811A1 SEQ ID NO: 58 |
| rAAV | 2038 | WO2016081811A1 SEQ ID NO: 59 |
| rAAV | 2039 | WO2016081811A1 SEQ ID NO: 60 |
| rAAV | 2040 | WO2016081811A1 SEQ ID NO: 61 |
| rAAV | 2041 | WO2016081811A1 SEQ ID NO: 62 |
| rAAV | 2042 | WO2016081811A1 SEQ ID NO: 63 |
| rAAV | 2043 | WO2016081811A1 SEQ ID NO: 64 |
| rAAV | 2044 | WO2016081811A1 SEQ ID NO: 65 |
| rAAV | 2045 | WO2016081811A1 SEQ ID NO: 66 |
| rAAV | 2046 | WO2016081811A1 SEQ ID NO: 67 |
| rAAV | 2047 | WO2016081811A1 SEQ ID NO: 68 |
| rAAV | 2048 | WO2016081811A1 SEQ ID NO: 69 |
| rAAV | 2049 | WO2016081811A1 SEQ ID NO: 70 |
| rAAV | 2050 | WO2016081811A1 SEQ ID NO: 71 |
| rAAV | 2051 | WO2016081811A1 SEQ ID NO: 72 |
| rAAV | 2052 | WO2016081811A1 SEQ ID NO: 73 |
| rAAV | 2053 | WO2016081811A1 SEQ ID NO: 74 |
| rAAV | 2054 | WO2016081811A1 SEQ ID NO: 75 |
| rAAV | 2055 | WO2016081811A1 SEQ ID NO: 76 |
| rAAV | 2056 | WO2016081811A1 SEQ ID NO: 77 |
| rAAV | 2057 | WO2016081811A1 SEQ ID NO: 78 |
| rAAV | 2058 | WO2016081811A1 SEQ ID NO: 79 |
| rAAV | 2059 | WO2016081811A1 SEQ ID NO: 80 |
| rAAV | 2060 | WO2016081811A1 SEQ ID NO: 81 |
| rAAV | 2061 | WO2016081811A1 SEQ ID NO: 82 |
| rAAV | 2062 | WO2016081811A1 SEQ ID NO: 83 |
| rAAV | 2063 | WO2016081811A1 SEQ ID NO: 84 |
| rAAV | 2064 | WO2016081811A1 SEQ ID NO: 85 |
| rAAV | 2065 | WO2016081811A1 SEQ ID NO: 86 |
| rAAV | 2066 | WO2016081811A1 SEQ ID NO: 87 |
| rAAV | 2067 | WO2016081811A1 SEQ ID NO: 88 |
| rAAV | 2068 | WO2016081811A1 SEQ ID NO: 89 |
| rAAV | 2069 | WO2016081811A1 SEQ ID NO: 90 |
| rAAV | 2070 | WO2016081811A1 SEQ ID NO: 91 |
| rAAV | 2071 | WO2016081811A1 SEQ ID NO: 92 |
| rAAV | 2072 | WO2016081811A1 SEQ ID NO: 93 |
| rAAV | 2073 | WO2016081811A1 SEQ ID NO: 94 |
| rAAV | 2074 | WO2016081811A1 SEQ ID NO: 95 |
| rAAV | 2075 | WO2016081811A1 SEQ ID NO: 96 |
| rAAV | 2076 | WO2016081811A1 SEQ ID NO: 97 |
| rAAV | 2077 | WO2016081811A1 SEQ ID NO: 98 |
| rAAV | 2078 | WO2016081811A1 SEQ ID NO: 99 |
| rAAV | 2079 | WO2016081811A1 SEQ ID NO: 100 |
| rAAV | 2080 | WO2016081811A1 SEQ ID NO: 101 |
| rAAV | 2081 | WO2016081811A1 SEQ ID NO: 102 |
| rAAV | 2082 | WO2016081811A1 SEQ ID NO: 103 |
| rAAV | 2083 | WO2016081811A1 SEQ ID NO: 104 |
| rAAV | 2084 | WO2016081811A1 SEQ ID NO: 105 |
| rAAV | 2085 | WO2016081811A1 SEQ ID NO: 106 |
| rAAV | 2086 | WO2016081811A1 SEQ ID NO: 107 |
| rAAV | 2087 | WO2016081811A1 SEQ ID NO: 108 |
| rAAV | 2088 | WO2016081811A1 SEQ ID NO: 109 |
| rAAV | 2089 | WO2016081811A1 SEQ ID NO: 110 |
| rAAV | 2090 | WO2016081811A1 SEQ ID NO: 111 |
| rAAV | 2091 | WO2016081811A1 SEQ ID NO: 112 |
| rAAV | 2092 | WO2016081811A1 SEQ ID NO: 113 |
| rAAV | 2093 | WO2016081811A1 SEQ ID NO: 114 |
| rAAV | 2094 | WO2016081811A1 SEQ ID NO: 115 |
| rAAV | 2095 | WO2016081811A1 SEQ ID NO: 116 |
| rAAV | 2096 | WO2016081811A1 SEQ ID NO: 117 |
| rAAV | 2097 | WO2016081811A1 SEQ ID NO: 118 |
| rAAV | 2098 | WO2016081811A1 SEQ ID NO: 119 |
| rAAV | 2099 | WO2016081811A1 SEQ ID NO: 120 |
| rAAV | 2100 | WO2016081811A1 SEQ ID NO: 121 |
| rAAV | 2101 | WO2016081811A1 SEQ ID NO: 122 |
| rAAV | 2102 | WO2016081811A1 SEQ ID NO: 123 |
| rAAV | 2103 | WO2016081811A1 SEQ ID NO: 124 |
| rAAV | 2104 | WO2016081811A1 SEQ ID NO: 125 |
| rAAV | 2105 | WO2016081811A1 SEQ ID NO: 126 |
| rAAV | 2106 | WO2016081811A1 SEQ ID NO: 127 |
| rAAV | 2107 | WO2016081811A1 SEQ ID NO: 128 |
| AAV8 | 2108 | WO2016081811A1 SEQ ID NO: 133 |
| E532K | | |
| AAV8 | 2109 | WO2016081811A1 SEQ ID NO: 134 |
| E532K | | |
| rAAV4 | 2110 | WO2016115382A1 SEQ ID NO: 2 |
| rAAV4 | 2111 | WO2016115382A1 SEQ ID NO: 3 |
| rAAV4 | 2112 | WO2016115382A1 SEQ ID NO: 4 |
| rAAV4 | 2113 | WO2016115382A1 SEQ ID NO: 5 |
| rAAV4 | 2114 | WO2016115382A1 SEQ ID NO: 6 |
| rAAV4 | 2115 | WO2016115382A1 SEQ ID NO: 7 |
| rAAV4 | 2116 | WO2016115382A1 SEQ ID NO: 8 |
| rAAV4 | 2117 | WO2016115382A1 SEQ ID NO: 9 |
| rAAV4 | 2118 | WO2016115382A1 SEQ ID NO: 10 |
| rAAV4 | 2119 | WO2016115382A1 SEQ ID NO: 11 |
| rAAV4 | 2120 | WO2016115382A1 SEQ ID NO: 12 |
| rAAV4 | 2121 | WO2016115382A1 SEQ ID NO: 13 |
| rAAV4 | 2122 | WO2016115382A1 SEQ ID NO: 14 |
| rAAV4 | 2123 | WO2016115382A1 SEQ ID NO: 15 |
| rAAV4 | 2124 | WO2016115382A1 SEQ ID NO: 16 |
| rAAV4 | 2125 | WO2016115382A1 SEQ ID NO: 17 |
| rAAV4 | 2126 | WO2016115382A1 SEQ ID NO: 18 |
| rAAV4 | 2127 | WO2016115382A1 SEQ ID NO: 19 |
| rAAV4 | 2128 | WO2016115382A1 SEQ ID NO: 20 |
| rAAV4 | 2129 | WO2016115382A1 SEQ ID NO: 21 |
| AAV11 | 2130 | WO2016115382A1 SEQ ID NO: 22 |
| AAV12 | 2131 | WO2016115382A1 SEQ ID NO: 23 |
| rh32 | 2132 | WO2016115382A1 SEQ ID NO: 25 |
| rh33 | 2133 | WO2016115382A1 SEQ ID NO: 26 |
| rh34 | 2134 | WO2016115382A1 SEQ ID NO: 27 |
| rAAV4 | 2135 | WO2016115382A1 SEQ ID NO: 28 |
| rAAV4 | 2136 | WO2016115382A1 SEQ ID NO: 29 |
| rAAV4 | 2137 | WO2016115382A1 SEQ ID NO: 30 |
| rAAV4 | 2138 | WO2016115382A1 SEQ ID NO: 31 |
| rAAV4 | 2139 | WO2016115382A1 SEQ ID NO: 32 |
| rAAV4 | 2140 | WO2016115382A1 SEQ ID NO: 33 |
| AAV2/8 | 2141 | WO2016131981A1 SEQ ID NO: 47 |
| AAV2/8 | 2142 | WO2016131981A1 SEQ ID NO: 48 |
| ancestral | 2143 | WO2016154344A1 SEQ ID NO: 7 |
| AAV | | |
| ancestral | 2144 | WO2016154344A1 SEQ ID NO: 13 |
| AAV variant | | |
| C4 | | |
| ancestral | 2145 | WO2016154344A1 SEQ ID NO: 14 |
| AAV variant | | |
| C7 | | |
| ancestral | 2146 | WO2016154344A1 SEQ ID NO: 15 |
| AAV variant | | |
| G4 | | |
| consensus | 2147 | WO2016154344A1 SEQ ID NO: 16 |
| amino acid | | |
| sequence of | | |
| ancestral | | |
| AAV | | |
| variants, C4, | | |
| C7 and G4 | | |
| consensus | 2148 | WO2016154344A1 SEQ ID NO: 17 |
| amino acid | | |
| sequence of | | |
| ancestral | | |
| AAV | | |
| variants, C4 | | |
| and C7 | | |
| AAV8 (with | 2149 | WO2016150403A1 SEQ ID NO: 13 |
| a AAV2 | | |
| phospholipase | | |
| domain) | | |
| AAV VR- | 2150 | US20160289275A1 SEQ ID NO: 10 |
| 942n | | |
| AAV5-A | 2151 | US20160289275A1 SEQ ID NO: 13 |
| (M569V) | | |
| AAV5-A | 2152 | US20160289275A1 SEQ ID NO: 14 |
| (M569V) | | |
| AAV5-A | 2153 | US20160289275A1 SEQ ID NO: 16 |
| (Y585V) | | |
| AAV5-A | 2154 | US20160289275A1 SEQ ID NO: 17 |
| (Y585V) | | |
| AAV5-A | 2155 | US20160289275A1 SEQ ID NO: 19 |
| (L587T) | | |
| AAV5-A | 2156 | US20160289275A1 SEQ ID NO: 20 |
| (L587T) | | |
| AAV5-A | 2157 | US20160289275A1 SEQ ID NO: 22 |
| (Y585V/L587T) | | |
| AAV5-A | 2158 | US20160289275A1 SEQ ID NO: 23 |
| (Y585V/L587T) | | |
| AAV5-B | 2159 | US20160289275A1 SEQ ID NO: 25 |
| (D652A) | | |
| AAV5-B | 2160 | US20160289275A1 SEQ ID NO: 26 |
| (D652A) | | |
| AAV5-B | 2161 | US20160289275A1 SEQ ID NO: 28 |
| (T362M) | | |
| AAV5-B | 2162 | US20160289275A1 SEQ ID NO: 29 |
| (T362M) | | |
| AAV5-B | 2163 | US20160289275A1 SEQ ID NO: 31 |
| (Q359D) | | |
| AAV5-B | 2164 | US20160289275A1 SEQ ID NO: 32 |
| (0359D) | | |
| AAV5-B | 2165 | US20160289275A1 SEQ ID NO: 34 |
| (E350Q) | | |
| AAV5-B | 2166 | US20160289275A1 SEQ ID NO: 35 |
| (E350Q) | | |
| AAV5-B | 2167 | US20160289275A1 SEQ ID NO: 37 |
| (P533S) | | |
| AAV5-B | 2168 | US20160289275A1 SEQ ID NO: 38 |
| (P533S) | | |
| AAV5-B | 2169 | US20160289275A1 SEQ ID NO: 40 |
| (P533G) | | |
| AAV5-B | 2170 | US20160289275A1 SEQ ID NO: 41 |
| (P533G) | | |
| AAV5- | 2171 | US20160289275A1 SEQ ID NO: 43 |
| mutation in | | |
| loop VII | | |
| AAV5- | 2172 | US20160289275A1 SEQ ID NO: 44 |
| mutation in | | |
| loop VII | | |
| AAV8 | 2173 | US20160289275A1 SEQ ID NO: 47 |
| MutA | 2174 | WO2016181123A1 SEQ ID NO: 1 |
| (LK03/AAV8) | | |
| MutB | 2175 | WO2016181123A1 SEQ ID NO: 2 |
| (LK03/AAV5) | | |
| MutC | 2176 | WO2016181123A1 SEQ ID NO: 3 |
| (AAV8/ | | |
| AAV3B) | | |
| MutD | 2177 | WO2016181123A1 SEQ ID NO: 4 |
| (AAV5/ | | |
| AAV3B) | | |
| MutE | 2178 | WO2016181123A1 SEQ ID NO: 5 |
| (AAV8/ | | |
| AAV3B) | | |
| MutF | 2179 | WO2016181123A1 SEQ ID NO: 6 |
| (AAV3B/ | | |
| AAV8) | | |
| AAV44.9 | 2180 | WO2016183297A1 SEQ ID NO: 4 |
| AAV44.9 | 2181 | WO2016183297A1 SEQ ID NO: 5 |
| AAVrh8 | 2182 | WO2016183297A1 SEQ ID NO: 6 |
| AAV44.9 | 2183 | WO2016183297A1 SEQ ID NO: 9 |
| (S470N) | | |
| rh74 VP1 | 2184 | US20160375110A1 SEQ ID NO: 1 |
| AAV-LK03 | 2185 | WO2017015102A1 SEQ ID NO: 5 |
| (L135I) | | |
| AAV3B | 2186 | WO2017015102A1 SEQ ID NO: 6 |
| (S663V + | | |
| T492V) | | |
| Anc80 | 2187 | WO2017019994A2 SEQ ID NO: 1 |
| Anc80 | 2188 | WO2017019994A2 SEQ ID NO: 2 |
| Anc81 | 2189 | WO2017019994A2 SEQ ID NO: 3 |
| Anc81 | 2190 | WO2017019994A2 SEQ ID NO: 4 |
| Anc82 | 2191 | WO2017019994A2 SEQ ID NO: 5 |
| Anc82 | 2192 | WO2017019994A2 SEQ ID NO: 6 |
| Anc83 | 2193 | WO2017019994A2 SEQ ID NO: 7 |
| Anc83 | 2194 | WO2017019994A2 SEQ ID NO: 8 |
| Anc84 | 2195 | WO2017019994A2 SEQ ID NO: 9 |
| Anc84 | 2196 | WO2017019994A2 SEQ ID NO: 10 |
| Anc94 | 2197 | WO2017019994A2 SEQ ID NO: 11 |
| Anc94 | 2198 | WO2017019994A2 SEQ ID NO: 12 |
| Anc113 | 2199 | WO2017019994A2 SEQ ID NO: 13 |
| Anc113 | 2200 | WO2017019994A2 SEQ ID NO: 14 |
| Anc126 | 2201 | WO2017019994A2 SEQ ID NO: 15 |
| Anc126 | 2202 | WO2017019994A2 SEQ ID NO: 16 |
| Anc127 | 2203 | WO2017019994A2 SEQ ID NO: 17 |
| Anc127 | 2204 | WO2017019994A2 SEQ ID NO: 18 |
| Anc80L27 | 2205 | WO2017019994A2 SEQ ID NO: 19 |
| Anc80L59 | 2206 | WO2017019994A2 SEQ ID NO: 20 |
| Anc80L60 | 2207 | WO2017019994A2 SEQ ID NO: 21 |
| Anc80L62 | 2208 | WO2017019994A2 SEQ ID NO: 22 |
| Anc80L65 | 2209 | WO2017019994A2 SEQ ID NO: 23 |
| Anc80L33 | 2210 | WO2017019994A2 SEQ ID NO: 24 |
| Anc80L36 | 2211 | WO2017019994A2 SEQ ID NO: 25 |
| Anc80L44 | 2212 | WO2017019994A2 SEQ ID NO: 26 |
| Anc80L1 | 2213 | WO2017019994A2 SEQ ID NO: 35 |
| Anc80L1 | 2214 | WO2017019994A2 SEQ ID NO: 36 |
| AAVrh10 | 2215 | WO2017019994A2 SEQ ID NO: 41 |
| Anc110 | 2216 | WO2017019994A2 SEQ ID NO: 42 |
| Anc110 | 2217 | WO2017019994A2 SEQ ID NO: 43 |
| AAVrh32.33 | 2218 | WO2017019994A2 SEQ ID NO: 45 |
| AAVrh74 | 2219 | WO2017049031A1 SEQ ID NO: 1 |
| AAV2 | 2220 | WO2017053629A2 SEQ ID NO: 49 |
| AAV2 | 2221 | WO2017053629A2 SEQ ID NO: 50 |
| AAV2 | 2222 | WO2017053629A2 SEQ ID NO: 82 |
| Parvo-like | 2223 | WO2017070476A2 SEQ ID NO: 1 |
| virus | | |
| Parvo-like | 2224 | WO2017070476A2 SEQ ID NO: 2 |
| virus | | |
| Parvo-like | 2225 | WO2017070476A2 SEQ ID NO: 3 |
| virus | | |
| Parvo-like | 2226 | WO2017070476A2 SEQ ID NO: 4 |
| virus | | |
| Parvo-like | 2227 | WO2017070476A2 SEQ ID NO: 5 |
| virus | | |
| Parvo-like | 2228 | WO2017070476A2 SEQ ID NO: 6 |
| virus | | |
| AAVrh.10 | 2229 | WO2017070516A1 SEQ ID NO: 7 |
| AAVrh.10 | 2230 | WO2017070516A1 SEQ ID NO: 14 |
| AAV2tYF | 2231 | WO2017070491A1 SEQ ID NO: 1 |
| AAV-SPK | 2232 | WO2017075619A1 SEQ ID NO: 28 |
| AAV2.5 | 2233 | US20170128528A1 SEQ ID NO: 13 |
| AAV1.1 | 2234 | US20170128528A1 SEQ ID NO: 15 |
| AAV6.1 | 2235 | US20170128528A1 SEQ ID NO: 17 |
| AAV6.3.1 | 2236 | US20170128528A1 SEQ ID NO: 18 |
| AAV2i8 | 2237 | US20170128528A1 SEQ ID NO: 28 |
| AAV2i8 | 2238 | US20170128528A1 SEQ ID NO: 29 |
| ttAAV | 2239 | US20170128528A1 SEQ ID NO: 30 |
| ttAAV- | 2240 | US20170128528A1 SEQ ID NO: 32 |
| S312N | | |
| ttAAV- | 2241 | US20170128528A1 SEQ ID NO: 33 |
| S312N | | |
| AAV6 | 2242 | WO2016134337A1 SEQ ID NO: 24 |
| (Y705, Y731, | | |
| and T492) | | |
| AAV2 | 2243 | WO2016134375A1 SEQ ID NO: 9 |
| AAV2 | 2244 | WO2016134375A1 SEQ ID NO: 10 |

[0232] Each of the patents, applications and/or publications listed in Table 1 are hereby incorporated by reference in their entirety.

[0233] In one embodiment, the AAV serotype may be, or may have a sequence as described in International Patent Publication WO2015038958, the contents of which are herein incorporated by reference in their entirety, such as, but not limited to, AAV9 (SEQ ID NO: 2 and 11 of WO2015038958 or SEQ ID NO: 127 and 126 respectively herein), PHP.B (SEQ ID NO: 8 and 9 of WO2015038958, herein SEQ ID NO: 868 and 869), G2B-13 (SEQ ID NO: 12 of WO2015038958, herein SEQ ID NO: 870), G2B-26 (SEQ ID NO: 13 of WO2015038958, herein SEQ ID NO: 868 and 869), TH1.1-32 (SEQ ID NO: 14 of WO2015038958, herein SEQ ID NO: 871), TH1.1-35 (SEQ ID NO: 15 of WO2015038958, herein SEQ ID NO: 872) or variants thereof. Further, any of the targeting peptides or amino acid inserts described in WO2015038958, may be inserted into any parent AAV serotype, such as, but not limited to, AAV9 (SEQ ID NO: 126 for the DNA sequence and SEQ ID NO: 127 for the amino acid sequence). In one embodiment, the amino acid insert is inserted between amino acids 586-592 of the parent AAV (e.g., AAV9). In another embodiment, the amino acid insert is inserted between amino acids 588-589 of the parent AAV sequence. The amino acid insert may be, but is not limited to, any of the following amino acid sequences, TLAVPFK (SEQ ID NO: 1 of WO2015038958; herein SEQ ID NO: 873), KFPVALT (SEQ ID NO: 3 of WO2015038958; herein SEQ ID NO: 874), LAVPFK (SEQ ID NO: 31 of WO2015038958; herein SEQ ID NO: 875), AVPFK (SEQ ID NO: 32 of WO2015038958; herein SEQ ID NO: 876), VPFK (SEQ ID NO: 33 of WO2015038958; herein SEQ ID NO: 877), TLAVPF (SEQ ID NO: 34 of WO2015038958; herein SEQ ID NO: 878), TLAVP (SEQ ID NO: 35 of WO2015038958; herein SEQ ID NO: 879), TLAV (SEQ ID NO: 36 of WO2015038958; herein SEQ ID NO: 880), SVSKPFL (SEQ ID NO: 28 of WO02015038958; herein SEQ ID NO: 881), FTLTTPK (SEQ ID NO: 29 of WO2015038958; herein SEQ ID NO: 882), MNATKNV (SEQ ID NO: 30 of WO2015038958; herein SEQ ID NO: 883), QSSQTPR (SEQ ID NO: 54 of WO2015038958; herein SEQ ID NO: 884), ILGTGTS (SEQ ID NO: 55 of WO2015038958; herein SEQ ID NO: 885), TRTNPEA (SEQ ID NO: 56 of WO2015038958; herein SEQ ID NO: 886), NGGTSSS (SEQ ID NO: 58 of WO2015038958; herein SEQ ID NO: 887), or YTLSQGW (SEQ ID NO: 60 of WO2015038958; herein SEQ ID NO: 888). Non-limiting examples of nucleotide sequences that may encode the amino acid inserts include the following, AAGTTTCCTGTGGCGTTGACT (for SEQ ID NO: 3 of WO2015038958; herein SEQ ID NO: 889), ACTTTGGCGGTGCCTTTTAAG (SEQ ID NO: 24 and 49 of WO2015038958; herein SEQ ID NO: 890), AGTGTGAGTAAGCCTTTTTTG (SEQ ID NO: 25 of WO2015038958; herein SEQ ID NO: 891), TTTACGTTGACGACGCCTAAG (SEQ ID NO: 26 of WO2015038958; herein SEQ ID NO: 892), ATGAATGCTACGAAGAATGTG (SEQ ID NO: 27 of WO2015038958; herein SEQ ID NO: 893), CAGTCGTCGCAGACGCCTAGG (SEQ ID NO: 48 of WO2015038958; herein SEQ ID NO: 894), ATTCTGGGACTGGTACTTCG (SEQ ID NO: 50 and 52 of WO2015038958; herein SEQ ID NO: 895), ACGCGGACTAATCCTGAGGCT (SEQ ID NO: 51 of WO2015038958; herein SEQ ID NO: 896), AATGGGGGGACTAGTAGTTCT (SEQ ID NO: 53 of WO2015038958; herein SEQ ID NO: 897), or TATACTTTGTCGCAGGGTTGG (SEQ ID NO: 59 of WO2015038958; herein SEQ ID NO: 898).

[0234] In one embodiment, the AAV serotype may be engineered to comprise at least one AAV capsid CD8+ T-cell epitope for AAV2 such as, but not limited to, SADNNNSEY (SEQ ID NO: 899), LIDQYLYYL (SEQ ID NO: 900), VPQYGYLTL (SEQ ID NO: 901), TTSTRTWAL (SEQ ID NO: 902), YHLNGRDSL (SEQ ID NO: 903), SQAVGRSSF (SEQ ID NO: 904), VPANPSTTF (SEQ ID NO: 905), FPQSGVLIF (SEQ ID NO: 906), YFDFNRFHCHFSPRD (SEQ ID NO: 907), VGNSSGNWHCDSTWM (SEQ ID NO: 908), QFSQAGASDIRDQSR (SEQ ID NO: 909), GASDIRQSRNWLP (SEQ ID NO: 910) and GNRQAATADVNTQGV (SEQ ID NO: 911).

[0235] In one embodiment, the AAV serotype may be engineered to comprise at least one AAV capsid CD8+ T-cell epitope for AAV1 such as, but not limited to, LDRLMNPLI (SEQ ID NO: 912), TTSTRTWAL (SEQ ID NO: 902), and QPAKKRLNF (SEQ ID NO: 913)).

[0236] In one embodiment, the AAV serotype may be, or may have a sequence as described in International Patent Publication WO2017100671, the contents of which are herein incorporated by reference in their entirety, such as, but not limited to, AAV9 (SEQ ID NO: 45 of WO2017100671, herein SEQ ID NO: 1861), PHP.N (SEQ ID NO: 46 of WO2017100671, herein SEQ ID NO: 1859), PHP.S (SEQ ID NO: 47 of WO2017100671, herein SEQ ID NO: 1860), or variants thereof. Further, any of the targeting peptides or amino acid inserts described in WO2017100671 may be inserted into any parent AAV serotype, such as, but not limited to, AAV9 (SEQ ID NO: 127 or SEQ ID NO: 1861). In one embodiment, the amino acid insert is inserted between amino acids 586-592 of the parent AAV (e.g., AAV9). In another embodiment, the amino acid insert is inserted between amino acids 588-589 of the parent AAV sequence. The amino acid insert may be, but is not limited to, any of the following amino acid sequences, AQTLAVPFKAQ (SEQ ID NO: 1 of WO2017100671; herein SEQ ID NO: 2245), AQSVSKPFLAQ (SEQ ID NO: 2 of WO2017100671; herein SEQ ID NO: 2246), AQFTLTTPKAQ (SEQ ID NO: 3 in the sequence listing of WO2017100671; herein SEQ ID NO: 2247), DGTLAVPFKAQ (SEQ ID NO: 4 in the sequence listing of WO2017100671; herein SEQ ID NO: 2248), ESTLAVPFKAQ (SEQ ID NO: 5 of WO2017100671; herein SEQ ID NO: 2249), GGTLAVPFKAQ (SEQ ID NO: 6 of WO2017100671; herein SEQ ID NO: 2250), AQTLATPFKAQ (SEQ ID NO: 7 and 33 of WO2017100671; herein SEQ ID NO: 2251), ATTLATPFKAQ (SEQ ID NO: 8 of WO2017100671; herein SEQ ID NO: 2252), DGTLATPFKAQ (SEQ ID NO: 9 of WO2017100671; herein SEQ ID NO: 2253), GGTLATPFKAQ (SEQ ID NO: 10 of WO2017100671; herein SEQ ID NO: 2254), SGSLAVPFKAQ (SEQ ID NO: 11 of WO2017100671; herein SEQ ID NO: 2255), AQTLAQPFKAQ (SEQ ID NO: 12 of WO2017100671; herein SEQ ID NO: 2256), AQTLQQPFKAQ (SEQ ID NO: 13 of WO2017100671; herein SEQ ID NO: 2257), AQTLSNPFKAQ (SEQ ID NO: 14 of WO2017100671; herein SEQ ID NO: 2258), AQTLAVPFSNP (SEQ ID NO: 15 of WO2017100671; herein SEQ ID NO: 2259), QGTLAVPFKAQ (SEQ ID NO: 16 of WO2017100671; herein SEQ ID NO: 2260), NQTLAVPFKAQ (SEQ ID NO: 17 of WO2017100671; herein SEQ ID NO: 2261), EGSLAVPFKAQ (SEQ ID NO: 18 of WO2017100671; herein SEQ ID NO: 2262), SGNLAVPFKAQ (SEQ ID NO: 19 of WO2017100671 herein SEQ ID NO: 2263), EGTLAVPFKAQ (SEQ ID NO: 20 of WO2017100671; herein SEQ ID NO: 2264), DSTLAVPFKAQ (SEQ ID NO: 21 in Table 1 of WO2017100671; herein SEQ ID NO: 2265), AVTLAVPFKAQ (SEQ ID NO: 22 of WO2017100671; herein SEQ ID NO: 2266), AQTLSTPFKAQ (SEQ ID NO: 23 of WO2017100671; herein SEQ ID NO: 2267), AQTLPQPFKAQ (SEQ ID NO: 24 and 32 of WO2017100671; herein SEQ ID NO: 2268), AQTLSQPFKAQ (SEQ ID NO: 25 of WO2017100671; herein SEQ ID NO: 2269), AQTLQLPFKAQ (SEQ ID NO: 26 of WO2017100671; herein SEQ ID NO: 2270), AQTLTMPFKAQ (SEQ ID NO: 27, and 34 of WO2017100671 and SEQ ID NO: 35 in the sequence listing of WO2017100671; herein SEQ ID NO: 2271), AQTLTTPFKAQ (SEQ ID NO: 28 of WO2017100671; herein SEQ ID NO: 2272), AQYTLSQGWAQ (SEQ ID NO: 29 of WO2017100671; herein SEQ ID NO: 2273), AQMNATKNVAQ (SEQ ID NO: 30 of WO2017100671; herein SEQ ID NO: 2274), AQVSGGHHSAQ (SEQ ID NO: 31 of WO2017100671; herein SEQ ID NO: 2275), AQTLTAPFKAQ (SEQ ID NO: 35 in Table 1 of WO2017100671; herein SEQ ID NO: 2276), AQTLSKPFKAQ (SEQ ID NO: 36 of WO2017100671; herein SEQ ID NO: 2277), QAVRTSL (SEQ ID NO: 37 of WO2017100671; herein SEQ ID NO: 2278), YTLSQGW (SEQ ID NO: 38 of WO2017100671; herein SEQ ID NO: 888), LAKERLS (SEQ ID NO: 39 of WO2017100671, herein SEQ ID NO: 2279), TLAVPFK (SEQ ID NO: 40 in the sequence listing of WO2017100671; herein SEQ ID NO: 873), SVSKPFL (SEQ ID NO: 41 of WO2017100671; herein SEQ ID NO: 881), FTLTTPK (SEQ ID NO: 42 of WO2017100671; herein SEQ ID NO: 882), MNSTKNV (SEQ ID NO: 43 of WO2017100671; herein SEQ ID NO: 2280), VSGGHHS (SEQ ID NO: 44 of WO02017100671; herein SEQ ID NO: 2281), SAQTLAVPFKAQAQ (SEQ ID NO: 48 of WO2017100671; herein SEQ ID NO: 2282), SXXXLAVPFKAQAQ (SEQ ID NO: 49 of WO2017100671 wherein X may be any amino acid; herein SEQ ID NO: 2283), SAQXXXVPFKAQAQ (SEQ ID NO: 50 of WO2017100671 wherein X may be any amino acid; herein SEQ ID NO: 2284), SAQTLXXXFKAQAQ (SEQ ID NO: 51 of WO2017100671 wherein X may be any amino acid; herein SEQ ID NO: 2285), SAQTLAVXXXAQAQ (SEQ ID NO: 52 of WO2017100671 wherein X may be any amino acid; herein SEQ ID NO: 2286), SAQTLAVPFXXXAQ (SEQ ID NO: 53 of WO2017100671 wherein X may be any amino acid; herein SEQ ID NO: 2287), TNHQSAQ (SEQ ID NO: 65 of WO2017100671; herein SEQ ID NO: 2288), AQAQTGW (SEQ ID NO: 66 of WO2017100671; herein SEQ ID NO: 2289), DGTLATPFK (SEQ ID NO: 67 of WO2017100671; herein SEQ ID NO: 2290), DGTLATPFKXX (SEQ ID NO: 68 of WO2017100671 wherein X may be any amino acid; herein SEQ ID NO: 2291), LAVPFKAQ (SEQ ID NO: 80 of WO2017100671; herein SEQ ID NO: 2292), VPFKAQ (SEQ ID NO: 81 of WO2017100671; herein SEQ ID NO: 2293), FKAQ (SEQ ID NO: 82 of WO2017100671; herein SEQ ID NO: 2294), AQTLAV (SEQ ID NO: 83 of WO2017100671; herein SEQ ID NO: 2295), AQTLAVPF (SEQ ID NO: 84 of WO2017100671; herein SEQ ID NO: 2296), QAVR (SEQ ID NO: 85 of WO2017100671; herein SEQ ID NO: 2297), AVRT (SEQ ID NO: 86 of WO2017100671, herein SEQ ID NO: 2298), VRTS (SEQ ID NO: 87 of WO2017100671; herein SEQ ID NO: 2299), RTSL (SEQ ID NO: 88 of WO2017100671; herein SEQ ID NO: 2300), QAVRT (SEQ ID NO: 89 of WO2017100671; herein SEQ ID NO: 2301), AVRTS (SEQ ID NO: 90 of WO2017100671; herein SEQ ID NO: 2302), VRTSL (SEQ ID NO: 91 of WO2017100671; herein SEQ ID NO: 2303), QAVRTS (SEQ ID NO: 92 of WO2017100671; herein SEQ ID NO: 2304), or AVRTSL (SEQ ID NO: 93 of WO2017100671; herein SEQ ID NO: 2305).

[0237] Non-limiting examples of nucleotide sequences that may encode the amino acid inserts include the following, GATGGGACTTTGGCGGTGCCTTTTTAAGGCACAG (SEQ ID NO: 54 of WO2017100671; herein SEQ ID NO: 2306), GATGGGACGTTGGCGGTGCCTTTTAAGGCACAG (SEQ ID NO: 55 of WO2017100671; herein SEQ ID NO: 2307), CAGGCGGTTAGGACGTCTTTTG (SEQ ID NO: 56 of WO2017100671; herein SEQ ID NO: 2308), CAGGTCTTCACGGACTCAGACTATCAG (SEQ ID NO: 57 and 78 of WO2017100671; herein SEQ ID NO: 2309), CAAGTAAAACCTCTACAAATGTGGTAAAATCG (SEQ ID NO: 58 of WO2017100671 herein SEQ ID NO: 2310), ACTCATCGACCAATACTTGTACTATCTCTCTAGAAC (SEQ ID NO: 59 of WO2017100671; herein SEQ ID NO: 2311), GGAAGTATTCCTTGGTTTGAACCCA (SEQ ID NO: 60 of WO2017100671; herein SEQ ID NO: 2312), GGTCGCGGTTCTTGTTTGTGGAT (SEQ ID NO: 61 of WO2017100671; herein SEQ ID NO: 2313), CGACCTTGAAGCGCATGAACTCCT (SEQ ID NO: 62 of WO2017100671; herein SEQ ID NO: 2314), GTATTCCTGGTTTTGAACCCAACCGGTCTGCGCCTGTGCMNNMNNMNNMNNMNN MNNMNNTTGGGCACTCTGGTGGTTTGTC (SEQ ID NO: 63 of WO2017100671 wherein N may be A, C, T, or G; herein SEQ ID NO: 2315), GTATTCCTTGGTTTTGAACCCAACCGGTCTGCGCMNNMNNMNNAAAAGGCACCGCC AAAGTTTG (SEQ ID NO: 69 of WO2017100671 wherein N may be A, C, T, or G; herein SEQ ID NO: 2316), GTATTCCTTGGTTTTGAACCCAACCGGTCTGCGCCTGTGCMNNMNNMNNCACCGCC AAAGTTTGGGCACT (SEQ ID NO: 70 of WO2017100671 wherein N may be A, C, T, or G; herein SEQ ID NO: 2317), GTATCCTTTGGTTTTGAACCCAACCGGTCTGCGCCTGTGCCTTAAAMNNMNNMNNC AAAGTTTTGGGCACTCTGGTGG (SEQ ID NO: 71 of WO2017100671 wherein N may be A, C, T, or G; herein SEQ ID NO: 2318), GTATTCCTTGGTTTGAACCCAACCGGTCTGCGCCTGTGCCTTAAAAGGCACMNNM NNMNNTTGGGCACTCTGGTGGTTTGTG (SEQ ID NO: 72 of WO2017100671 wherein N may be A, C, T, or G; herein SEQ ID NO: 2319), ACTTTGGCGGTGCCTTTTAAG (SEQ ID NO: 74 of WO2017100671; herein SEQ ID NO: 890), AGTGTGAGTAAGCCTTTTTG (SEQ ID NO: 75 of WO2017100671; herein SEQ ID NO: 891), TTTACGTTGACGACGCCTAAG (SEQ ID NO: 76 of WO2017100671; herein SEQ ID NO: 892), TATACTTTGTCGCAGGGTTGG (SEQ ID NO: 77 of WO2017100671; herein SEQ ID NO: 898), or CTTGCGAAGGAGCGGCTTTTCG (SEQ ID NO: 79 of WO2017100671; herein SEQ ID NO: 2320).

[0238] In one embodiment, the AAV serotype may be, or may have a sequence as described in U.S. Pat. No. 9,624,274, the contents of which are herein incorporated by reference in their entirety, such as, but not limited to, AAV1 (SEQ ID NO: 181 of U.S. Pat. No. 9,624,274), AAV6 (SEQ ID NO: 182 of U.S. Pat. No. 9,624,274), AAV2 (SEQ ID NO: 183 of U.S. Pat. No. 9,624,274), AAV3b (SEQ ID NO: 184 of U.S. Pat. No. 9,624,274), AAV7 (SEQ ID NO: 185 of U.S. Pat. No. 9,624,274), AAV8 (SEQ ID NO: 186 of U.S. Pat. No. 9,624,274), AAV10 (SEQ ID NO: 187 of U.S. Pat. No. 9,624,274), AAV4 (SEQ ID NO: 188 of U.S. Pat. No. 9,624,274), AAV11 (SEQ ID NO: 189 of U.S. Pat. No. 9,624,274), bAAV (SEQ ID NO: 190 of U.S. Pat. No. 9,624,274), AAV5 (SEQ ID NO: 191 of U.S. Pat. No. 9,624,274), GPV (SEQ ID NO: 192 of U.S. Pat. No. 9,624,274; herein SEQ ID NO: 1862), B19 (SEQ ID NO: 193 of U.S. Pat. No. 9,624,274; herein SEQ ID NO: 1863), MVM (SEQ ID NO: 194 of U.S. Pat. No. 9,624,274; herein SEQ ID NO: 1864), FPV (SEQ ID NO: 195 of U.S. Pat. No. 9,624,274; herein SEQ ID NO: 1865), CPV (SEQ ID NO: 196 of U.S. Pat. No. 9,624,274; herein SEQ ID NO: 1866) or variants thereof. Further, any of the structural protein inserts described in U.S. Pat. No. 9,624,274, may be inserted into, but not limited to, 1-453 and 1-587 of any parent AAV serotype, such as, but not limited to, AAV2 (SEQ ID NO: 183 of U.S. Pat. No. 9,624,274). The amino acid insert may be, but is not limited to, any of the following amino acid sequences, VNLTWSRASG (SEQ ID NO: 50 of U.S. Pat. No. 9,624,274; herein SEQ ID NO: 2321), EFCINHRGYWVCGD (SEQ ID NO:55 of U.S. Pat. No. 9,624,274; herein SEQ ID NO: 2322), EDGQVMDVDLS (SEQ ID NO: 85 of U.S. Pat. No. 9,624,274; herein SEQ ID NO: 2323), EKQRNGTLT (SEQ ID NO: 86 of U.S. Pat. No. 9,624,274; herein SEQ ID NO: 2324), TYQCRVTHPHLPRALMR (SEQ ID NO: 87 of U.S. Pat. No. 9,624,274 herein SEQ ID NO: 2325), RHSTTQPRKTKGSG (SEQ ID NO: 88 of U.S. Pat. No. 9,624,274; herein SEQ ID NO: 2326), DSNPRGVSAYLSR (SEQ ID NO: 89 of U.S. Pat. No. 9,624,274; herein SEQ ID NO: 2327), TITCLWDLAPSK (SEQ ID NO: 90 of U.S. Pat. No. 9,624,274; herein SEQ ID NO: 2328), KTKGSGFFVF (SEQ ID NO: 91 of U.S. Pat. No. 9,624,274; herein SEQ ID NO: 2329), THPHLPRALMRS (SEQ ID NO: 92 of U.S. Pat. No. 9,624,274; herein SEQ ID NO: 2330), GETYQCRVTHPHLPRALMRSTTK (SEQ ID NO: 93 of U.S. Pat. No. 9,624,274; herein SEQ ID NO: 2331), LPRALMRS (SEQ ID NO: 94 of U.S. Pat. No. 9,624,274; herein SEQ ID NO: 2332), INHRGYWV (SEQ ID NO: 95 of U.S. Pat. No. 9,624,274; herein SEQ ID NO: 2333), CDAGSVRTNAPD (SEQ ID NO: 60 of U.S. Pat. No. 9,624,274; herein SEQ ID NO: 2334), AKAVSNLTESRSESLQS (SEQ ID NO: 96 of U.S. Pat. No. 9,624,274; herein SEQ ID NO: 2335), SLTGDEFKKVLET (SEQ ID NO: 97 of U.S. Pat. No. 9,624,274; herein SEQ ID NO: 2336), REAVAYRFEED (SEQ ID NO: 98 of U.S. Pat. No. 9,624,274; herein SEQ ID NO: 2337), INPEIITLDG (SEQ ID NO: 99 of U.S. Pat. No. 9,624,274; herein SEQ ID NO: 2338), DISVTGAPVITATYL (SEQ ID NO: 100 of U.S. Pat. No. 9,624,274; herein SEQ ID NO: 2339), DISVTGAPVITA (SEQ ID NO: 101 of U.S. Pat. No. 9,624,274; herein SEQ ID NO: 2340), PKTVSNLTESSSESVQS (SEQ ID NO: 102 of U.S. Pat. No. 9,624,274; herein SEQ ID NO: 2341), SLMGDEFKAVLET (SEQ ID NO: 103 of U.S. Pat. No. 9,624,274; herein SEQ ID NO: 2342), QHSVAYTFEED (SEQ ID NO: 104 of U.S. Pat. No. 9,624,274; herein SEQ ID NO: 2343), INPEIITRDG (SEQ ID NO: 105 of U.S. Pat. No. 9,624,274; herein SEQ ID NO: 2344), DISLTGDPVITASYL (SEQ ID NO: 106 of U.S. Pat. No. 9,624,274; herein SEQ ID NO: 2345), DISLTGDPVITA (SEQ ID NO: 107 of U.S. Pat. No. 9,624,274; herein SEQ ID NO: 2346), DQSIDFEIDSA (SEQ ID NO: 108 of U.S. Pat. No. 9,624,274; herein SEQ ID NO: 2347), KNVSEDLPLPTFSPTLLGDS (SEQ ID NO: 109 of U.S. Pat. No. 9,624,274; herein SEQ ID NO: 2348), KNVSEDLPLPT (SEQ ID NO: 110 of U.S. Pat. No. 9,624,274; herein SEQ ID NO: 2349), CDSGRVRTDAPD (SEQ ID NO: 111 of U.S. Pat. No. 9,624,274; herein SEQ ID NO: 2350), FPEHLLVDFLQSLS (SEQ ID NO: 112 of U.S. Pat. No. 9,624,274; herein SEQ ID NO: 2351), DAEFRHDSG (SEQ ID NO: 65 of U.S. Pat. No. 9,624,274; herein SEQ ID NO: 2352), HYAAAQWDFGNTMCQL (SEQ ID NO: 113 of U.S. Pat. No. 9,624,274; herein SEQ ID NO: 2353), YAAQWDFGNTMCQ (SEQ ID NO: 114 of U.S. Pat. No. 9,624,274; herein SEQ ID NO: 2354), RSQKEGLHYT (SEQ ID NO: 115 of U.S. Pat. No. 9,624,274; herein SEQ ID NO: 2355), SSRTPSDKPVAHWANPQAE (SEQ ID NO: 116 of U.S. Pat. No. 9,624,274; herein SEQ ID NO: 2356), SRTPSDKPVAHWANP (SEQ ID NO: 117 of U.S. Pat. No. 9,624,274; herein SEQ ID NO: 2357), SSRTPSDKP (SEQ ID NO: 118 of U.S. Pat. No. 9,624,274; herein SEQ ID NO: 2358), NADGNVDYHMNSVP (SEQ ID NO: 119 of U.S. Pat. No. 9,624,274; herein SEQ ID NO: 2359), DGNVDYHMNSV (SEQ ID NO: 120 of U.S. Pat. No. 9,624,274; herein SEQ ID NO: 2360), RSFKEFLQSSLRALRQ (SEQ ID NO: 121 of U.S. Pat. No. 9,624,274; herein SEQ ID NO: 2361); FKEFLQSSLRA (SEQ ID NO: 122 of U.S. Pat. No. 9,624,274; herein SEQ ID NO: 2362), or QMWAPQWGPD (SEQ ID NO: 123 of U.S. Pat. No. 9,624,274; herein SEQ ID NO: 2363).

[0239] In one embodiment, the AAV serotype may be, or may have a sequence as described in U.S. Pat. No. 9,475,845, the contents of which are herein incorporated by reference in their entirety, such as, but not limited to, AAV capsid proteins comprising modification of one or more amino acids at amino acid positions 585 to 590 of the native AAV2 capsid protein. Further the modification may result in, but not limited to, the amino acid sequence RGNRQA (SEQ ID NO: 3 of U.S. Pat. No. 9,475,845; herein SEQ ID NO: 2364), SSSTDP (SEQ ID NO: 4 of U.S. Pat. No. 9,475,845; herein SEQ ID NO: 2365), SSNTAP (SEQ ID NO: 5 of U.S. Pat. No. 9,475,845; herein SEQ ID NO: 2366), SNSNLP (SEQ ID NO: 6 of U.S. Pat. No. 9,475,845; herein SEQ ID NO: 2367), SSTTAP (SEQ ID NO: 7 of U.S. Pat. No. 9,475,845; herein SEQ ID NO: 2368), AANTAA (SEQ ID NO: 8 of U.S. Pat. No. 9,475,845; herein SEQ ID NO: 2369), QQNTAP (SEQ ID NO: 9 of U.S. Pat. No. 9,475,845; herein SEQ ID NO: 2370), SAQAQA (SEQ ID NO: 10 of U.S. Pat. No. 9,475,845; herein SEQ ID NO: 2371), QANTGP (SEQ ID NO: 11 of U.S. Pat. No. 9,475,845; herein SEQ ID NO: 2372), NATTAP (SEQ ID NO: 12 of U.S. Pat. No. 9,475,845; herein SEQ ID NO: 2373), SSTAGP (SEQ ID NO: 13 and 20 of U.S. Pat. No. 9,475,845; herein SEQ ID NO: 2374), QQNTAA (SEQ ID NO: 14 of U.S. Pat. No. 9,475,845; herein SEQ ID NO: 2375), PSTAGP (SEQ ID NO: 15 of U.S. Pat. No. 9,475,845; herein SEQ ID NO: 2376), NQNTAP (SEQ ID NO: 16 of U.S. Pat. No. 9,475,845; herein SEQ ID NO: 2377), QAANAP (SEQ ID NO: 17 of U.S. Pat. No. 9,475,845; herein SEQ ID NO: 2378), SIVGLP (SEQ ID NO: 18 of U.S. Pat. No. 9,475,845; herein SEQ ID NO: 2379), AASTAA (SEQ ID NO: 19, and 27 of U.S. Pat. No. 9,475,845; herein SEQ ID NO: 2380), SQNTTA (SEQ ID NO: 21 of U.S. Pat. No. 9,475,845; herein SEQ ID NO: 2381), QQDTAP (SEQ ID NO: 22 of U.S. Pat. No. 9,475,845; herein SEQ ID NO: 2382), QTNTGP (SEQ ID NO: 23 of U.S. Pat. No. 9,475,845; herein SEQ ID NO: 2383), QTNGAP (SEQ ID NO: 24 of U.S. Pat. No. 9,475,845; herein SEQ ID NO: 2384), QQNAAP (SEQ ID NO: 25 of U.S. Pat. No. 9,475,845; herein SEQ ID NO: 2385), or AANTQA (SEQ ID NO: 26 of U.S. Pat. No. 9,475,845; herein SEQ ID NO: 2386). In one embodiment, the amino acid modification is a substitution at amino acid positions 262 through 265 in the native AAV2 capsid protein or the corresponding position in the capsid protein of another AAV with a targeting sequence. The targeting sequence may be, but is not limited to, any of the amino acid sequences, NGRAHA (SEQ ID NO: 38 of U.S. Pat. No. 9,475,845; herein SEQ ID NO: 2387), QPEHSST (SEQ ID NO: 39 and 50 of U.S. Pat. No. 9,475,845; herein SEQ ID NO: 2388), VNTANST (SEQ ID NO: 40 of U.S. Pat. No. 9,475,845; herein SEQ ID NO: 2389), HGPMQKS (SEQ ID NO: 41 of U.S. Pat. No. 9,475,845; herein SEQ ID NO: 2390), PHKPPLA (SEQ ID NO: 42 of U.S. Pat. No. 9,475,845; herein SEQ ID NO: 2391), IKNNEMW (SEQ ID NO: 43 of U.S. Pat. No. 9,475,845; herein SEQ ID NO: 2392), RNLDTPM (SEQ ID NO: 44 of U.S. Pat. No. 9,475,845; herein SEQ ID NO: 2393), VDSHRQS (SEQ ID NO: 45 of U.S. Pat. No. 9,475,845; herein SEQ ID NO: 2394), YDSKTKT (SEQ ID NO: 46 of U.S. Pat. No. 9,475,845; herein SEQ ID NO: 2395), SQLPHQK (SEQ ID NO: 47 of U.S. Pat. No. 9,475,845; herein SEQ ID NO: 2396), STMQQNT (SEQ ID NO: 48 of U.S. Pat. No. 9,475,845; herein SEQ ID NO: 2397), TERYMTQ (SEQ ID NO: 49 of U.S. Pat. No. 9,475,845; herein SEQ ID NO: 2398), DASLSTS (SEQ ID NO: 51 of US9475845; herein SEQ ID NO: 2399), DLPNKKT (SEQ ID NO: 52 of U.S. Pat. No. 9,475,845; herein SEQ ID NO: 2400), DLTAARL (SEQ ID NO: 53 of U.S. Pat. No. 9,475,845; herein SEQ ID NO: 2401), EPHQFNY (SEQ ID NO: 54 of U.S. Pat. No. 9,475,845; herein SEQ ID NO: 2402), EPQSNHT (SEQ ID NO: 55 of U.S. Pat. No. 9,475,845; herein SEQ ID NO: 2403), MSSWPSQ (SEQ ID NO: 56 of U.S. Pat. No. 9,475,845; herein SEQ ID NO: 2404), NPKHNAT (SEQ ID NO: 57 of U.S. Pat. No. 9,475,845; herein SEQ ID NO: 2405), PDGMRTT (SEQ ID NO: 58 of U.S. Pat. No. 9,475,845; herein SEQ ID NO: 2406), PNNNKTT (SEQ ID NO: 59 of U.S. Pat. No. 9,475,845; herein SEQ ID NO: 2407), QSTTHDS (SEQ ID NO: 60 of U.S. Pat. No. 9,475,845; herein SEQ ID NO: 2408), TGSKQKQ (SEQ ID NO: 61 of U.S. Pat. No. 9,475,845; herein SEQ ID NO: 2409), SLKHQAL (SEQ ID NO: 62 of U.S. Pat. No. 9,475,845; herein SEQ ID NO: 2410), SPIDGEQ (SEQ ID NO: 63 of U.S. Pat. No. 9,475,845; herein SEQ ID NO: 2411), WIFPWIQL (SEQ ID NO: 64 and 112 of U.S. Pat. No. 9,475,845; herein SEQ ID NO: 2412), CDCRGDCFC (SEQ ID NO: 65 of U.S. Pat. No. 9,475,845; herein SEQ ID NO: 2413), CNGRC (SEQ ID NO: 66 of U.S. Pat. No. 9,475,845; herein SEQ ID NO: 2414), CPRECES (SEQ ID NO: 67 of U.S. Pat. No. 9,475,845; herein SEQ ID NO: 2415), CTTHWGFTLC (SEQ ID NO: 68 and 123 of U.S. Pat. No. 9,475,845; herein SEQ ID NO: 2416), CGRRAGGSC (SEQ ID NO: 69 of U.S. Pat. No. 9,475,845; herein SEQ ID NO: 2417), CKGGRAKDC (SEQ ID NO: 70 of U.S. Pat. No. 9,475,845; herein SEQ ID NO: 2418), CVPELGHEC (SEQ ID NO: 71 and 115 of U.S. Pat. No. 9,475,845; herein SEQ ID NO: 2419), CRRETAWAK (SEQ ID NO: 72 of U.S. Pat. No. 9,475,845; herein SEQ ID NO: 2420), VSWFSHRYSPFAVS (SEQ ID NO: 73 of U.S. Pat. No. 9,475,845; herein SEQ ID NO: 2421), GYRDGYAGPILYN (SEQ ID NO: 74 of U.S. Pat. No. 9,475,845; herein SEQ ID NO: 2422), XXXYXXX (SEQ ID NO: 75 of U.S. Pat. No. 9,475,845; herein SEQ ID NO: 2423), YXNW (SEQ ID NO: 76 of U.S. Pat. No. 9,475,845; herein SEQ ID NO: 2424), RPLPPLP (SEQ ID NO: 77 of U.S. Pat. No. 9,475,845; herein SEQ ID NO: 2425), APPLPPR (SEQ ID NO: 78 of U.S. Pat. No. 9,475,845; herein SEQ ID NO: 2426), DVFYPYPYASGS (SEQ ID NO: 79 of U.S. Pat. No. 9,475,845; herein SEQ ID NO: 2427), MYWYPY (SEQ ID NO: 80 of U.S. Pat. No. 9,475,845; herein SEQ ID NO: 2428), DITWDQLWDLMK (SEQ ID NO: 81 of U.S. Pat. No. 9,475,845; herein SEQ ID NO: 2429), CWDDXWLC (SEQ ID NO: 82 of U.S. Pat. No. 9,475,845; herein SEQ ID NO: 2430), EWCEYLGGYLRCYA (SEQ ID NO: 83 of U.S. Pat. No. 9,475,845; herein SEQ ID NO: 2431), YXCXXGPXTWXCXP (SEQ ID NO: 84 of U.S. Pat. No. 9,475,845; herein SEQ ID NO: 2432), IEGPTLRQWLAARA (SEQ ID NO: 85 of U.S. Pat. No. 9,475,845; herein SEQ ID NO: 2433), LWXXX (SEQ ID NO: 86 of U.S. Pat. No. 9,475,845; herein SEQ ID NO: 2434), XFXXYLW (SEQ ID NO: 87 of U.S. Pat. No. 9,475,845; herein SEQ ID NO: 2435), SSIISHFRWGLCD (SEQ ID NO: 88 of U.S. Pat. No. 9,475,845; herein SEQ ID NO: 2436), MSRPACPPNDKYE (SEQ ID NO: 89 of U.S. Pat. No. 9,475,845; herein SEQ ID NO: 2437), CLRSGRGC (SEQ ID NO: 90 of U.S. Pat. No. 9,475,845; herein SEQ ID NO: 2438), CHWMFSPWC (SEQ ID NO: 91 of U.S. Pat. No. 9,475,845; herein SEQ ID NO: 2439), WXXF (SEQ ID NO: 92 of U.S. Pat. No. 9,475,845; herein SEQ ID NO: 2440), CSSRLDAC (SEQ ID NO: 93 of U.S. Pat. No. 9,475,845; herein SEQ ID NO: 2441), CLPVASC (SEQ ID NO: 94 of U.S. Pat. No. 9,475,845; herein SEQ ID NO: 2442), CGFECVRQCPERC (SEQ ID NO: 95 of U.S. Pat. No. 9,475,845; herein SEQ ID NO: 2443), CVALCREACGEGC (SEQ ID NO: 96 of U.S. Pat. No. 9,475,845; herein SEQ ID NO: 2444), SWCEPGWCR (SEQ ID NO: 97 of U.S. Pat. No. 9,475,845; herein SEQ ID NO: 2445), YSGKWGW (SEQ ID NO: 98 of U.S. Pat. No. 9,475,845; herein SEQ ID NO: 2446), GLSGGRS (SEQ ID NO: 99 of U.S. Pat. No. 9,475,845; herein SEQ ID NO: 2447), LMLPRAD (SEQ ID NO: 100 of U.S. Pat. No. 9,475,845; herein SEQ ID NO: 2448), CSCFRDVCC (SEQ ID NO: 101 of U.S. Pat. No. 9,475,845; herein SEQ ID NO: 2449), CRDVVSVIC (SEQ ID NO: 102 of U.S. Pat. No. 9,475,845; herein SEQ ID NO: 2450), MARSGL (SEQ ID NO: 103 of U.S. Pat. No. 9,475,845; herein SEQ ID NO: 2451), MARAKE (SEQ ID NO: 104 of U.S. Pat. No. 9,475,845; herein SEQ ID NO: 2452), MSRTMS (SEQ ID NO: 105 of U.S. Pat. No. 9,475,845; herein SEQ ID NO: 2453), KCCYSL (SEQ ID NO: 106 of U.S. Pat. No. 9,475,845; herein SEQ ID NO: 2454), MYWGDSHWLQYWYE (SEQ ID NO: 107 of U.S. Pat. No. 9,475,845; herein SEQ ID NO: 2455), MQLPLAT (SEQ ID NO: 108 of U.S. Pat. No. 9,475,845; herein SEQ ID NO: 2456), EWLS (SEQ ID NO: 109 of U.S. Pat. No. 9,475,845; herein SEQ ID NO: 2457), SNEW (SEQ ID NO: 110 of U.S. Pat. No. 9,475,845; herein SEQ ID NO: 2458), TNYL (SEQ ID NO: 111 of U.S. Pat. No. 9,475,845; herein SEQ ID NO: 2459), WDLAWMFRLPVG (SEQ ID NO: 113 of U.S. Pat. No. 9,475,845; herein SEQ ID NO: 2460), CTVALPGGYVRVC (SEQ ID NO: 114 of U.S. Pat. No. 9,475,845; herein SEQ ID NO: 2461), CVAYCIEHHCWTC (SEQ ID NO: 116 of U.S. Pat. No. 9,475,845; herein SEQ ID NO: 2462), CVFAHNYDYLVC (SEQ ID NO: 117 of U.S. Pat. No. 9,475,845; herein SEQ ID NO: 2463), CVFTSNYAFC (SEQ ID NO: 118 of U.S. Pat. No. 9,475,845; herein SEQ ID NO: 2464), VHSPNKK (SEQ ID NO: 119 of U.S. Pat. No. 9,475,845; herein SEQ ID NO: 2465), CRGDGWC (SEQ ID NO: 120 of U.S. Pat. No. 9,475,845; herein SEQ ID NO: 2466), XRGCDX (SEQ ID NO: 121 of U.S. Pat. No. 9,475,845; herein SEQ ID NO: 2467), PXXX (SEQ ID NO: 122 of U.S. Pat. No. 9,475,845; herein SEQ ID NO: 2468), SGKGPRQITAL (SEQ ID NO: 124 of U.S. Pat. No. 9,475,845; herein SEQ ID NO: 2469), AAAAAAAAAXXXXX (SEQ ID NO: 125 of U.S. Pat. No. 9,475,845; herein SEQ ID NO: 2470), VYMSPF (SEQ ID NO: 126 of U.S. Pat. No. 9,475,845; herein SEQ ID NO: 2471), ATWLPPR (SEQ ID NO: 127 of U.S. Pat. No. 9,475,845; herein SEQ ID NO: 2472), HTMYYHHYQHHL (SEQ ID NO: 128 of U.S. Pat. No. 9,475,845; herein SEQ ID NO: 2473), SEVGCRAGPLQWLCEKYFG (SEQ ID NO: 129 of U.S. Pat. No. 9,475,845; herein SEQ ID NO: 2474), CGLLPVGRPDRNVWRWLC (SEQ ID NO: 130 of U.S. Pat. No. 9,475,845; herein SEQ ID NO: 2475), CKGQCDRFKGLPWEC (SEQ ID NO: 131 of U.S. Pat. No. 9,475,845; herein SEQ ID NO: 2476), SGRSA (SEQ ID NO: 132 of U.S. Pat. No. 9,475,845; herein SEQ ID NO: 2477), WGFP (SEQ ID NO: 133 of U.S. Pat. No. 9,475,845; herein SEQ ID NO: 2478), AEPMPHSLNFSQYLWYT (SEQ ID NO: 134 of U.S. Pat. No. 9,475,845; herein SEQ ID NO: 2479), WAYXSP (SEQ ID NO: 135 of U.S. Pat. No. 9,475,845; herein SEQ ID NO: 2480), IELLQAR (SEQ ID NO: 136 of U.S. Pat. No. 9,475,845; herein SEQ ID NO: 2481), AYTKCSRQWRTCMTTH (SEQ ID NO: 137 of U.S. Pat. No. 9,475,845; herein SEQ ID NO: 2482), PQNSKIPGPTFLDPH (SEQ ID NO: 138 of U.S. Pat. No. 9,475,845; herein SEQ ID NO: 2483), SMEPALPDWWWKMFK (SEQ ID NO: 139 of U.S. Pat. No. 9,475,845; herein SEQ ID NO: 2484), ANTPCGPYTHDCPVKR (SEQ ID NO: 140 of U.S. Pat. No. 9,475,845; herein SEQ ID NO: 2485), TACHQHVRMVRP (SEQ ID NO: 141 of U.S. Pat. No. 9,475,845; herein SEQ ID NO: 2486), VPWMEPAYQRFL (SEQ ID NO: 142 of U.S. Pat. No. 9,475,845; herein SEQ ID NO: 2487), DPRATPGS (SEQ ID NO: 143 of U.S. Pat. No. 9,475,845; herein SEQ ID NO: 2488), FRPNRAQDYNTN (SEQ ID NO: 144 of U.S. Pat. No. 9,475,845; herein SEQ ID NO: 2489), CTKNSYLMC (SEQ ID NO: 145 of U.S. Pat. No. 9,475,845; herein SEQ ID NO: 2490), CXXTXXXGXGC (SEQ ID NO: 146 of U.S. Pat. No. 9,475,845; herein SEQ ID NO: 2491), CPIEDRPMC (SEQ ID NO: 147 of U.S. Pat. No. 9,475,845; herein SEQ ID NO: 2492), HEWSYLAPYPWF (SEQ ID NO: 148 of U.S. Pat. No. 9,475,845; herein SEQ ID NO: 2493), MCPKHPLGC (SEQ ID NO: 149 of U.S. Pat. No. 9,475,845; herein SEQ ID NO: 2494), RMWPSSTVNLSAGRR (SEQ ID NO: 150 of U.S. Pat. No. 9,475,845; herein SEQ ID NO: 2495), SAKTAVSQRVWLPSHRGGEP (SEQ ID NO: 151 of U.S. Pat. No. 9,475,845; herein SEQ ID NO: 2496), KSREHVNNSACPSKRITAAL (SEQ ID NO: 152 of U.S. Pat. No. 9,475,845; herein SEQ ID NO: 2497), EGFR (SEQ ID NO: 153 of U.S. Pat. No. 9,475,845; herein SEQ ID NO: 2498), AGLGVR (SEQ ID NO: 154 of U.S. Pat. No. 9,475,845; herein SEQ ID NO: 2499), GTRQGHTMRLGVSDG (SEQ ID NO: 155 of U.S. Pat. No. 9,475,845; herein SEQ ID NO: 2500), IAGLATPGWSHWLAL (SEQ ID NO: 156 of U.S. Pat. No. 9,475,845; herein SEQ ID NO: 2501), SMSIARL (SEQ ID NO: 157 of U.S. Pat. No. 9,475,845; herein SEQ ID NO: 2502), HTFEPGV (SEQ ID NO: 158 of U.S. Pat. No. 9,475,845; herein SEQ ID NO: 2503), NTSLKRISNKRIRRK (SEQ ID NO: 159 of U.S. Pat. No. 9,475,845; herein SEQ ID NO: 2504), LRIKRKRRKRKKTRK (SEQ ID NO: 160 of U.S. Pat. No. 9,475,845; herein SEQ ID NO: 2505), GGG, GFS, LWS, EGG, LLV, LSP, LBS, AGG, GRR, GGH and GTV.

[0240] In one embodiment, the AAV serotype may be, or may have a sequence as described in United States Publication No. US 20160369298, the contents of which are herein incorporated by reference in their entirety, such as, but not limited to, site-specific mutated capsid protein of AAV2 (SEQ ID NO: 97 of US 20160369298; herein SEQ ID NO: 2506) or variants thereof, wherein the specific site is at least one site selected from sites R447, G453, S578, N587, N587+1, S662 of VP1 or fragment thereof.

[0241] Further, any of the mutated sequences described in US 20160369298, may be or may have, but not limited to, any of the following sequences SDSGASN (SEQ ID NO: 1 and SEQ ID NO: 231 of US20160369298; herein SEQ ID NO: 2507), SPSGASN (SEQ ID NO: 2 of US20160369298; herein SEQ ID NO: 2508), SHSGASN (SEQ ID NO: 3 of US20160369298; herein SEQ ID NO: 2509), SRSGASN (SEQ ID NO: 4 of US20160369298; herein SEQ ID NO: 2510), SKSGASN (SEQ ID NO: 5 of US20160369298; herein SEQ ID NO: 2511), SNSGASN (SEQ ID NO: 6 of US20160369298; herein SEQ ID NO: 2512), SGSGASN (SEQ ID NO: 7 of US20160369298; herein SEQ ID NO: 2513), SASGASN (SEQ ID NO: 8, 175, and 221 of US20160369298; herein SEQ ID NO: 2514), SESGTSN (SEQ ID NO: 9 of US20160369298; herein SEQ ID NO: 2515), STTGGSN (SEQ ID NO: 10 of US20160369298; herein SEQ ID NO: 2516), SSAGSTN (SEQ ID NO: 11 of US20160369298; herein SEQ ID NO: 2517), NNDSQA (SEQ ID NO: 12 of US20160369298; herein SEQ ID NO: 2518), NNRNQA (SEQ ID NO: 13 of US20160369298; herein SEQ ID NO: 2519), NNNKQA (SEQ ID NO: 14 of US20160369298; herein SEQ ID NO: 2520), NAKRQA (SEQ ID NO: 15 of US20160369298; herein SEQ ID NO: 2521), NDEHQA (SEQ ID NO: 16 of US20160369298; herein SEQ ID NO: 2522), NTSQKA (SEQ ID NO: 17 of US20160369298; herein SEQ ID NO: 2523), YYLSRTNTPSGTDTQSRLVFSQAGA (SEQ ID NO: 18 of US20160369298; herein SEQ ID NO: 2524), YYLSRTNTDSGTETQSGLDFSQAGA (SEQ ID NO: 19 of US20160369298; herein SEQ ID NO: 2525), YYLSRTNTESGTPTQSALEFSQAGA (SEQ ID NO: 20 of US20160369298; herein SEQ ID NO: 2526), YYLSRTNTHSGTHTQSPLHFSQAGA (SEQ ID NO: 21 of US20160369298; herein SEQ ID NO: 2527), YYLSRTNTSSGTITISHLIFSQAGA (SEQ ID NO: 22 of US20160369298; herein SEQ ID NO: 2528), YYLSRTNTRSGIMTKSSLMFSQAGA (SEQ ID NO: 23 of US20160369298; herein SEQ ID NO: 2529), YYLSRTNTKSGRKTLSNLSFSQAGA (SEQ ID NO: 24 of US20160369298; herein SEQ ID NO: 2530), YYLSRTNDGSGPVTPSKLRFSQRGA (SEQ ID NO: 25 of US20160369298; herein SEQ ID NO: 2531), YYLSRTNAASGHATHSDLKFSQPGA (SEQ ID NO: 26 of US20160369298; herein SEQ ID NO: 2532), YYLSRTNGQAGSLTMSELGFSQVGA (SEQ ID NO: 27 of US20160369298; herein SEQ ID NO: 2533), YYLSRTNSTGGNQITSQLLFSQLSA (SEQ ID NO: 28 of US20160369298; herein SEQ ID NO: 2534), YFLSRTNNNTGLNTNSTLNFSQGRA (SEQ ID NO: 29 of US20160369298; herein SEQ ID NO: 2535), SKTGADNNNSEYSWTG (SEQ ID NO: 30 of US20160369298; herein SEQ ID NO: 2536), SKTDADNNNSEYSWTG (SEQ ID NO: 31 of US20160369298; herein SEQ ID NO: 2537), SKTEADNNNSEYSWTG (SEQ ID NO: 32 of US20160369298; herein SEQ ID NO: 2538), SKTPADNNNSEYSWTG (SEQ ID NO: 33 of US20160369298; herein SEQ ID NO: 2539), SKTHADNNNSEYSWTG (SEQ ID NO: 34 of US20160369298; herein SEQ ID NO: 2540), SKTQADNNNSEYSWTG (SEQ ID NO: 35 of US20160369298; herein SEQ ID NO: 2541), SKTIADNNNSEYSWTG (SEQ ID NO: 36 of US20160369298; herein SEQ ID NO: 2542), SKTMADNNNSEYSWTG (SEQ ID NO: 37 of US20160369298; herein SEQ ID NO: 2543), SKTRADNNNSEYSWTG (SEQ ID NO: 38 of US20160369298; herein SEQ ID NO: 2544), SKTNADNNNSEYSWTG (SEQ ID NO: 39 of US20160369298; herein SEQ ID NO: 2545), SKTVGRNNNSEYSWTG (SEQ ID NO: 40 of US20160369298; herein SEQ ID NO: 2546), SKTADRNNNSEYSWTG (SEQ ID NO: 41 of US20160369298; herein SEQ ID NO: 2547), SKKLSQNNNSKYSWQG (SEQ ID NO: 42 of US20160369298; herein SEQ ID NO: 2548), SKPTTGNNNSDYSWPG (SEQ ID NO: 43 of US20160369298; herein SEQ ID NO: 2549), STQKNENNNSNYSWPG (SEQ ID NO: 44 of US20160369298; herein SEQ ID NO: 2550), HKDDEGKF (SEQ ID NO: 45 of US20160369298; herein SEQ ID NO: 2551), HKDDNRKF (SEQ ID NO: 46 of US20160369298; herein SEQ ID NO: 2552), HKDDTNKF (SEQ ID NO: 47 of US20160369298; herein SEQ ID NO: 2553), HEDSDKNF (SEQ ID NO: 48 of US20160369298; herein SEQ ID NO: 2554), HRDGADSF (SEQ ID NO: 49 of US20160369298; herein SEQ ID NO: 2555), HGDNKSRF (SEQ ID NO: 50 of US20160369298; herein SEQ ID NO: 2556), KQGSEKTNVDFEEV (SEQ ID NO: 51 of US20160369298; herein SEQ ID NO: 2557), KQGSEKTNVDSEEV (SEQ ID NO: 52 of US20160369298; herein SEQ ID NO: 2558), KQGSEKTNVDVEEV (SEQ ID NO: 53 of US20160369298; herein SEQ ID NO: 2559), KQGSDKTNVDDAGV (SEQ ID NO: 54 of US20160369298; herein SEQ ID NO: 2560), KQGSSKTNVDPREV (SEQ ID NO: 55 of US20160369298; herein SEQ ID NO: 2561), KQGSRKTNVDHKQV (SEQ ID NO: 56 of US20160369298; herein SEQ ID NO: 2562), KQGSKGGNVDTNRV (SEQ ID NO: 57 of US20160369298; herein SEQ ID NO: 2563), KQGSGEANVDNGDV (SEQ ID NO: 58 of US20160369298; herein SEQ ID NO: 2564), KQDAAADNIDYDHV (SEQ ID NO: 59 of US20160369298; herein SEQ ID NO: 2565), KQSGTRSNAAASSV (SEQ ID NO: 60 of US20160369298; herein SEQ ID NO: 2566), KENTNTNDTELTNV (SEQ ID NO: 61 of US20160369298; herein SEQ ID NO: 2567), QRGNNVAATADVNT (SEQ ID NO: 62 of US20160369298; herein SEQ ID NO: 2568), QRGNNEAATADVNT (SEQ ID NO: 63 of US20160369298; herein SEQ ID NO: 2569), QRGNNPAATADVNT (SEQ ID NO: 64 of US20160369298; herein SEQ ID NO: 2570), QRGNNHAATADVNT (SEQ ID NO: 65 of US20160369298; herein SEQ ID NO: 2571), QEENNIAATPGVNT (SEQ ID NO: 66 of US20160369298; herein SEQ ID NO: 2572), QPPNNMAATHEVNT (SEQ ID NO: 67 of US20160369298; herein SEQ ID NO: 2573), QHHNNSAATTIVNT (SEQ ID NO: 68 of US20160369298; herein SEQ ID NO: 2574), QTTNNRAAFNMVET (SEQ ID NO: 69 of US20160369298; herein SEQ ID NO: 2575), QKKNNNAASKKVAT (SEQ ID NO: 70 of US20160369298; herein SEQ ID NO: 2576), QGGNNKAADDAVKT (SEQ ID NO: 71 of US20160369298; herein SEQ ID NO: 2577), QAAKGGAADDAVKT (SEQ ID NO: 72 of US20160369298; herein SEQ ID NO: 2578), QDDRAAAANESVDT (SEQ ID NO: 73 of US20160369298; herein SEQ ID NO: 2579), QQQHDDAAYQRVHT (SEQ ID NO: 74 of US20160369298; herein SEQ ID NO: 2580), QSSSSLAAVSTVQT (SEQ ID NO: 75 of US20160369298; herein SEQ ID NO: 2581), QNNQTTAAIRNVTT (SEQ ID NO: 76 of US20160369298; herein SEQ ID NO: 2582), NYNKKSDNVDFT (SEQ ID NO: 77 of US20160369298; herein SEQ ID NO: 2583), NYNKKSENVDFT (SEQ ID NO: 78 of US20160369298; herein SEQ ID NO: 2584), NYNKKSLNVDFT (SEQ ID NO: 79 of US20160369298; herein SEQ ID NO: 2585), NYNKKSPNVDFT (SEQ ID NO: 80 of US20160369298; herein SEQ ID NO: 2586), NYSKKSHCVDFT (SEQ ID NO: 81 of US20160369298; herein SEQ ID NO: 2587), NYRKTIYVDFT (SEQ ID NO: 82 of US20160369298; herein SEQ ID NO: 2588), NYKEKKDVHFT (SEQ ID NO: 83 of US20160369298; herein SEQ ID NO: 2589), NYGHRAIVQFT (SEQ ID NO: 84 of US20160369298; herein SEQ ID NO: 2590), NYANHQFVVCT (SEQ ID NO: 85 of US20160369298; herein SEQ ID NO: 2591), NYDDDPTGVLLT (SEQ ID NO: 86 of US20160369298; herein SEQ ID NO: 2592), NYDDPTGVLLT (SEQ ID NO: 87 of US20160369298; herein SEQ ID NO: 2593), NFEQQNSVEWT (SEQ ID NO: 88 of US20160369298; herein SEQ ID NO: 2594), SQSGASN (SEQ ID NO: 89 and SEQ ID NO: 241 of US20160369298; herein SEQ ID NO: 2595), NNGSQA (SEQ ID NO: 90 of US20160369298; herein SEQ ID NO: 2596), YYLSRTNTPSGITTTWSRLQFSQAGA (SEQ ID NO: 91 of US20160369298; herein SEQ ID NO: 2597), SKTSADNNNSEYSWTG (SEQ ID NO: 92 of US20160369298; herein SEQ ID NO: 2598), HKDDEEKF (SEQ ID NO: 93, 209, 214, 219, 224, 234, 239, and 244 of US20160369298; herein SEQ ID NO: 2599), KQGSEKTNVDIEEV (SEQ ID NO: 94 of US20160369298; herein SEQ ID NO: 2600), QRGNNQAATADVNT (SEQ ID NO: 95 of US20160369298; herein SEQ ID NO: 2601), NYNKKSVNVDFT (SEQ ID NO: 96 of US20160369298; herein SEQ ID NO: 2602), SQSGASNYNTPSGTTTQSRLQFSTSADNNNSEYSWTGATKYH (SEQ ID NO: 106 of US20160369298; herein SEQ ID NO: 2603), SASGASNFNSEGGSLTQSSLGFSTDGENNNSDFSWTGATKYH (SEQ ID NO: 107 of US20160369298; herein SEQ ID NO: 2604), SQSGASNYNTPSGTTTQSRLQFSTDGENNNSDFSWTGATKYH (SEQ ID NO: 108 of US20160369298; herein SEQ ID NO: 2605), SASGASNYNTPSGTTTQSRLQFSTSADNNNSEFSWPGATTTYH (SEQ ID NO: 109 of US20160369298; herein SEQ ID NO: 2606), SQSGASNFNSEGGSLTQSSLGFSTDGENNNSDFSWTGATKYH (SEQ ID NO: 110 of US20160369298; herein SEQ ID NO: 2607), SASGASNYNTPSGSLTQSSLGFSTDGENNNSDFSWTGATKYH (SEQ ID NO: 111 of US20160369298; herein SEQ ID NO: 2608), SQSGASNYNTPSGTTTQSRLQFSTSADNNNSDFSTSADNNNSDFSWTGATKYH (SEQ ID NO: 112 of US20160369298; herein SEQ ID NO: 2609), SGAGASNFNSEGGSLTQSSLGFSTDGENNNSDFSWTGATKYH (SEQ ID NO: 113 of US20160369298; herein SEQ ID NO: 2610), SGAGASN (SEQ ID NO: 176 of US20160369298; herein SEQ ID NO: 2611), NSEGGSLTQSSLGFS (SEQ ID NO: 177, 185, 193 and 202 of US20160369298; herein SEQ ID NO: 2612), TDGENNNSDFS (SEQ ID NO: 178 of US20160369298; herein SEQ ID NO: 2613), SEFSWPGATT (SEQ ID NO: 179 of US20160369298; herein SEQ ID NO: 2614), TSADNNNSDFSWT (SEQ ID NO: 180 of US20160369298; herein SEQ ID NO: 2615), SQSGASNY (SEQ ID NO: 181, 187, and 198 of US20160369298; herein SEQ ID NO: 2616), NTPSGTTTQSRLQFS (SEQ ID NO: 182, 188, 191, and 199 of US20160369298; herein SEQ ID NO: 2617), TSADNNNSEYSWTGATKYH (SEQ ID NO: 183 of US20160369298; herein SEQ ID NO: 2618), SASGASNF (SEQ ID NO: 184 of US20160369298; herein SEQ ID NO: 2619), TDGENNNSDFSWTGATKYH (SEQ ID NO: 186, 189, 194, 197, and 203 of US20160369298; herein SEQ ID NO: 2620), SASGASNY (SEQ ID NO: 190 and SEQ ID NO: 195 of US20160369298; herein SEQ ID NO: 2621), TSADNNNSEFSWPGATTTYH (SEQ ID NO: 192 of US20160369298; herein SEQ ID NO: 2622), NTPSGSLTQSSLGFS (SEQ ID NO: 196 of US20160369298; herein SEQ ID NO: 2623), TSADNNNSDFSWTGATKYH (SEQ ID NO: 200 of US20160369298; herein SEQ ID NO: 2624), SGAGASNF (SEQ ID NO: 201 of US20160369298; herein SEQ ID NO: 2625), CTCCAGVVSVVSMRSRVCVNSGCAGCTDHCVVSRNSGTCVMSACACAA (SEQ ID NO: 204 of US20160369298; herein SEQ ID NO: 2626), CTCCAGAGAGGCAACAGACAAGCAGCTACCGCAGATGTCAACACACAA (SEQ ID NO: 205 of US20160369298; herein SEQ ID NO: 2627), SAAGASN (SEQ ID NO: 206 of US20160369298; herein SEQ ID NO: 2628), YFLSRTNTESGSTTQSTLRFSQAG (SEQ ID NO: 207 of US20160369298; herein SEQ ID NO: 2629), SKTSADNNNSDFS (SEQ ID NO: 208, 228, and 253 of US20160369298; herein SEQ ID NO: 2630), KQGSEKTDVDIDKV (SEQ ID NO: 210 of US20160369298; herein SEQ ID NO: 2631), STAGASN (SEQ ID NO: 211 of US20160369298; herein SEQ ID NO: 2632), YFLSRTNTTSGIETQSTLRFSQAG (SEQ ID NO: 212 and SEQ ID NO: 247 of US20160369298; herein SEQ ID NO: 2633), SKTDGENNNSDFS (SEQ ID NO: 213 and SEQ ID NO: 248 of US20160369298; herein SEQ ID NO: 2634), KQGAAADDVEIDGV (SEQ ID NO: 215 and SEQ ID NO: 250 of US20160369298; herein SEQ ID NO: 2635), SEAGASN (SEQ ID NO: 216 of US20160369298; herein SEQ ID NO: 2636), YYLSRTNTPSGTTTQSRLQFSQAG (SEQ ID NO: 217, 232 and 242 of US20160369298; herein SEQ ID NO: 2637), SKTSADNNNSEYS (SEQ ID NO: 218, 233, 238, and 243 of US20160369298; herein SEQ ID NO: 2638), KQGSEKTNVDIEKV (SEQ ID NO: 220, 225 and 245 of US20160369298; herein SEQ ID NO: 2639), YFLSRTNDASGSDTKSTLLFSQAG (SEQ ID NO: 222 of US20160369298; herein SEQ ID NO: 2640), STTPSENNNSEYS (SEQ ID NO: 223 of US20160369298; herein SEQ ID NO: 2641), SAAGATN (SEQ ID NO: 226 and SEQ ID NO: 251 of US20160369298; herein SEQ ID NO: 2642), YFLSRTNGEAGSATLSELRFSQAG (SEQ ID NO: 227 of US20160369298; herein SEQ ID NO: 2643), HGDDADRF (SEQ ID NO: 229 and SEQ ID NO: 254 of US20160369298; herein SEQ ID NO: 2644), KQGAEKSDVEVDRV (SEQ ID NO: 230 and SEQ ID NO: 255 of US20160369298; herein SEQ ID NO: 2645), KQDSGGDNIDIDQV (SEQ ID NO: 235 of US20160369298; herein SEQ ID NO: 2646), SDAGASN (SEQ ID NO: 236 of US20160369298; herein SEQ ID NO: 2647), YFLSRTNTEGGHDTQSTLRFSQAG (SEQ ID NO: 237 of US20160369298; herein SEQ ID NO: 2648), KEDGGGSDVAIDEV (SEQ ID NO: 240 of US20160369298; herein SEQ ID NO: 2649), SNAGASN (SEQ ID NO: 246 of US20160369298; herein SEQ ID NO: 2650), and YFLSRTNGEAGSATLSELRFSQPG (SEQ ID NO: 252 of US20160369298; herein SEQ ID NO: 2651). Non-limiting examples of nucleotide sequences that may encode the amino acid mutated sites include the following, AGCVVMDCAGGARSCASCAAC (SEQ ID NO: 97 of US20160369298; herein SEQ ID NO: 2652), AACRACRRSMRSMAGGCA (SEQ ID NO: 98 of US20160369298; herein SEQ ID NO: 2653), CACRRGGACRRCRMSRRSARSTTT (SEQ ID NO: 99 of US20160369298; herein SEQ ID NO: 2654), TATTTCTTGAGCAGAACAAACRVCVVSRSCGGAMNCVHSACGMHSTCAVVSCTTVDS TTTUCTCAGSBCRGSGCG (SEQ ID NO: 100 of US20160369298; herein SEQ ID NO: 2655), TCAAMAMMAVNSRVCSRSAACAACAACAGTRASTCTCGTGGMMAGGA (SEQ ID NO: 101 of US20160369298; herein SEQ ID NO: 2656), AAGSAARRCRSCRVSRVARVCRATRYCGMSNHCRVMVRSGTC (SEQ ID NO: 102 of US20160369298; herein SEQ ID NO: 2657), CAGVVSVVSMRSRVCVNSGCAGCTDHCVVSRNSGTCVMSACA (SEQ ID NO: 103 of US20160369298; herein SEQ ID NO: 2658), AACTWCRVSVASMVSVHSDDTGTGSWSTKSACT (SEQ ID NO: 104 of US20160369298; herein SEQ ID NO: 2659), TTGTTGAACATCACCACGTGACGCACGTTC (SEQ ID NO: 256 of US20160369298; herein SEQ ID NO: 2660), TCCCCGTGGTTCTACTACATAATGTGGCCG (SEQ ID NO: 257 of US20160369298; herein SEQ ID NO: 2661), TFCCACACTCCGTTTTGGATAATGTTGAAC (SEQ ID NO: 258 of US20160369298; herein SEQ ID NO: 2662), AGGGACATCCCCAGCTCCATGCTGTGGTCG (SEQ ID NO: 259 of US20160369298; herein SEQ ID NO: 2663), AGGGACAACCCCTCCGACTCGCCCTAATCC (SEQ ID NO: 260 of US20160369298; herein SEQ ID NO: 2664), TCCTAGTAGAAGACACCCTCTCACTGCCCG (SEQ ID NO: 261 of US20160369298; herein SEQ ID NO: 2665), AGTACCATGTACACCCACTCTCCCAGTGCC (SEQ ID NO: 262 of US20160369298; herein SEQ ID NO: 2666), ATATGGACGTTCATGCTGATCACCATACCG (SEQ ID NO: 263 of US20160369298; herein SEQ ID NO: 2667), AGCAGGAGCTCCTTGGCCTCAGCGTGCGAG (SEQ ID NO: 264 of US20160369298; herein SEQ ID NO: 2668), ACAAGCAGCTTCACTATGACAACCACTGAC (SEQ ID NO: 265 of US20160369298; herein SEQ ID NO: 2669), CAGCCTAGGAACTGGCTTCCTGGACCCTGTTACCGCCAGCAGAGAGTCTCAAMAMM AVNSRVCSRSAACAACAACAGTRASTTCTCCTGGMMAGGAGCTACCAAGTACCACC TCAATGGCAGAGACTCTCTGGTGAATCCCGGACCAGCTATGGCAAGCCACRRGGAC RRCRMSRRSARSTTTTTCCTCAGAGCGGGTTCTCATCITGGGAAGSAARRCRSCR VSRVARVCRATRYCGMSNHCRVMVRSGTCATGATTACAGACGAAGAGGAGATCTGG AC (SEQ ID NO: 266 of US20160369298; herein SEQ ID NO: 2670), TGGGACAATGGCGGTCGTCTCTCAGAGTTKTKKT (SEQ ID NO: 267 of US20160369298; herein SEQ ID NO: 2671), AGAGGACCKKTCCTCGATGGTTCATGGTGGAGTTA (SEQ ID NO: 268 of US20160369298; herein SEQ ID NO: 2672), CCACTTAGGGCCTGGTCGATACCGTTCGGTG (SEQ ID NO: 269 of US20160369298; herein SEQ ID NO: 2673), and TCTCGCCCCAAGAGTAGAAACCCCTTCSTTYYG (SEQ ID NO: 270 of US20160369298; herein SEQ ID NO: 2674).

[0242] In some embodiments, the AAV serotype may comprise an ocular cell targeting peptide as described in International Patent Publication WO2016134375, the contents of which are herein incorporated by reference in their entirety, such as, but not limited to SEQ ID NO: 9, and SEQ ID NO: 10 of WO2016134375. Further, any of the ocular cell targeting peptides or amino acids described in WO2016134375, may be inserted into any parent AAV serotype, such as, but not limited to, AAV2 (SEQ ID NO:8 of WO2016134375; herein SEQ ID NO: 2675), or AAV9 (SEQ ID NO: 11 of WO2016134375; herein SEQ ID NO: 2676). In some embodiments, modifications, such as insertions are made in AAV2 proteins at P34-A35, T138-A139, A139-P140, G453-T454, N587-R588, and/or R588-Q589. In certain embodiments, insertions are made at D384, G385, 1560, T561, N562. E563. E564. E565, N704, and/or Y705 of AAV9. The ocular cell targeting peptide may be, but is not limited to, any of the following amino acid sequences. GSTPPPM (SEQ ID NO: 1 of WO2016134375; herein SEQ ID NO: 2677), or GETRAPL (SEQ ID NO: 4 of WO2016134375; herein SEQ ID NO: 2678).

[0243] In some embodiments, the AAV serotype may be modified as described in the United States Publication US 20170145405 the contents of which are herein incorporated by reference in their entirety, AAV serotypes may include, modified AAV2(e.g., modifications at Y444F, Y500F, Y730F and/or S662V), modified AAV3 (e.g., modifications at Y705F, Y731F and/or T492V), and modified AAV6 (e.g., modifications at S663V and/or T492V).

[0244] In some embodiments, the AAV serotype may be modified as described in the International Publication WO2017083722 the contents of which are herein incorporated by reference in their entirety, AAV serotypes may include, AAV1 (Y705+731F+T492V), AAV2 (Y444+500+730F+T491V), AAV3 (Y705+731F), AAV5, AAV5(Y436+693+719F), AAV6 (VP3 variant Y705F/Y731F/T492V), AAV8 (Y733F), AAV9, AAV9 (VP3 variant Y731F), and AAV10 (Y733F).

[0245] In some embodiments, the AAV serotype may comprise, as described in International Patent Publication WO2017015102, the contents of which are herein incorporated by reference in their entirety, an engineered epitope comprising the amino acids SPAKFA (SEQ ID NO: 24 of WO2017015102; herein SEQ ID NO: 2679) or NKDKLN (SEQ ID NO:2 of WO2017015102; herein SEQ ID NO: 2680). The epitope may be inserted in the region of amino acids 665 to 670 based on the numbering of the VP1 capsid of AAV8 (SEQ ID NO:3 of WO2017015102) and/or residues 664 to 668 of AAV3B (SEQ ID NO:3).

[0246] In one embodiment, the AAV serotype may be, or may have a sequence as described in International Patent Publication WO2017058892, the contents of which are herein incorporated by reference in their entirety, such as, but not limited to, AAV variants with capsid proteins that may comprise a substitution at one or more (e.g., 2, 3, 4, 5, 6, or 7) of amino acid residues 262-268, 370-379, 451-459, 472-473, 493-500, 528-534, 547-552, 588-597, 709-710, 716-722 of AAV1, in any combination, or the equivalent amino acid residues in AAV2, AAV3, AAV4, AAV5, AAV6, AAV7, AAV8, AAV9, AAV10, AAV11, AAV12, AAVrh8, AAVrh10, AAVrh32.33, bovine AAV or avian AAV. The amino acid substitution may be, but is not limited to, any of the amino acid sequences described in WO2017058892. In one embodiment, the AAV may comprise an amino acid substitution at residues 256L, 258K, 259Q, 261S, 263A, 264S, 265T, 266G, 272H, 385S, 386Q, S472R, V473D, N500E 547S, 709A, 710N, 716D, 717N, 718N, 720L, A456T, Q457T, N458Q, K459S, T492S, K493A, S586R. S587G, S588N, T589R and/or 722T of AAV1 (SEQ ID NO: 1 of WO2017058892) in any combination, 244N, 246Q, 248R, 249E, 2501, 251K, 252S, 253G, 254S, 255V, 256D, 263Y, 377E, 378N, 453L, 456R, 532Q, 533P, 535N, 536P, 537G, 538T, 539T, 540A, 541 T, 542Y, 543L, 546N, 653V, 654P, 656S, 697Q, 698F, 704D, 705S, 706T, 707G, 708E, 709Y and/or 710R of AAV5 (SEQ ID NO:5 of WO2017058892) in any combination, 248R, 316V, 317Q, 318D, 319S, 443N, 530N, 531S, 532Q 533P, 534A, 535N, 540A, 541 T, 542Y, 543L, 545G, 546N, 697Q, 704D, 706T, 708E, 709Y and/or 710R of AAV5 (SEQ ID NO: 5 of WO2017058892) in any combination, 264S, 266G, 269N, 2721, 457Q, 588S and/or 5891 of AAV6 (SEQ ID NO:6 WO2017058892) in any combination, 457T, 459N, 496G, 499N, 500N, 589Q, 590N and/or 592A of AAV8 (SEQ ID NO: 8 WO2017058892) in any combination, 451I, 452N, 453G, 454S, 455G, 456Q, 457N and/or 458Q of AAV9 (SEQ ID NO: 9 WO2017058892) in any combination.

[0247] In some embodiments, the AAV may include a sequence of amino acids at positions 155, 156 and 157 of VP1 or at positions 17, 18, 19 and 20 of VP2, as described in International Publication No. WO 2017066764, the contents of which are herein incorporated by reference in their entirety. The sequences of amino acid may be, but not limited to, N-S-S, S-X-S, S-S-Y, N-X-S, N-S-Y, S-X-Y and N-X-Y, where N, X and Y are, but not limited to, independently non-serine, or non-threonine amino acids, wherein the AAV may be, but not limited to AAV1, AAV2, AAV3, AAV4, AAV5, AAV6, AAV7, AAV8, AAV9, AAV10, AAV11 and AAV12. In some embodiments, the AAV may include a deletion of at least one amino acid at positions 156, 157 or 158 of VP1 or at positions 19, 20 or 21 of VP2, wherein the AAV may be, but not limited to AAV1, AAV2, AAV3, AAV4, AAV5, AAV6, AAV7, AAV8, AAV9, AAV10, AAV11 and AAV12.

[0248] In one embodiment, peptides for inclusion in an AAV serotype may be identified using the methods described by Hui et al. (Molecular Therapy—Methods & Clinical Development (2015) 2, 15029 doi:10.1038/mntm.2015.29; the contents of which are herein incorporated by reference in its entirety). As a non-limiting example, the procedure includes isolating human splenocytes, restimulating the splenocytes in vitro using individual peptides spanning the amino acid sequence of the AAV capsid protein, IFN-gamma ELISpot with the individual peptides used for the in vitro restimulation, bioinformatics analysis to determine the HLA restriction of 15-mers identified by IFN-gamma ELISpot, identification of candidate reactive 9-mer epitopes for a given HLA allele, synthesis candidate 9-mers, second IFN-gamma ELISpot screening of splenocytes from subjects carrying the HLA alleles to which identified AAV epitopes are predicted to bind, determine the AAV capsid-reactive CD8+ T cell epitopes and determine the frequency of subjects reacting to a given AAV epitope.

[0249] In one embodiment, the AAV may be a serotype generated by Cre-recombination-based AAV targeted evolution (CREATE) as described by Deverman et al., (Nature Biotechnology 34(2):204-209 (2016)), the contents of which are herein incorporated by reference in their entirety. In one embodiment, AAV serotypes generated in this manner have improved CNS transduction and/or neuronal and astrocytic tropism, as compared to other AAV serotypes. As non-limiting examples, the AAV serotype may be PHP.B, PHP.B2, PHP.B3, PHP.A, G2A12, G2A15. In one embodiment, these AAV serotypes may be AAV9 (SEQ ID NO: 126 and 127) derivatives with a 7-amino acid insert between amino acids 588-589. Non-limiting examples of these 7-amino acid inserts include TLAVPFK (SEQ ID NO: 873), SVSKPFL (SEQ ID NO: 1249), FTLTTPK (SEQ ID NO: 882), YTLSQGW (SEQ ID NO: 888), QAVRTSL (SEQ ID NO: 914) and/or LAKERLS (SEQ ID NO: 915).

[0250] In one embodiment, the AAV serotype may be as described in Jackson et al (Frontiers in Molecular Neuroscience 9:154 (2016)), the contents of which are herein incorporated by reference in their entirety. In some embodiments, the AAV serotype is PHP.B or AAV9. In some embodiments, the AAV serotype is paired with a synapsin promoter to enhance neuronal transduction, as compared to when more ubiquitous promoters are used (i.e., CBA or CMV).

[0251] In one embodiment, peptides for inclusion in an AAV serotype may be identified by isolating human splenocytes, restimulating the splenocytes in vitro using individual peptides spanning the amino acid sequence of the AAV capsid protein, IFN-gamma ELISpot with the individual peptides used for the in vitro restimulation, bioinformatics analysis to determine the given allele restriction of 15-mers identified by IFN-gamma ELISpot, identification of candidate reactive 9-mer epitopes for a given allele, synthesis candidate 9-mers, second IFN-gamma ELISpot screening of splenocytes from subjects carrying the specific alleles to which identified AAV epitopes are predicted to bind, determine the AAV capsid-reactive CD8+ T cell epitopes and determine the frequency of subjects reacting to a given AAV epitope.

[0252] AAV particles comprising a modulatory polynucleotide encoding the siRNA molecules may be prepared or derived from various serotypes of AAVs, including, but not limited to, AAV1, AAV2, AAV3, AAV4, AAV5, AAV6, AAV7, AAV8, AAV9, AAV9.47, AAV9(hu14), AAV10, AAV11, AAV12, AAVrh8, AAVrh10, AAV-DJ8 and AAV-DJ. In some cases, different serotypes of AAVs may be mixed together or with other types of viruses to produce chimeric AAV particles. As a non-limiting example, the AAV particle is derived from the AAV9 serotype.

### Viral Genome

[0253] In one embodiment, as shown in an AAV particle comprises a viral genome with a payload region.

[0254] In one embodiment, the viral genome may comprise the components as shown in FIG. 1. The payload region 110 is located within the viral genome 100. At the 5′ and/or the 3′ end of the viral genome 100 there may be at least one inverted terminal repeat (ITR) 120. Between the 5′ ITR 120 and the payload region 110, there may be a promoter region 130. In one embodiment, the payload region may comprise at least one modulatory polynucleotide.

[0255] In one embodiment, the viral genome 100 may comprise the components as shown in FIG. 2. The payload region 110 is located within the viral genome 100. At the 5′ and/or the 3′ end of the viral genome 100 there may be at least one inverted terminal repeat (ITR) 120. Between the 5′ ITR 120 and the payload region 110, there may be a promoter region 130. Between the promoter region 130 and the payload region 110, there may be an intron region 140. In one embodiment, the payload region may comprise at least one modulatory polynucleotide.

[0256] In one embodiment, the viral genome 100 may comprise the components as shown in FIG. 3. At the 5′ and/or the 3′ end of the viral genome 100 there may be at least one inverted terminal repeat (ITR) 120. Within the viral genome 100, there may be an enhancer region 150, a promoter region 130, an intron region 140, and a payload region 110. In one embodiment, the payload region may comprise at least one modulatory polynucleotide.

[0257] In one embodiment, the viral genome 100 may comprise the components as shown in FIG. 4. At the 5′ and/or the 3′ end of the viral genome 100 there may be at least one inverted terminal repeat (ITR) 120. Within the viral genome 100, there may be an enhancer region 150, a promoter region 130, an intron region 140, a payload region 110, and a polyadenylation signal sequence region 160. In one embodiment, the payload region may comprise at least one modulatory polynucleotide.

[0258] In one embodiment, the viral genome 100 may comprise the components as shown in FIG. 5. At the 5′ and/or the 3′ end of the viral genome 100 there may be at least one inverted terminal repeat (ITR) 120. Within the viral genome 100, there may be at least one MCS region 170, an enhancer region 150, a promoter region 130, an intron region 140, a payload region 110, and a polyadenylation signal sequence region 160. In one embodiment, the payload region may comprise at least one modulatory polynucleotide.

[0259] In one embodiment, the viral genome 100 may comprise the components as shown in FIG. 6. At the 5′ and/or the 3′ end of the viral genome 100 there may be at least one inverted terminal repeat (ITR) 120. Within the viral genome 100, there may be at least one MCS region 170, an enhancer region 150, a promoter region 130, at least one exon region 180, at least one intron region 140, a payload region 110, and a polyadenylation signal sequence region 160. In one embodiment, the payload region may comprise at least one modulatory polynucleotide.

[0260] In one embodiment, the viral genome 100 may comprise the components as shown in FIGS. 7 and 8. Within the viral genome 100, there may be at least one promoter region 130, and a payload region 110. In one embodiment, the payload region may comprise at least one modulatory polynucleotide.

[0261] In one embodiment, the viral genome 100 may comprise the components as shown in FIG. 9. Within the viral genome 100, there may be at least one promoter region 130, a payload region 110, and a polyadenylation signal sequence region 160. In one embodiment, the payload region may comprise at least one modulatory polynucleotide.

### Viral Genome Size

[0262] In one embodiment, the viral genome which comprises a payload described herein, may be single stranded or double stranded viral genome. The size of the viral genome may be small, medium, large or the maximum size. Additionally, the viral genome may comprise a promoter and a polyA tail.

[0263] In one embodiment, the viral genome which comprises a payload described herein, may be a small single stranded viral genome. A small single stranded viral genome may be 2.7 to 3.5 kb in size such as about 2.7, 2.8, 2.9, 3.0, 3.1, 3.2, 3.3, 3.4, and 3.5 kb in size. As a non-limiting example, the small single stranded viral genome may be 3.2 kb in size. Additionally, the viral genome may comprise a promoter and a polyA tail.

[0264] In one embodiment, the viral genome which comprises a payload described herein, may be a small double stranded viral genome. A small double stranded viral genome may be 1.3 to 1.7 kb in size such as about 1.3, 1.4, 1.5, 1.6, and 1.7 kb in size. As a non-limiting example, the small double stranded viral genome may be 1.6 kb in size. Additionally, the viral genome may comprise a promoter and a polyA tail.

[0265] In one embodiment, the viral genome which comprises a payload described herein, may a medium single stranded viral genome. A medium single stranded viral genome may be 3.6 to 4.3 kb in size such as about 3.6, 3.7, 3.8, 3.9, 4.0, 4.1, 4.2 and 4.3 kb in size. As a non-limiting example, the medium single stranded viral genome may be 4.0 kb in size. Additionally, the viral genome may comprise a promoter and a polyA tail.

[0266] In one embodiment, the viral genome which comprises a payload described herein, may be a medium double stranded viral genome. A medium double stranded viral genome may be 1.8 to 2.1 kb in size such as about 1.8, 1.9, 2.0, and 2.1 kb in size. As a non-limiting example, the medium double stranded viral genome may be 2.0 kb in size. Additionally, the viral genome may comprise a promoter and a polyA tail.

[0267] In one embodiment, the viral genome which comprises a payload described herein, may be a large single stranded viral genome. A large single stranded viral genome may be 4.4 to 6.0 kb in size such as about 4.4, 4.5, 4.6, 4.7, 4.8, 4.9, 5.0, 5.1, 5.2, 5.3, 5.4, 5.5, 5.6, 5.7, 5.8, 5.9 and 6.0 kb in size. As a non-limiting example, the large single stranded viral genome may be 4.7 kb in size. As another non-limiting example, the large single stranded viral genome may be 4.8 kb in size. As yet another non-limiting example, the large single stranded viral genome may be 6.0 kb in size. Additionally, the viral genome may comprise a promoter and a polyA tail.

[0268] In one embodiment, the viral genome which comprises a payload described herein, may be a large double stranded viral genome. A large double stranded viral genome may be 2.2 to 3.0 kb in size such as about 2.2, 2.3, 2.4, 2.5, 2.6, 2.7, 2.8, 2.9 and 3.0 kb in size. As a non-limiting example, the large double stranded viral genome may be 2.4 kb in size. Additionally, the viral genome may comprise a promoter and a polyA tail.

### Viral Genome Component: Inverted Terminal Repeats (ITRs)

[0269] The AAV particles of the present invention comprise a viral genome with at least one ITR region and a payload region. In one embodiment the viral genome has two ITRs. These two ITRs flank the payload region at the 5′ and 3′ ends. The ITRs function as origins of replication comprising recognition sites for replication. ITRs comprise sequence regions which can be complementary and symmetrically arranged. ITRs incorporated into viral genomes of the invention may be comprised of naturally occurring polynucleotide sequences or recombinantly derived polynucleotide sequences.

[0270] The ITRs may be derived from the same serotype as the capsid, selected from any of the serotypes listed in Table 1, or a derivative thereof. The ITR may be of a different serotype from the capsid. In one embodiment the AAV particle has more than one ITR. In a non-limiting example, the AAV particle has a viral genome comprising two ITRs. In one embodiment the ITRs are of the same serotype as one another. In another embodiment the ITRs are of different serotypes. Non-limiting examples include zero, one or both of the ITRs having the same serotype as the capsid. In one embodiment both ITRs of the viral genome of the AAV particle are AAV2 ITRs.

[0271] Independently, each ITR may be about 100 to about 150 nucleotides in length. An ITR may be about 100-105 nucleotides in length, 106-110 nucleotides in length, 111-115 nucleotides in length, 116-120 nucleotides in length, 121-125 nucleotides in length, 126-130 nucleotides in length, 131-135 nucleotides in length, 136-140 nucleotides in length, 141-145 nucleotides in length or 146-150 nucleotides in length. In one embodiment the ITRs are 140-142 nucleotides in length. Non limiting examples of ITR length are 102, 140, 141, 142, 145 nucleotides in length, and those having at least 95% identity thereto.

[0272] In one embodiment, the AAV particle comprises a nucleic acid sequence encoding an siRNA molecule which may be located near the 5′ end of the flip ITR in an expression vector. In another embodiment, the AAV particle comprises a nucleic acid sequence encoding an siRNA molecule may be located near the 3′ end of the flip ITR in an expression vector. In yet another embodiment, the AAV particle comprises a nucleic acid sequence encoding an siRNA molecule may be located near the 5′ end of the flop ITR in an expression vector. In yet another embodiment, the AAV particle comprises a nucleic acid sequence encoding an siRNA molecule may be located near the 3′ end of the flop ITR in an expression vector. In one embodiment, the AAV particle comprises a nucleic acid sequence encoding an siRNA molecule may be located between the 5′ end of the flip ITR and the 3′ end of the flop ITR in an expression vector. In one embodiment, the AAV particle comprises a nucleic acid sequence encoding an siRNA molecule may be located between (e.g., half-way between the 5′ end of the flip ITR and 3′ end of the flop ITR or the 3′ end of the flop ITR and the 5′ end of the flip ITR), the 3′ end of the flip ITR and the 5′ end of the flip ITR in an expression vector. As a non-limiting example, the AAV particle comprises a nucleic acid sequence encoding an siRNA molecule may be located within 1, 2, 3, 4, 5, 6, 7, 8, 9, 10, 11, 12, 13, 14, 15, 16, 17, 18, 19, 20, 21, 22, 23, 24, 25, 26, 27, 28, 29, 30 or more than 30 nucleotides downstream from the 5′ or 3′ end of an ITR (e.g., Flip or Flop ITR) in an expression vector. As a non-limiting example, the AAV particle comprises a nucleic acid sequence encoding an siRNA molecule may be located within 1, 2, 3, 4, 5, 6, 7, 8, 9, 10, 11, 12, 13, 14, 15, 16, 17, 18, 19, 20, 21, 22, 23, 24, 25, 26, 27, 28, 29, 30 or more than 30 nucleotides upstream from the 5′ or 3′ end of an ITR (e.g., Flip or Flop ITR) in an expression vector. As another non-limiting example, the AAV particle comprises a nucleic acid sequence encoding an siRNA molecule may be located within 1-5, 1-10, 1-15, 1-20, 1-25, 1-30, 5-10, 5-15, 5-20, 5-25, 5-30, 10-15, 10-20, 10-25, 10-30, 15-20, 15-25, 15-30, 20-25, 20-30 or 25-30 nucleotides downstream from the 5′ or 3′ end of an ITR (e.g., Flip or Flop ITR) in an expression vector. As another non-limiting example, the AAV particle comprises a nucleic acid sequence encoding an siRNA molecule may be located within 1-5, 1-10, 1-15, 1-20, 1-25, 1-30, 5-10, 5-15, 5-20, 5-25, 5-30, 10-15, 10-20, 10-25, 10-30, 15-20, 15-25, 15-30, 20-25, 20-30 or 25-30 upstream from the 5′ or 3′ end of an ITR (e.g., Flip or Flop ITR) in an expression vector. As a non-limiting example, the AAV particle comprises a nucleic acid sequence encoding an siRNA molecule may be located within the first 1%, 2%, 3%, 4%, 5%, 6%, 7%, 8%, 9%, 10%, 15%, 20%, 25% or more than 25% of the nucleotides upstream from the 5′ or 3′ end of an ITR (e.g., Flip or Flop ITR) in an expression vector. As another non-limiting example, the AAV particle comprises a nucleic acid sequence encoding an siRNA molecule may be located with the first 1-5%, 1-10%, 1-15%, 1-20%, 1-25%, 5-10%, 5-15%, 5-20%, 5-25%, 10-15%, 10-20%, 10-25%, 15-20%, 15-25%, or 20-25% downstream from the 5′ or 3′ end of an ITR (e.g., Flip or Flop ITR) in an expression vector.

### Viral Genome Component: Promoters

[0273] In one embodiment, the payload region of the viral genome comprises at least one element to enhance the transgene target specificity and expression (See e.g., Powell et al. Viral Expression Cassette Elements to Enhance Transgene Target Specificity and Expression in Gene Therapy, 2015; the contents of which are herein incorporated by reference in its entirety). Non-limiting examples of elements to enhance the transgene target specificity and expression include promoters, endogenous miRNAs, post-transcriptional regulatory elements (PREs), polyadenylation (PolyA) signal sequences and upstream enhancers (USEs), CMV enhancers and introns.

[0274] A person skilled in the art may recognize that expression of the polypeptides of the invention in a target cell may require a specific promoter, including but not limited to, a promoter that is species specific, inducible, tissue-specific, or cell cycle-specific (Parr et al., Nat. Med. 3:1145-9 (1997); the contents of which are herein incorporated by reference in their entirety).

[0275] In one embodiment, the promoter is deemed to be efficient when it drives expression of the polypeptide(s) encoded in the payload region of the viral genome of the AAV particle.

[0276] In one embodiment, the promoter is a promoter deemed to be efficient to drive the expression of the modulatory polynucleotide.

[0277] In one embodiment, the promoter is a promoter deemed to be efficient when it drives expression in the cell being targeted.

[0278] In one embodiment, the promoter drives expression of the payload for a period of time in targeted tissues. Expression driven by a promoter may be for a period of 1 hour, 2, hours, 3 hours, 4 hours, 5 hours, 6 hours, 7 hours, 8 hours, 9 hours, 10 hours, 11 hours, 12 hours, 13 hours, 14 hours, 15 hours, 16 hours, 17 hours, 18 hours, 19 hours, 20 hours, 21 hours, 22 hours, 23 hours, 1 day, 2 days, 3 days, 4 days, 5 days, 6 days, 1 week, 8 days, 9 days, 10 days, 11 days, 12 days, 13 days, 2 weeks, 15 days, 16 days, 17 days, 18 days, 19 days, 20 days, 3 weeks, 22 days, 23 days, 24 days, 25 days, 26 days, 27 days, 28 days, 29 days, 30 days, 31 days, 1 month, 2 months, 3 months, 4 months, 5 months, 6 months, 7 months, 8 months, 9 months, 10 months, 11 months, 1 year, 13 months, 14 months, 15 months, 16 months, 17 months, 18 months, 19 months, 20 months, 21 months, 22 months, 23 months, 2 years, 3 years, 4 years, 5 years, 6 years, 7 years, 8 years, 9 years, 10 years or more than 10 years. Expression may be for 1-5 hours, 1-12 hours, 1-2 days, 1-5 days, 1-2 weeks, 1-3 weeks, 1-4 weeks, 1-2 months, 1-4 months, 1-6 months, 2-6 months, 3-6 months, 3-9 months, 4-8 months, 6-12 months, 1-2 years, 1-5 years, 2-5 years, 3-6 years, 3-8 years, 4-8 years or 5-10 years.

[0279] In one embodiment, the promoter drives expression of the payload for at least 1 month, 2 months, 3 months, 4 months, 5 months, 6 months, 7 months, 8 months, 9 months, 10 months, 11 months, 1 year, 2 years, 3 years 4 years, 5 years, 6 years, 7 years, 8 years, 9 years, 10 years, 11 years, 12 years, 13 years, 14 years, 15 years, 16 years, 17 years, 18 years, 19 years, 20 years, 21 years, 22 years, 23 years, 24 years, 25 years, 26 years, 27 years, 28 years, 29 years, 30 years, 31 years, 32 years, 33 years, 34 years, 35 years, 36 years, 37 years, 38 years, 39 years, 40 years, 41 years, 42 years, 43 years, 44 years, 45 years, 46 years, 47 years, 48 years, 49 years, 50 years, 55 years, 60 years, 65 years, or more than 65 years.

[0280] Promoters may be naturally occurring or non-naturally occurring. Non-limiting examples of promoters include viral promoters, plant promoters and mammalian promoters. In some embodiments, the promoters may be human promoters. In some embodiments, the promoter may be truncated.

[0281] Promoters which drive or promote expression in most tissues include, but are not limited to, human elongation factor 1α-subunit (EF1α), cytomegalovirus (CMV) immediate-early enhancer and/or promoter, chicken β-actin (CBA) and its derivative CAG, β glucuronidase (GUSB), or ubiquitin C (UBC). Tissue-specific expression elements can be used to restrict expression to certain cell types such as, but not limited to, muscle specific promoters, B cell promoters, monocyte promoters, leukocyte promoters, macrophage promoters, pancreatic acinar cell promoters, endothelial cell promoters, lung tissue promoters, astrocyte promoters, or nervous system promoters which can be used to restrict expression to neurons, astrocytes, or oligodendrocytes.

[0282] Non-limiting examples of muscle-specific promoters include mammalian muscle creatine kinase (MCK) promoter, mammalian desmin (DES) promoter, mammalian troponin I (TNNI2) promoter, and mammalian skeletal alpha-actin (ASKA) promoter (see, e.g. U.S. Patent Publication US 20110212529, the contents of which are herein incorporated by reference in their entirety)

[0283] Non-limiting examples of tissue-specific expression elements for neurons include neuron-specific enolase (NSE), platelet-derived growth factor (PDGF), platelet-derived growth factor B-chain (PDGF-β), synapsin (Syn), methyl-CpG binding protein 2 (MeCP2), Ca²⁺/calmodulin-dependent protein kinase II (CaMKII), metabotropic glutamate receptor 2 (mGluR2), neurofilament light (NFL) or heavy (NFH), β-globin minigene nβ2, preproenkephalin (PPE), enkephalin (Enk) and excitatory amino acid transporter 2 (EAAT2) promoters. Non-limiting examples of tissue-specific expression elements for astrocytes include glial fibrillary acidic protein (GFAP) and EAAT2 promoters. A non-limiting example of a tissue-specific expression element for oligodendrocytes includes the myelin basic protein (MBP) promoter.

[0284] In one embodiment, the promoter may be less than 1 kb. The promoter may have a length of 200, 210, 220, 230, 240, 250, 260, 270, 280, 290, 300, 310, 320, 330, 340, 350, 360, 370, 380, 390, 400, 410, 420, 430, 440, 450, 460, 470, 480, 490, 500, 510, 520, 530, 540, 550, 560, 570, 580, 590, 600, 610, 620, 630, 640, 650, 660, 670, 680, 690, 700, 710, 720, 730, 740, 750, 760, 770, 780, 790, 800 or more than 800 nucleotides. The promoter may have a length between 200-300, 200-400, 200-500, 200-600, 200-700, 200-800, 300-400, 300-500, 300-600, 300-700, 300-800, 400-500, 400-600, 400-700, 400-800, 500-600, 500-700, 500-800, 600-700, 600-800 or 700-800.

[0285] In one embodiment, the promoter may be a combination of two or more components of the same or different starting or parental promoters such as, but not limited to, CMV and CBA. Each component may have a length of 200, 210, 220, 230, 240, 250, 260, 270, 280, 290, 300, 310, 320, 330, 340, 350, 360, 370, 380, 381, 382, 383, 384, 385, 386, 387, 388, 389, 390, 400, 410, 420, 430, 440, 450, 460, 470, 480, 490, 500, 510, 520, 530, 540, 550, 560, 570, 580, 590, 600, 610, 620, 630, 640, 650, 660, 670, 680, 690, 700, 710, 720, 730, 740, 750, 760, 770, 780, 790, 800 or more than 800. Each component may have a length between 200-300, 200-400, 200-500, 200-600, 200-700, 200-800, 300-400, 300-500, 300-600, 300-700, 300-800, 400-500, 400-600, 400-700, 400-800, 500-600, 500-700, 500-800, 600-700, 600-800 or 700-800. In one embodiment, the promoter is a combination of a 382 nucleotide CMV-enhancer sequence and a 260 nucleotide CBA-promoter sequence.

[0286] In one embodiment, the viral genome comprises a ubiquitous promoter. Non-limiting examples of ubiquitous promoters include CMV, CBA (including derivatives CAG, CBh, etc.), EF-1α, PGK, UBC, GUSB (hGBp), and UCOE (promoter of HNRPA2B1-CBX3).

[0287] Yu et al. (Molecular Pain 2011, 7:63; the contents of which are herein incorporated by reference in their entirety) evaluated the expression of eGFP under the CAG, EFIα, PGK and UBC promoters in rat DRG cells and primary DRG cells using lentiviral vectors and found that UBC showed weaker expression than the other 3 promoters and only 10-12% glial expression was seen for all promoters. Soderblom et al. (E. Neuro 2015; the contents of which are herein incorporated by reference in its entirety) evaluated the expression of eGFP in AAV8 with CMV and UBC promoters and AAV2 with the CMV promoter after injection in the motor cortex. Intranasal administration of a plasmid containing a UBC or EF1α promoter showed a sustained airway expression greater than the expression with the CMV promoter (See e.g., Gill et al., Gene Therapy 2001, Vol. 8, 1539-1546; the contents of which are herein incorporated by reference in their entirety). Husain et al. (Gene Therapy 2009; the contents of which are herein incorporated by reference in its entirety) evaluated an HβH construct with a hGUSB promoter, a HSV-ILAT promoter and an NSE promoter and found that the HOH construct showed weaker expression than NSE in mouse brain. Passini and Wolfe (J. Virol. 2001, 12382-12392, the contents of which are herein incorporated by reference in its entirety) evaluated the long term effects of the H3H vector following an intraventricular injection in neonatal mice and found that there was sustained expression for at least 1 year. Low expression in all brain regions was found by Xu et al. (Gene Therapy 2001, 8, 1323-1332; the contents of which are herein incorporated by reference in their entirety) when NFL and NFH promoters were used as compared to the CMV-lacZ, CMV-luc, EF, GFAP, hENK, nAChR, PPE, PPE+wpre, NSE (0.3 kb), NSE (1.8 kb) and NSE (1.8 kb+wpre). Xu et al. found that the promoter activity in descending order was NSE (1.8 kb), EF, NSE (0.3 kb), GFAP, CMV, hENK, PPE, NFL and NFH. NFL is a 650 nucleotide promoter and NFH is a 920 nucleotide promoter which are both absent in the liver but NFH is abundant in the sensory proprioceptive neurons, brain and spinal cord and NFH is present in the heart. Scn8a is a 470 nucleotide promoter which expresses throughout the DRG, spinal cord and brain with particularly high expression seen in the hippocampal neurons and cerebellar Purkinje cells, cortex, thalamus and hypothalamus (See e.g., Drews t al. Identification of evolutionary conserved, functional noncoding elements in the promoter region of the sodium channel gene SCN8A, Mamm Genome (2007) 18:723-731; and Raymond et al. Expression of Alternatively Spliced Sodium Channel α-subunit genes, Journal of Biological Chemistry (2004) 279(44) 46234-46241, the contents of each of which are herein incorporated by reference in their entireties).

[0288] Any of promoters taught by the aforementioned Yu, Soderblom, Gill, Husain, Passini, Xu, Drews or Raymond may be used in the present inventions.

[0289] In one embodiment, the promoter is not cell specific.

[0290] In one embodiment, the promoter is an ubiquitin c (UBC) promoter. The UBC promoter may have a size of 300-350 nucleotides. As a non-limiting example, the UBC promoter is 332 nucleotides.

[0291] In one embodiment, the promoter is a β-glucuronidase (GUSB) promoter. The GUSB promoter may have a size of 350-400 nucleotides. As a non-limiting example, the GUSB promoter is 378 nucleotides.

[0292] In one embodiment, the promoter is a neurofilament light (NFL) promoter. The NFL promoter may have a size of 600-700 nucleotides. As a non-limiting example, the NFL promoter is 650 nucleotides. As a non-limiting example, the construct may be AAV-promoter-CMV/globin intron-modulatory polynucleotide-RBG, where the AAV may be self-complementary and the AAV may be the DJ serotype.

[0293] In one embodiment, the promoter is a neurofilament heavy (NFH) promoter. The NFH promoter may have a size of 900-950 nucleotides. As a non-limiting example, the NFH promoter is 920 nucleotides. As a non-limiting example, the construct may be AAV-promoter-CMV/globin intron-modulatory polynucleotide-RBG, where the AAV may be self-complementary and the AAV may be the DJ serotype.

[0294] In one embodiment, the promoter is a scn8a promoter. The scn8a promoter may have a size of 450-500 nucleotides. As a non-limiting example, the scn8a promoter is 470 nucleotides. As a non-limiting example, the construct may be AAV-promoter-CMV/globin intron-modulatory polynucleotide-RBG, where the AAV may be self-complementary and the AAV may be the DJ serotype

[0295] In one embodiment, the viral genome comprises a Pol III promoter.

[0296] In one embodiment, the viral genome comprises a P1 promoter.

[0297] In one embodiment, the viral genome comprises a FXN promoter.

[0298] In one embodiment, the promoter is a phosphoglycerate kinase 1 (PGK) promoter.

[0299] In one embodiment, the promoter is a chicken β-actin (CBA) promoter.

[0300] In one embodiment, the promoter is a CAG promoter which is a construct comprising the cytomegalovirus (CMV) enhancer fused to the chicken beta-actin (CBA) promoter.

[0301] In one embodiment, the promoter is a cytomegalovirus (CMV) promoter.

[0302] In one embodiment, the viral genome comprises a Pol III promoter, for example, a Pol III type 3 promoter.

[0303] In one embodiment, comprises an U3, U6, U7, 7SK, H1, or MRP, EBER, seleno-cysteine tRNA, 7SL, adenovirus VA-1, or telomerase gene promoter.

[0304] In one embodiment, the viral genome comprises an H1 promoter.

[0305] In one embodiment, the viral genome comprises a U6 promoter.

[0306] In one embodiment, the promoter is a liver or a skeletal muscle promoter. Non-limiting examples of liver promoters include human α-1-antitrypsin (hAAT) and thyroxine binding globulin (TBG). Non-limiting examples of skeletal muscle promoters include Desmin, MCK or synthetic C5-12.

[0307] In one embodiment, the promoter is a RNA pol III promoter. As a non-limiting example, the RNA pol III promoter is U6. As a non-limiting example, the RNA pol III promoter is H1.

[0308] In one embodiment, the promoter is a RNA Pol II promoter, including, for example, a truncated RNA Pol II promoter.

[0309] In one embodiment, the viral genome comprises two promoters. As a non-limiting example, the promoters are an EF1α promoter and a CMV promoter.

[0310] In one embodiment, the viral genome comprises an enhancer element, a promoter and/or a 5′UTR intron. The enhancer element, also referred to herein as an “enhancer,” may be, but is not limited to, a CMV enhancer, the promoter may be, but is not limited to, a CMV, CBA, UBC, GUSB, NSE, Synapsin, MeCP2, and GFAP promoter and the 5′UTR/intron may be, but is not limited to, SV40, and CBA-MVM. As a non-limiting example, the enhancer, promoter and/or intron used in combination may be: (1) CMV enhancer, CMV promoter. SV40 5′UTR intron; (2) CMV enhancer, CBA promoter, SV 40 5′UTR intron; (3) CMV enhancer, CBA promoter, CBA-MVM 5′UTR intron; (4) UBC promoter; (5) GUSB promoter; (6) NSE promoter; (7) Synapsin promoter; (8) MeCP2 promoter, (9) GFAP promoter, (10) H1 promoter; and (11) U6 promoter.

[0311] In one embodiment, the viral genome comprises an engineered promoter.

[0312] In another embodiment the viral genome comprises a promoter from a naturally expressed protein.

### Viral Genome Component: Untranslated Regions (UTRs)

[0313] By definition, wild type untranslated regions (UTRs) of a gene are transcribed but not translated. Generally, the 5′ UTR starts at the transcription start site and ends at the start codon and the 3′ UTR starts immediately following the stop codon and continues until the termination signal for transcription.

[0314] Features typically found in abundantly expressed genes of specific target organs may be engineered into UTRs to enhance the stability and protein production. As a non-limiting example, a 5′ UTR from mRNA normally expressed in the liver (e.g., albumin, serum amyloid A, Apolipoprotein A/B/E, transferrin, alpha fetoprotein, erythropoietin, or Factor VIII) may be used in the viral genomes of the AAV particles of the invention to enhance expression in hepatic cell lines or liver.

[0315] While not wishing to be bound by theory, wild-type 5′ untranslated regions (UTRs) include features which play roles in translation initiation. Kozak sequences, which are commonly known to be involved in the process by which the ribosome initiates translation of many genes, are usually included in 5′ UTRs. Kozak sequences have the consensus CCR(A/G)CCAUGG, where R is a purine (adenine or guanine) three bases upstream of the start codon (ATG), which is followed by another ‘G’.

[0316] In one embodiment, the 5′UTR in the viral genome includes a Kozak sequence.

[0317] In one embodiment, the 5′UTR in the viral genome does not include a Kozak sequence.

[0318] While not wishing to be bound by theory, wild-type 3′ UTRs are known to have stretches of Adenosines and Uridines embedded therein. These AU rich signatures are particularly prevalent in genes with high rates of turnover. Based on their sequence features and functional properties, the AU rich elements (AREs) can be separated into three classes (Chen et al, 1995, the contents of which are herein incorporated by reference in its entirety): Class I AREs, such as, but not limited to, c-Myc and MyoD, contain several dispersed copies of an AUUUA motif within U-rich regions. Class II AREs, such as, but not limited to, GM-CSF and TNF-α, possess two or more overlapping UUAUUUA(U/A)(U/A) nonamers. Class III ARES, such as, but not limited to, c-Jun and Myogenin, are less well defined. These U rich regions do not contain an AUUUA motif. Most proteins binding to the AREs are known to destabilize the messenger, whereas members of the ELAV family, most notably HuR, have been documented to increase the stability of mRNA. HuR binds to AREs of all the three classes. Engineering the HuR specific binding sites into the 3′ UTR of nucleic acid molecules will lead to HuR binding and thus, stabilization of the message in vivo.

[0319] Introduction, removal or modification of 3′ UTR AU rich elements (AREs) can be used to modulate the stability of polynucleotides. When engineering specific polynucleotides, e.g., payload regions of viral genomes, one or more copies of an ARE can be introduced to make polynucleotides less stable and thereby curtail translation and decrease production of the resultant protein. Likewise, AREs can be identified and removed or mutated to increase the intracellular stability and thus increase translation and production of the resultant protein.

[0320] In one embodiment, the 3′ UTR of the viral genome may include an oligo(dT) sequence for templated addition of a poly-A tail.

[0321] In one embodiment, the viral genome may include at least one miRNA seed, binding site or full sequence. microRNAs (or miRNA or miR) are 19-25 nucleotide noncoding RNAs that bind to the sites of nucleic acid targets and down-regulate gene expression either by reducing nucleic acid molecule stability or by inhibiting translation. A microRNA sequence comprises a “seed” region, i.e., a sequence in the region of positions 2-8 of the mature microRNA, which sequence has perfect Watson-Crick complementarity to the miRNA target sequence of the nucleic acid.

[0322] In one embodiment, the viral genome may be engineered to include, alter or remove at least one miRNA binding site, sequence or seed region.

[0323] Any UTR from any gene known in the art may be incorporated into the viral genome of the AAV particle. These UTRs, or portions thereof, may be placed in the same orientation as in the gene from which they were selected or they may be altered in orientation or location. In one embodiment, the UTR used in the viral genome of the AAV particle may be inverted, shortened, lengthened, made with one or more other 5′ UTRs or 3′ UTRs known in the art. As used herein, the term “altered” as it relates to a UTR, means that the UTR has been changed in some way in relation to a reference sequence. For example, a 3′ or 5′ UTR may be altered relative to a wild type or native UTR by the change in orientation or location as taught above or may be altered by the inclusion of additional nucleotides, deletion of nucleotides, swapping or transposition of nucleotides.

[0324] In one embodiment, the viral genome of the AAV particle comprises at least one artificial UTRs which is not a variant of a wild type UTR.

[0325] In one embodiment, the viral genome of the AAV particle comprises UTRs which have been selected from a family of transcripts whose proteins share a common function, structure, feature or property.

### Viral Genome Component: Polyadenylation Sequence

[0326] In one embodiment, the viral genome of the AAV particles of the present invention comprise at least one polyadenylation sequence. The viral genome of the AAV particle may comprise a polyadenylation sequence between the 3′ end of the payload coding sequence and the 5′ end of the 3′ITR.

[0327] In one embodiment, the polyadenylation sequence or “polyA sequence” may range from absent to about 500 nucleotides in length. The polyadenylation sequence may be, but is not limited to, 1, 2, 3, 4, 5, 6, 7, 8, 9, 10, 11, 12, 13, 14, 15, 16, 17, 18, 19, 20, 21, 22, 23, 24, 25, 26, 27, 28, 29, 30, 31, 32, 33, 34, 35, 36, 37, 38, 39, 40, 41, 42, 43, 44, 45, 46, 47, 48, 49, 50, 51, 52, 53, 54, 55, 56, 57, 58, 59, 60, 61, 62, 63, 64, 65, 66, 67, 68, 69, 70, 71, 72, 73, 74, 75, 76, 77, 78, 79, 80, 81, 82, 83, 84, 85, 86, 87, 88, 89, 90, 91, 92, 93, 94, 95, 96, 97, 98, 99, 100, 101, 102, 103, 104, 105, 106, 107, 108, 109, 110, 111, 112, 113, 114, 115, 116, 117, 118, 119, 120, 121, 122, 123, 124, 125, 126, 127, 128, 129, 130, 131, 132, 133, 134, 135, 136, 137, 138, 139, 140, 141, 142, 143, 144, 145, 146, 147, 148, 149, 150, 151, 152, 153, 154, 155, 156, 157, 158, 159, 160, 161, 162, 163, 164, 165, 166, 167, 168, 169, 170, 171, 172, 173, 174, 175, 176, 177, 178, 179, 180, 181, 182, 183, 184, 185, 186, 187, 188, 189, 190, 191, 192, 193, 194, 195, 196, 197, 198, 199, 200, 201, 202, 203, 204, 205, 206, 207, 208, 209, 210, 211, 212, 213, 214, 215, 216, 217, 218, 219, 220, 221, 222, 223, 224, 225, 226, 227, 228, 229, 230, 231, 232, 233, 234, 235, 236, 237, 238, 239, 240, 241, 242, 243, 244, 245, 246, 247, 248, 249, 250, 251, 252, 253, 254, 255, 256, 257, 258, 259, 260, 261, 262, 263, 264, 265, 266, 267, 268, 269, 270, 271, 272, 273, 274, 275, 276, 277, 278, 279, 280, 281, 282, 283, 284, 285, 286, 287, 288, 289, 290, 291, 292, 293, 294, 295, 296, 297, 298, 299, 300, 301, 302, 303, 304, 305, 306, 307, 308, 309, 310, 311, 312, 313, 314, 315, 316, 317, 318, 319, 320, 321, 322, 323, 324, 325, 326, 327, 328, 329, 330, 331, 332, 333, 334, 335, 336, 337, 338, 339, 340, 341, 342, 343, 344, 345, 346, 347, 348, 349, 350, 351, 352, 353, 354, 355, 356, 357, 358, 359, 360, 361, 362, 363, 364, 365, 366, 367, 368, 369, 370, 371, 372, 373, 374, 375, 376, 377, 378, 379, 380, 381, 382, 383, 384, 385, 386, 387, 388, 389, 390, 391, 392, 393, 394, 395, 396, 397, 398, 399, 400, 401, 402, 403, 404, 405, 406, 407, 408, 409, 410, 411, 412, 413, 414, 415, 416, 417, 418, 419, 420, 421, 422, 423, 424, 425, 426, 427, 428, 429, 430, 431, 432, 433, 434, 435, 436, 437, 438, 439, 440, 441, 442, 443, 444, 445, 446, 447, 448, 449, 450, 451, 452, 453, 454, 455, 456, 457, 458, 459, 460, 461, 462, 463, 464, 465, 466, 467, 468, 469, 470, 471, 472, 473, 474, 475, 476, 477, 478, 479, 480, 481, 482, 483, 484, 485, 486, 487, 488, 489, 490, 491, 492, 493, 494, 495, 496, 497, 498, 499, and 500 nucleotides in length.

[0328] In one embodiment, the polyadenylation sequence is 50-100 nucleotides in length.

[0329] In one embodiment, the polyadenylation sequence is 50-150 nucleotides in length.

[0330] In one embodiment, the polyadenylation sequence is 50-160 nucleotides in length.

[0331] In one embodiment, the polyadenylation sequence is 50-200 nucleotides in length.

[0332] In one embodiment, the polyadenylation sequence is 60-100 nucleotides in length.

[0333] In one embodiment, the polyadenylation sequence is 60-150 nucleotides in length.

[0334] In one embodiment, the polyadenylation sequence is 60-160 nucleotides in length.

[0335] In one embodiment, the polyadenylation sequence is 60-200 nucleotides in length.

[0336] In one embodiment, the polyadenylation sequence is 70-100 nucleotides in length.

[0337] In one embodiment, the polyadenylation sequence is 70-150 nucleotides in length.

[0338] In one embodiment, the polyadenylation sequence is 70-160 nucleotides in length.

[0339] In one embodiment, the polyadenylation sequence is 70-200 nucleotides in length.

[0340] In one embodiment, the polyadenylation sequence is 80-100 nucleotides in length.

[0341] In one embodiment, the polyadenylation sequence is 80-150 nucleotides in length.

[0342] In one embodiment, the polyadenylation sequence is 80-160 nucleotides in length.

[0343] In one embodiment, the polyadenylation sequence is 80-200 nucleotides in length.

[0344] In one embodiment, the polyadenylation sequence is 90-100 nucleotides in length.

[0345] In one embodiment, the polyadenylation sequence is 90-150 nucleotides in length.

[0346] In one embodiment, the polyadenylation sequence is 90-160 nucleotides in length.

[0347] In one embodiment, the polyadenylation sequence is 90-200 nucleotides in length.

[0348] In one embodiment, the AAV particle comprises a nucleic acid sequence encoding an siRNA molecule may be located upstream of the polyadenylation sequence in an expression vector. Further, the AAV particle comprises a nucleic acid sequence encoding an siRNA molecule may be located downstream of a promoter such as, but not limited to, CMV, U6, CAG, CBA or a CBA promoter with a SV40 intron or a human betaglobin intron in an expression vector. As a non-limiting example, the AAV particle comprises a nucleic acid sequence encoding an siRNA molecule may be located within 1, 2, 3, 4, 5, 6, 7, 8, 9, 10, 11, 12, 13, 14, 15, 16, 17, 18, 19, 20, 21, 22, 23, 24, 25, 26, 27, 28, 29, 30 or more than 30 nucleotides downstream from the promoter and/or upstream of the polyadenylation sequence in an expression vector. As another non-limiting example, the AAV particle comprises a nucleic acid sequence encoding an siRNA molecule may be located within 1-5, 1-10, 1-15, 1-20, 1-25, 1-30, 5-10, 5-15, 5-20, 5-25, 5-30, 10-15, 10-20, 10-25, 10-30, 15-20, 15-25, 15-30, 20-25, 20-30 or 25-30 nucleotides downstream from the promoter and/or upstream of the polyadenylation sequence in an expression vector. As a non-limiting example, the AAV particle comprises a nucleic acid sequence encoding an siRNA molecule may be located within the first 1%, 2%, 3%, 4%, 5%, 6%, 7%, 8%, 9%, 10%, 15%, 20%, 25% or more than 25% of the nucleotides downstream from the promoter and/or upstream of the polyadenylation sequence in an expression vector. As another non-limiting example, the AAV particle comprises a nucleic acid sequence encoding an siRNA molecule may be located with the first 1-5%, 1-10%, 1-15%, 1-20%, 1-25%, 5-10%, 5-15%, 5-20%, 5-25%, 10-15%, 10-20%, 10-25%, 15-20%, 15-25%, or 20-25% downstream from the promoter and/or upstream of the polyadenylation sequence in an expression vector.

[0349] In one embodiment, the AAV particle comprises a rabbit globin polyadenylation (polyA) signal sequence.

[0350] In one embodiment, the AAV particle comprises a human growth hormone polyadenylation (polyA) signal sequence.

### Viral Genome Component: Introns

[0351] In one embodiment, the payload region comprises at least one element to enhance the expression such as one or more introns or portions thereof. Non-limiting examples of introns include, MVM (67-97 bps), F.IX truncated intron 1 (300 bps), β-globin SD/immunoglobulin heavy chain splice acceptor (250 bps), adenovirus splice donor/immunoglobin splice acceptor (500 bps), SV40 late splice donor/splice acceptor (19S/16S) (180 bps) and hybrid adenovirus splice donor/IgG splice acceptor (230 bps).

[0352] In one embodiment, the intron or intron portion may be 100-500 nucleotides in length. The intron may have a length of 80, 90, 100, 110, 120, 130, 140, 150, 160, 170, 171, 172, 173, 174, 175, 176, 177, 178, 179, 180, 190, 200, 210, 220, 230, 240, 250, 260, 270, 280, 290, 300, 310, 320, 330, 340, 350, 360, 370, 380, 390, 400, 410, 420, 430, 440, 450, 460, 470, 480, 490 or 500. The intron may have a length between 80-100, 80-120, 80-140, 80-160, 80-180, 80-200, 80-250, 80-300, 80-350, 80-400, 80-450, 80-500, 200-300, 200-400, 200-500, 300-400, 300-500, or 400-500.

[0353] In one embodiment, the AAV viral genome may comprise a promoter such as, but not limited to, CMV or U6. As a non-limiting example, the promoter for the AAV comprising the nucleic acid sequence for the siRNA molecules of the present invention is a CMV promoter. As another non-limiting example, the promoter for the AAV comprising the nucleic acid sequence for the siRNA molecules of the present invention is a U6 promoter.

[0354] In one embodiment, the AAV viral genome may comprise a CMV promoter.

[0355] In one embodiment, the AAV viral genome may comprise a U6 promoter.

[0356] In one embodiment, the AAV viral genome may comprise a CMV and a U6 promoter.

[0357] In one embodiment, the AAV viral genome may comprise a Pol III promoter.

[0358] In one embodiment, the AAV viral genome may comprise a Pol III type 3 promoter.

[0359] In one embodiment, the AAV viral genome may comprise a H1 promoter.

[0360] In one embodiment, the AAV viral genome may comprise a U6 promoter.

[0361] In one embodiment, the AAV viral genome may comprise a CBA promoter.

[0362] In one embodiment, the encoded siRNA molecule may be located downstream of a promoter in an expression vector such as, but not limited to, CMV, U6, H1, CBA, CAG, or a CBA promoter with an intron such as SV40 or others known in the art. Further, the encoded siRNA molecule may also be located upstream of the polyadenylation sequence in an expression vector. As a non-limiting example, the encoded siRNA molecule may be located within 1, 2, 3, 4, 5, 6, 7, 8, 9, 10, 11, 12, 13, 14, 15, 16, 17, 18, 19, 20, 21, 22, 23, 24, 25, 26, 27, 28, 29, 30 or more than 30 nucleotides downstream from the promoter and/or upstream of the polyadenylation sequence in an expression vector. As another non-limiting example, the encoded siRNA molecule may be located within 1-5, 1-10, 1-15, 1-20, 1-25, 1-30, 5-10, 5-15, 5-20, 5-25, 5-30, 10-15, 10-20, 10-25, 10-30, 15-20, 15-25, 15-30, 20-25, 20-30 or 25-30 nucleotides downstream from the promoter and/or upstream of the polyadenylation sequence in an expression vector. As a non-limiting example, the encoded siRNA molecule may be located within the first 1%, 2%, 3%, 4%, 5%, 6%, 7%, 8%, 9%, 10%, 15%, 20%, 25% or more than 25% of the nucleotides downstream from the promoter and/or upstream of the polyadenylation sequence in an expression vector. As another non-limiting example, the encoded siRNA molecule may be located with the first 1-5%, 1-10%, 1-15%, 1-20%, 1-25%, 5-10%, 5-15%, 5-20%, 5-25%, 10-15%, 10-20%, 10-25%, 15-20%, 15-25%, or 20-25% downstream from the promoter and/or upstream of the polyadenylation sequence in an expression vector.

### Viral Genome Component: Filler Sequence

[0363] In one embodiment, the viral genome comprises one or more filler sequences.

[0364] In one embodiment, the viral genome comprises one or more filler sequences in order to have the length of the viral genome be the optimal size for packaging. As a non-limiting example, the viral genome comprises at least one filler sequence in order to have the length of the viral genome be about 2.3 kb. As a non-limiting example, the viral genome comprises at least one filler sequence in order to have the length of the viral genome be about 4.6 kb.

[0365] In one embodiment, the viral genome comprises one or more filler sequences in order to reduce the likelihood that a hairpin structure of the vector genome (e.g., a modulatory polynucleotide described herein) may be read as an inverted terminal repeat (ITR) during expression and/or packaging. As a non-limiting example, the viral genome comprises at least one filler sequence in order to have the length of the viral genome be about 2.3 kb. As a non-limiting example, the viral genome comprises at least one filler sequence in order to have the length of the viral genome be about 4.6 kb

[0366] In one embodiment, the viral genome is a single stranded (ss) viral genome and comprises one or more filler sequences which have a length about between 0.1 kb-3.8 kb, such as, but not limited to, 0.1 kb, 0.2 kb, 0.3 kb, 0.4 kb, 0.5 kb, 0.6 kb, 0.7 kb, 0.8 kb, 0.9 kb, 1 kb, 1.1 kb, 1.2 kb, 1.3 kb, 1.4 kb, 1.5 kb, 1.6 kb, 1.7 kb, 1.8 kb, 1.9 kb, 2 kb, 2.1 kb, 2.2 kb, 2.3 kb, 2.4 kb, 2.5 kb, 2.6 kb, 2.7 kb, 2.8 kb, 2.9 kb, 3 kb, 3.1 kb, 3.2 kb, 3.3 kb, 3.4 kb, 3.5 kb, 3.6 kb, 3.7 kb, or 3.8 kb. As a non-limiting example, the total length filler sequence in the vector genome is 3.1 kb. As a non-limiting example, the total length filler sequence in the vector genome is 2.7 kb. As a non-limiting example, the total length filler sequence in the vector genome is 0.8 kb. As a non-limiting example, the total length filler sequence in the vector genome is 0.4 kb. As a non-limiting example, the length of each filler sequence in the vector genome is 0.8 kb. As a non-limiting example, the length of each filler sequence in the vector genome is 0.4 kb.

[0367] In one embodiment, the viral genome is a self-complementary (sc) viral genome and comprises one or more filler sequences which have a length about between 0.1 kb-1.5 kb, such as, but not limited to, 0.1 kb, 0.2 kb, 0.3 kb, 0.4 kb, 0.5 kb, 0.6 kb, 0.7 kb, 0.8 kb, 0.9 kb, 1 kb, 1.1 kb, 1.2 kb, 1.3 kb, 1.4 kb, or 1.5 kb. As a non-limiting example, the total length filler sequence in the vector genome is 0.8 kb. As a non-limiting example, the total length filler sequence in the vector genome is 0.4 kb. As a non-limiting example, the length of each filler sequence in the vector genome is 0.8 kb. As a non-limiting example, the length of each filler sequence in the vector genome is 0.4 kb

[0368] In one embodiment, the viral genome comprises any portion of a filler sequence. The viral genome may comprise 1%, 2%, 3%, 4%, 5%, 6%, 7%, 8%, 9%, 10%, 15%, 20%, 25%, 30%, 35%, 40%, 45%, 50%, 55%, 60%, 65%, 70%, 75%, 80%, 85%, 90%, 95%, or 99% of a filler sequence.

[0369] In one embodiment, the viral genome is a single stranded (ss) viral genome and comprises one or more filler sequences in order to have the length of the viral genome be about 4.6 kb. As a non-limiting example, the viral genome comprises at least one filler sequence and the filler sequence is located 3′ to the 5′ ITR sequence. As a non-limiting example, the viral genome comprises at least one filler sequence and the filler sequence is located 5′ to a promoter sequence. As a non-limiting example, the viral genome comprises at least one filler sequence and the filler sequence is located 3′ to the polyadenylation signal sequence. As a non-limiting example, the viral genome comprises at least one filler sequence and the filler sequence is located 5′ to the 3′ ITR sequence. As a non-limiting example, the viral genome comprises at least one filler sequence, and the filler sequence is located between two intron sequences. As a non-limiting example, the viral genome comprises at least one filler sequence, and the filler sequence is located within an intron sequence. As a non-limiting example, the viral genome comprises two filler sequences, and the first filler sequence is located 3′ to the 5′ ITR sequence and the second filler sequence is located 3′ to the polyadenylation signal sequence. As a non-limiting example, the viral genome comprises two filler sequences, and the first filler sequence is located 5′ to a promoter sequence and the second filler sequence is located 3′ to the polyadenylation signal sequence. As a non-limiting example, the viral genome comprises two filler sequences, and the first filler sequence is located 3′ to the 5′ ITR sequence and the second filler sequence is located 5′ to the 5′ ITR sequence.

[0370] In one embodiment, the viral genome is a self-complementary (sc) viral genome and comprises one or more filler sequences in order to have the length of the viral genome be about 2.3 kb. As a non-limiting example, the viral genome comprises at least one filler sequence and the filler sequence is located 3′ to the 5′ ITR sequence. As a non-limiting example, the viral genome comprises at least one filler sequence and the filler sequence is located 5′ to a promoter sequence. As a non-limiting example, the viral genome comprises at least one filler sequence and the filler sequence is located 3′ to the polyadenylation signal sequence. As a non-limiting example, the viral genome comprises at least one filler sequence and the filler sequence is located 5′ to the 3′ ITR sequence. As a non-limiting example, the viral genome comprises at least one filler sequence, and the filler sequence is located between two intron sequences. As a non-limiting example, the viral genome comprises at least one filler sequence, and the filler sequence is located within an intron sequence. As a non-limiting example, the viral genome comprises two filler sequences, and the first filler sequence is located 3′ to the 5′ ITR sequence and the second filler sequence is located 3′ to the polyadenylation signal sequence. As a non-limiting example, the viral genome comprises two filler sequences, and the first filler sequence is located 5′ to a promoter sequence and the second filler sequence is located 3′ to the polyadenylation signal sequence. As a non-limiting example, the viral genome comprises two filler sequences, and the first filler sequence is located 3′ to the 5′ ITR sequence and the second filler sequence is located 5′ to the 5′ ITR sequence.

[0371] In one embodiment, the viral genome may comprise one or more filler sequences between one of more regions of the viral genome. In one embodiment, the filler region may be located before a region such as, but not limited to, a payload region, an inverted terminal repeat (ITR), a promoter region, an intron region, an enhancer region, a polyadenylation signal sequence region, a multiple cloning site (MCS) region, and/or an exon region. In one embodiment, the filler region may be located after a region such as, but not limited to, a payload region, an inverted terminal repeat (ITR), a promoter region, an intron region, an enhancer region, a polyadenylation signal sequence region, a multiple cloning site (MCS) region, and/or an exon region. In one embodiment, the filler region may be located before and after a region such as, but not limited to, a payload region, an inverted terminal repeat (ITR), a promoter region, an intron region, an enhancer region, a polyadenylation signal sequence region, a multiple cloning site (MCS) region, and/or an exon region.

[0372] In one embodiment, the viral genome may comprise one or more filler sequences which bifurcates at least one region of the viral genome. The bifurcated region of the viral genome may comprise 1%, 2%, 3%, 4%, 5%, 6%, 7%, 8%, 9%, 100%, 15%, 20%, 25%, 30%, 35%, 40%, 45%, 50%, 55%, 60%, 65%, 70%, 75%, 80%, 85%, 90%, 95%, or 99% of the of the region to the 5′ of the filler sequence region. As a non-limiting example, the filler sequence may bifurcate at least one region so that 10% of the region is located 5′ to the filler sequence and 90% of the region is located 3′ to the filler sequence. As a non-limiting example, the filler sequence may bifurcate at least one region so that 20% of the region is located 5′ to the filler sequence and 80% of the region is located 3′ to the filler sequence. As a non-limiting example, the filler sequence may bifurcate at least one region so that 30% of the region is located 5′ to the filler sequence and 70% of the region is located 3′ to the filler sequence. As a non-limiting example, the filler sequence may bifurcate at least one region so that 40% of the region is located 5′ to the filler sequence and 60% of the region is located 3′ to the filler sequence. As a non-limiting example, the filler sequence may bifurcate at least one region so that 50% of the region is located 5′ to the filler sequence and 50% of the region is located 3′ to the filler sequence. As a non-limiting example, the filler sequence may bifurcate at least one region so that 60% of the region is located 5′ to the filler sequence and 40% of the region is located 3′ to the filler sequence. As a non-limiting example, the filler sequence may bifurcate at least one region so that 70% of the region is located 5′ to the filler sequence and 30% of the region is located 3′ to the filler sequence. As a non-limiting example, the filler sequence may bifurcate at least one region so that 80% of the region is located 5′ to the filler sequence and 20% of the region is located 3′ to the filler sequence. As a non-limiting example, the filler sequence may bifurcate at least one region so that 90% of the region is located 5′ to the filler sequence and 10% of the region is located 3′ to the filler sequence.

[0373] In one embodiment, the viral genome comprises a filler sequence after the 5′ ITR.

[0374] In one embodiment, the viral genome comprises a filler sequence after the promoter region. In one embodiment, the viral genome comprises a filler sequence after the payload region. In one embodiment, the viral genome comprises a filler sequence after the intron region. In one embodiment, the viral genome comprises a filler sequence after the enhancer region. In one embodiment, the viral genome comprises a filler sequence after the polyadenylation signal sequence region. In one embodiment, the viral genome comprises a filler sequence after the MCS region. In one embodiment, the viral genome comprises a filler sequence after the exon region.

[0375] In one embodiment, the viral genome comprises a filler sequence before the promoter region. In one embodiment, the viral genome comprises a filler sequence before the payload region. In one embodiment, the viral genome comprises a filler sequence before the intron region. In one embodiment, the viral genome comprises a filler sequence before the enhancer region. In one embodiment, the viral genome comprises a filler sequence before the polyadenylation signal sequence region. In one embodiment, the viral genome comprises a filler sequence before the MCS region. In one embodiment, the viral genome comprises a filler sequence before the exon region.

[0376] In one embodiment, the viral genome comprises a filler sequence before the 3′ ITR.

[0377] In one embodiment, a filler sequence may be located between two regions, such as, but not limited to, the 5′ ITR and the promoter region. In one embodiment, a filler sequence may be located between two regions, such as, but not limited to, the 5′ ITR and the payload region. In one embodiment, a filler sequence may be located between two regions, such as, but not limited to, the 5′ ITR and the intron region. In one embodiment, a filler sequence may be located between two regions, such as, but not limited to, the 5′ ITR and the enhancer region. In one embodiment, a filler sequence may be located between two regions, such as, but not limited to, the 5′ ITR and the polyadenylation signal sequence region. In one embodiment, a filler sequence may be located between two regions, such as, but not limited to, the 5′ ITR and the MCS region.

[0378] In one embodiment, a filler sequence may be located between two regions, such as, but not limited to, the 5′ ITR and the exon region.

[0379] In one embodiment, a filler sequence may be located between two regions, such as, but not limited to, the promoter region and the payload region. In one embodiment, a filler sequence may be located between two regions, such as, but not limited to, the promoter region and the intron region. In one embodiment, a filler sequence may be located between two regions, such as, but not limited to, the promoter region and the enhancer region. In one embodiment, a filler sequence may be located between two regions, such as, but not limited to, the promoter region and the polyadenylation signal sequence region. In one embodiment, a filler sequence may be located between two regions, such as, but not limited to, the promoter region and the MCS region. In one embodiment, a filler sequence may be located between two regions, such as, but not limited to, the promoter region and the exon region. In one embodiment, a filler sequence may be located between two regions, such as, but not limited to, the promoter region and the 3′ ITR.

[0380] In one embodiment, a filler sequence may be located between two regions, such as, but not limited to, the payload region and the intron region. In one embodiment, a filler sequence may be located between two regions, such as, but not limited to, the payload region and the enhancer region. In one embodiment, a filler sequence may be located between two regions, such as, but not limited to, the payload region and the polyadenylation signal sequence region. In one embodiment, a filler sequence may be located between two regions, such as, but not limited to, the payload region and the MCS region. In one embodiment, a filler sequence may be located between two regions, such as, but not limited to, the payload region and the exon region.

[0381] In one embodiment, a filler sequence may be located between two regions, such as, but not limited to, the payload region and the 3′ ITR.

[0382] In one embodiment, a filler sequence may be located between two regions, such as, but not limited to, the intron region and the enhancer region. In one embodiment, a filler sequence may be located between two regions, such as, but not limited to, the intron region and the polyadenylation signal sequence region. In one embodiment, a filler sequence may be located between two regions, such as, but not limited to, the intron region and the MCS region. In one embodiment, a filler sequence may be located between two regions, such as, but not limited to, the intron region and the exon region. In one embodiment, a filler sequence may be located between two regions, such as, but not limited to, the intron region and the 3′ ITR. In one embodiment, a filler sequence may be located between two regions, such as, but not limited to, the enhancer region and the polyadenylation signal sequence region. In one embodiment, a filler sequence may be located between two regions, such as, but not limited to, the enhancer region and the MCS region. In one embodiment, a filler sequence may be located between two regions, such as, but not limited to, the enhancer region and the exon region. In one embodiment, a filler sequence may be located between two regions, such as, but not limited to, the enhancer region and the 3′ ITR.

[0383] In one embodiment, a filler sequence may be located between two regions, such as, but not limited to, the polyadenylation signal sequence region and the MCS region. In one embodiment, a filler sequence may be located between two regions, such as, but not limited to, the polyadenylation signal sequence region and the exon region. In one embodiment, a filler sequence may be located between two regions, such as, but not limited to, the polyadenylation signal sequence region and the 3′ ITR.

[0384] In one embodiment, a filler sequence may be located between two regions, such as, but not limited to, the MCS region and the exon region. In one embodiment, a filler sequence may be located between two regions, such as, but not limited to, the MCS region and the 3′ ITR.

[0385] In one embodiment, a filler sequence may be located between two regions, such as, but not limited to, the exon region and the 3′ ITR.

[0386] In one embodiment, a viral genome may comprise two filler sequences, the first filler sequence may be located between the 5′ ITR and promoter region, and the second filler sequence may be located between the promoter region and payload region. In one embodiment, a viral genome may comprise two filler sequences, the first filler sequence may be located between the 5′ ITR and promoter region, and the second filler sequence may be located between the promoter region and intron region. In one embodiment, a viral genome may comprise two filler sequences, the first filler sequence may be located between the 5′ ITR and promoter region, and the second filler sequence may be located between the promoter region and enhancer region. In one embodiment, a viral genome may comprise two filler sequences, the first filler sequence may be located between the 5′ ITR and promoter region, and the second filler sequence may be located between the promoter region and polyadenylation signal sequence region. In one embodiment, a viral genome may comprise two filler sequences, the first filler sequence may be located between the 5′ ITR and promoter region, and the second filler sequence may be located between the promoter region and MCS region. In one embodiment, a viral genome may comprise two filler sequences, the first filler sequence may be located between the 5′ ITR and promoter region, and the second filler sequence may be located between the promoter region and exon region. In one embodiment, a viral genome may comprise two filler sequences, the first filler sequence may be located between the 5′ ITR and promoter region, and the second filler sequence may be located between the promoter region and 3′ ITR. In one embodiment, a viral genome may comprise two filler sequences, the first filler sequence may be located between the 5′ ITR and promoter region, and the second filler sequence may be located between the payload region and intron region. In one embodiment, a viral genome may comprise two filler sequences, the first filler sequence may be located between the 5′ ITR and promoter region, and the second filler sequence may be located between the payload region and enhancer region. In one embodiment, a viral genome may comprise two filler sequences, the first filler sequence may be located between the 5′ ITR and promoter region, and the second filler sequence may be located between the payload region and polyadenylation signal sequence region. In one embodiment, a viral genome may comprise two filler sequences, the first filler sequence may be located between the 5′ ITR and promoter region, and the second filler sequence may be located between the payload region and MCS region. In one embodiment, a viral genome may comprise two filler sequences, the first filler sequence may be located between the 5′ ITR and promoter region, and the second filler sequence may be located between the payload region and exon region. In one embodiment, a viral genome may comprise two filler sequences, the first filler sequence may be located between the 5′ ITR and promoter region, and the second filler sequence may be located between the payload region and 3′ ITR. In one embodiment, a viral genome may comprise two filler sequences, the first filler sequence may be located between the 5′ ITR and promoter region, and the second filler sequence may be located between the intron region and enhancer region. In one embodiment, a viral genome may comprise two filler sequences, the first filler sequence may be located between the 5′ ITR and promoter region, and the second filler sequence may be located between the intron region and polyadenylation signal sequence region. In one embodiment, a viral genome may comprise two filler sequences, the first filler sequence may be located between the 5′ ITR and promoter region, and the second filler sequence may be located between the intron region and MCS region. In one embodiment, a viral genome may comprise two filler sequences, the first filler sequence may be located between the 5′ ITR and promoter region, and the second filler sequence may be located between the intron region and exon region. In one embodiment, a viral genome may comprise two filler sequences, the first filler sequence may be located between the 5′ ITR and promoter region, and the second filler sequence may be located between the intron region and 3′ ITR. In one embodiment, a viral genome may comprise two filler sequences, the first filler sequence may be located between the 5′ ITR and promoter region, and the second filler sequence may be located between the enhancer region and polyadenylation signal sequence region. In one embodiment, a viral genome may comprise two filler sequences, the first filler sequence may be located between the 5′ ITR and promoter region, and the second filler sequence may be located between the enhancer region and MCS region. In one embodiment, a viral genome may comprise two filler sequences, the first filler sequence may be located between the 5′ ITR and promoter region, and the second filler sequence may be located between the enhancer region and exon region. In one embodiment, a viral genome may comprise two filler sequences, the first filler sequence may be located between the 5′ ITR and promoter region, and the second filler sequence may be located between the enhancer region and 3′ ITR. In one embodiment, a viral genome may comprise two filler sequences, the first filler sequence may be located between the 5′ ITR and promoter region, and the second filler sequence may be located between the polyadenylation signal sequence region and MCS region. In one embodiment, a viral genome may comprise two filler sequences, the first filler sequence may be located between the 5′ ITR and promoter region, and the second filler sequence may be located between the polyadenylation signal sequence region and exon region. In one embodiment, a viral genome may comprise two filler sequences, the first filler sequence may be located between the 5′ ITR and promoter region, and the second filler sequence may be located between the polyadenylation signal sequence region and 3′ ITR. In one embodiment, a viral genome may comprise two filler sequences, the first filler sequence may be located between the 5′ ITR and promoter region, and the second filler sequence may be located between the MCS region and exon region. In one embodiment, a viral genome may comprise two filler sequences, the first filler sequence may be located between the 5′ ITR and promoter region, and the second filler sequence may be located between the MCS region and 3′ ITR. In one embodiment, a viral genome may comprise two filler sequences, the first filler sequence may be located between the 5′ ITR and promoter region, and the second filler sequence may be located between the exon region and 3′ ITR.

[0387] In one embodiment, a viral genome may comprise two filler sequences, the first filler sequence may be located between the 5′ ITR and payload region, and the second filler sequence may be located between the promoter region and payload region. In one embodiment, a viral genome may comprise two filler sequences, the first filler sequence may be located between the 5′ ITR and payload region, and the second filler sequence may be located between the promoter region and intron region. In one embodiment, a viral genome may comprise two filler sequences, the first filler sequence may be located between the 5′ ITR and payload region, and the second filler sequence may be located between the promoter region and enhancer region. In one embodiment, a viral genome may comprise two filler sequences, the first filler sequence may be located between the 5′ ITR and payload region, and the second filler sequence may be located between the promoter region and polyadenylation signal sequence region. In one embodiment, a viral genome may comprise two filler sequences, the first filler sequence may be located between the 5′ ITR and payload region, and the second filler sequence may be located between the promoter region and MCS region. In one embodiment, a viral genome may comprise two filler sequences, the first filler sequence may be located between the 5′ ITR and payload region, and the second filler sequence may be located between the promoter region and exon region. In one embodiment, a viral genome may comprise two filler sequences, the first filler sequence may be located between the 5′ ITR and payload region, and the second filler sequence may be located between the promoter region and 3′ ITR. In one embodiment, a viral genome may comprise two filler sequences, the first filler sequence may be located between the 5′ ITR and payload region, and the second filler sequence may be located between the payload region and intron region. In one embodiment, a viral genome may comprise two filler sequences, the first filler sequence may be located between the 5′ ITR and payload region, and the second filler sequence may be located between the payload region and enhancer region. In one embodiment, a viral genome may comprise two filler sequences, the first filler sequence may be located between the 5′ ITR and payload region, and the second filler sequence may be located between the payload region and polyadenylation signal sequence region. In one embodiment, a viral genome may comprise two filler sequences, the first filler sequence may be located between the 5′ ITR and payload region, and the second filler sequence may be located between the payload region and MCS region. In one embodiment, a viral genome may comprise two filler sequences, the first filler sequence may be located between the 5′ ITR and payload region, and the second filler sequence may be located between the payload region and exon region. In one embodiment, a viral genome may comprise two filler sequences, the first filler sequence may be located between the 5′ ITR and payload region, and the second filler sequence may be located between the payload region and 3′ ITR. In one embodiment, a viral genome may comprise two filler sequences, the first filler sequence may be located between the 5′ ITR and payload region, and the second filler sequence may be located between the intron region and enhancer region. In one embodiment, a viral genome may comprise two filler sequences, the first filler sequence may be located between the 5′ ITR and payload region, and the second filler sequence may be located between the intron region and polyadenylation signal sequence region. In one embodiment, a viral genome may comprise two filler sequences, the first filler sequence may be located between the 5′ ITR and payload region, and the second filler sequence may be located between the intron region and MCS region. In one embodiment, a viral genome may comprise two filler sequences, the first filler sequence may be located between the 5′ ITR and payload region, and the second filler sequence may be located between the intron region and exon region. In one embodiment, a viral genome may comprise two filler sequences, the first filler sequence may be located between the 5′ ITR and payload region, and the second filler sequence may be located between the intron region and 3′ ITR. In one embodiment, a viral genome may comprise two filler sequences, the first filler sequence may be located between the 5′ ITR and payload region, and the second filler sequence may be located between the enhancer region and polyadenylation signal sequence region. In one embodiment, a viral genome may comprise two filler sequences, the first filler sequence may be located between the 5′ ITR and payload region, and the second filler sequence may be located between the enhancer region and MCS region. In one embodiment, a viral genome may comprise two filler sequences, the first filler sequence may be located between the 5′ ITR and payload region, and the second filler sequence may be located between the enhancer region and exon region. In one embodiment, a viral genome may comprise two filler sequences, the first filler sequence may be located between the 5′ ITR and payload region, and the second filler sequence may be located between the enhancer region and 3′ ITR. In one embodiment, a viral genome may comprise two filler sequences, the first filler sequence may be located between the 5′ ITR and payload region, and the second filler sequence may be located between the polyadenylation signal sequence region and MCS region. In one embodiment, a viral genome may comprise two filler sequences, the first filler sequence may be located between the 5′ ITR and payload region, and the second filler sequence may be located between the polyadenylation signal sequence region and exon region. In one embodiment, a viral genome may comprise two filler sequences, the first filler sequence may be located between the 5′ ITR and payload region, and the second filler sequence may be located between the polyadenylation signal sequence region and 3′ ITR. In one embodiment, a viral genome may comprise two filler sequences, the first filler sequence may be located between the 5′ ITR and payload region, and the second filler sequence may be located between the MCS region and exon region. In one embodiment, a viral genome may comprise two filler sequences, the first filler sequence may be located between the 5′ ITR and payload region, and the second filler sequence may be located between the MCS region and 3′ ITR. In one embodiment, a viral genome may comprise two filler sequences, the first filler sequence may be located between the 5′ ITR and payload region, and the second filler sequence may be located between the exon region and 3′ ITR.

[0388] In one embodiment, a viral genome may comprise two filler sequences, the first filler sequence may be located between the 5′ ITR and intron region, and the second filler sequence may be located between the promoter region and payload region. In one embodiment, a viral genome may comprise two filler sequences, the first filler sequence may be located between the 5′ ITR and intron region, and the second filler sequence may be located between the promoter region and intron region. In one embodiment, a viral genome may comprise two filler sequences, the first filler sequence may be located between the 5′ ITR and intron region, and the second filler sequence may be located between the promoter region and enhancer region. In one embodiment, a viral genome may comprise two filler sequences, the first filler sequence may be located between the 5′ ITR and intron region, and the second filler sequence may be located between the promoter region and polyadenylation signal sequence region. In one embodiment, a viral genome may comprise two filler sequences, the first filler sequence may be located between the 5′ ITR and intron region, and the second filler sequence may be located between the promoter region and MCS region. In one embodiment, a viral genome may comprise two filler sequences, the first filler sequence may be located between the 5′ ITR and intron region, and the second filler sequence may be located between the promoter region and exon region. In one embodiment, a viral genome may comprise two filler sequences, the first filler sequence may be located between the 5′ ITR and intron region, and the second filler sequence may be located between the promoter region and 3′ ITR. In one embodiment, a viral genome may comprise two filler sequences, the first filler sequence may be located between the 5′ ITR and intron region, and the second filler sequence may be located between the payload region and intron region. In one embodiment, a viral genome may comprise two filler sequences, the first filler sequence may be located between the 5′ ITR and intron region, and the second filler sequence may be located between the payload region and enhancer region. In one embodiment, a viral genome may comprise two filler sequences, the first filler sequence may be located between the 5′ ITR and intron region, and the second filler sequence may be located between the payload region and polyadenylation signal sequence region. In one embodiment, a viral genome may comprise two filler sequences, the first filler sequence may be located between the 5′ ITR and intron region, and the second filler sequence may be located between the payload region and MCS region. In one embodiment, a viral genome may comprise two filler sequences, the first filler sequence may be located between the 5′ ITR and intron region, and the second filler sequence may be located between the payload region and exon region. In one embodiment, a viral genome may comprise two filler sequences, the first filler sequence may be located between the 5′ ITR and intron region, and the second filler sequence may be located between the payload region and 3′ ITR. In one embodiment, a viral genome may comprise two filler sequences, the first filler sequence may be located between the 5′ ITR and intron region, and the second filler sequence may be located between the intron region and enhancer region. In one embodiment, a viral genome may comprise two filler sequences, the first filler sequence may be located between the 5′ ITR and intron region, and the second filler sequence may be located between the intron region and polyadenylation signal sequence region. In one embodiment, a viral genome may comprise two filler sequences, the first filler sequence may be located between the 5′ ITR and intron region, and the second filler sequence may be located between the intron region and MCS region. In one embodiment, a viral genome may comprise two filler sequences, the first filler sequence may be located between the 5′ ITR and intron region, and the second filler sequence may be located between the intron region and exon region. In one embodiment, a viral genome may comprise two filler sequences, the first filler sequence may be located between the 5′ ITR and intron region, and the second filler sequence may be located between the intron region and 3′ ITR. In one embodiment, a viral genome may comprise two filler sequences, the first filler sequence may be located between the 5′ ITR and intron region, and the second filler sequence may be located between the enhancer region and polyadenylation signal sequence region. In one embodiment, a viral genome may comprise two filler sequences, the first filler sequence may be located between the 5′ ITR and intron region, and the second filler sequence may be located between the enhancer region and MCS region. In one embodiment, a viral genome may comprise two filler sequences, the first filler sequence may be located between the 5′ ITR and intron region, and the second filler sequence may be located between the enhancer region and exon region. In one embodiment, a viral genome may comprise two filler sequences, the first filler sequence may be located between the 5′ ITR and intron region, and the second filler sequence may be located between the enhancer region and 3′ ITR. In one embodiment, a viral genome may comprise two filler sequences, the first filler sequence may be located between the 5′ ITR and intron region, and the second filler sequence may be located between the polyadenylation signal sequence region and MCS region. In one embodiment, a viral genome may comprise two filler sequences, the first filler sequence may be located between the 5′ ITR and intron region, and the second filler sequence may be located between the polyadenylation signal sequence region and exon region. In one embodiment, a viral genome may comprise two filler sequences, the first filler sequence may be located between the 5′ ITR and intron region, and the second filler sequence may be located between the polyadenylation signal sequence region and 3′ ITR. In one embodiment, a viral genome may comprise two filler sequences, the first filler sequence may be located between the 5′ ITR and intron region, and the second filler sequence may be located between the MCS region and exon region. In one embodiment, a viral genome may comprise two filler sequences, the first filler sequence may be located between the 5′ ITR and intron region, and the second filler sequence may be located between the MCS region and 3′ ITR. In one embodiment, a viral genome may comprise two filler sequences, the first filler sequence may be located between the 5′ ITR and intron region, and the second filler sequence may be located between the exon region and 3′ ITR.

[0389] In one embodiment, a viral genome may comprise two filler sequences, the first filler sequence may be located between the 5′ ITR and enhancer region, and the second filler sequence may be located between the promoter region and payload region. In one embodiment, a viral genome may comprise two filler sequences, the first filler sequence may be located between the 5′ ITR and enhancer region, and the second filler sequence may be located between the promoter region and intron region. In one embodiment, a viral genome may comprise two filler sequences, the first filler sequence may be located between the 5′ ITR and enhancer region, and the second filler sequence may be located between the promoter region and enhancer region. In one embodiment, a viral genome may comprise two filler sequences, the first filler sequence may be located between the 5′ ITR and enhancer region, and the second filler sequence may be located between the promoter region and polyadenylation signal sequence region. In one embodiment, a viral genome may comprise two filler sequences, the first filler sequence may be located between the 5′ ITR and enhancer region, and the second filler sequence may be located between the promoter region and MCS region. In one embodiment, a viral genome may comprise two filler sequences, the first filler sequence may be located between the 5′ ITR and enhancer region, and the second filler sequence may be located between the promoter region and exon region. In one embodiment, a viral genome may comprise two filler sequences, the first filler sequence may be located between the 5′ ITR and enhancer region, and the second filler sequence may be located between the promoter region and 3′ ITR. In one embodiment, a viral genome may comprise two filler sequences, the first filler sequence may be located between the 5′ ITR and enhancer region, and the second filler sequence may be located between the payload region and intron region. In one embodiment, a viral genome may comprise two filler sequences, the first filler sequence may be located between the 5′ ITR and enhancer region, and the second filler sequence may be located between the payload region and enhancer region. In one embodiment, a viral genome may comprise two filler sequences, the first filler sequence may be located between the 5′ ITR and enhancer region, and the second filler sequence may be located between the payload region and polyadenylation signal sequence region. In one embodiment, a viral genome may comprise two filler sequences, the first filler sequence may be located between the 5′ ITR and enhancer region, and the second filler sequence may be located between the payload region and MCS region. In one embodiment, a viral genome may comprise two filler sequences, the first filler sequence may be located between the 5′ ITR and enhancer region, and the second filler sequence may be located between the payload region and exon region. In one embodiment, a viral genome may comprise two filler sequences, the first filler sequence may be located between the 5′ ITR and enhancer region, and the second filler sequence may be located between the payload region and 3′ ITR. In one embodiment, a viral genome may comprise two filler sequences, the first filler sequence may be located between the 5′ ITR and enhancer region, and the second filler sequence may be located between the intron region and enhancer region. In one embodiment, a viral genome may comprise two filler sequences, the first filler sequence may be located between the 5′ ITR and enhancer region, and the second filler sequence may be located between the intron region and polyadenylation signal sequence region. In one embodiment, a viral genome may comprise two filler sequences, the first filler sequence may be located between the 5′ ITR and enhancer region, and the second filler sequence may be located between the intron region and MCS region. In one embodiment, a viral genome may comprise two filler sequences, the first filler sequence may be located between the 5′ ITR and enhancer region, and the second filler sequence may be located between the intron region and exon region. In one embodiment, a viral genome may comprise two filler sequences, the first filler sequence may be located between the 5′ ITR and enhancer region, and the second filler sequence may be located between the intron region and 3′ ITR. In one embodiment, a viral genome may comprise two filler sequences, the first filler sequence may be located between the 5′ ITR and enhancer region, and the second filler sequence may be located between the enhancer region and polyadenylation signal sequence region. In one embodiment, a viral genome may comprise two filler sequences, the first filler sequence may be located between the 5′ ITR and enhancer region, and the second filler sequence may be located between the enhancer region and MCS region. In one embodiment, a viral genome may comprise two filler sequences, the first filler sequence may be located between the 5′ ITR and enhancer region, and the second filler sequence may be located between the enhancer region and exon region. In one embodiment, a viral genome may comprise two filler sequences, the first filler sequence may be located between the 5′ ITR and enhancer region, and the second filler sequence may be located between the enhancer region and 3′ ITR. In one embodiment, a viral genome may comprise two filler sequences, the first filler sequence may be located between the 5′ ITR and enhancer region, and the second filler sequence may be located between the polyadenylation signal sequence region and MCS region. In one embodiment, a viral genome may comprise two filler sequences, the first filler sequence may be located between the 5′ ITR and enhancer region, and the second filler sequence may be located between the polyadenylation signal sequence region and exon region. In one embodiment, a viral genome may comprise two filler sequences, the first filler sequence may be located between the 5′ ITR and enhancer region, and the second filler sequence may be located between the polyadenylation signal sequence region and 3′ ITR. In one embodiment, a viral genome may comprise two filler sequences, the first filler sequence may be located between the 5′ ITR and enhancer region, and the second filler sequence may be located between the MCS region and exon region. In one embodiment, a viral genome may comprise two filler sequences, the first filler sequence may be located between the 5′ ITR and enhancer region, and the second filler sequence may be located between the MCS region and 3′ ITR. In one embodiment, a viral genome may comprise two filler sequences, the first filler sequence may be located between the 5′ ITR and enhancer region, and the second filler sequence may be located between the exon region and 3′ ITR.

[0390] In one embodiment, a viral genome may comprise two filler sequences, the first filler sequence may be located between the 5′ ITR and polyadenylation signal sequence region, and the second filler sequence may be located between the promoter region and payload region. In one embodiment, a viral genome may comprise two filler sequences, the first filler sequence may be located between the 5′ ITR and polyadenylation signal sequence region, and the second filler sequence may be located between the promoter region and intron region. In one embodiment, a viral genome may comprise two filler sequences, the first filler sequence may be located between the 5′ ITR and polyadenylation signal sequence region, and the second filler sequence may be located between the promoter region and enhancer region. In one embodiment, a viral genome may comprise two filler sequences, the first filler sequence may be located between the 5′ ITR and polyadenylation signal sequence region, and the second filler sequence may be located between the promoter region and polyadenylation signal sequence region. In one embodiment, a viral genome may comprise two filler sequences, the first filler sequence may be located between the 5′ ITR and polyadenylation signal sequence region, and the second filler sequence may be located between the promoter region and MCS region. In one embodiment, a viral genome may comprise two filler sequences, the first filler sequence may be located between the 5′ ITR and polyadenylation signal sequence region, and the second filler sequence may be located between the promoter region and exon region. In one embodiment, a viral genome may comprise two filler sequences, the first filler sequence may be located between the 5′ ITR and polyadenylation signal sequence region, and the second filler sequence may be located between the promoter region and 3′ ITR. In one embodiment, a viral genome may comprise two filler sequences, the first filler sequence may be located between the 5′ ITR and polyadenylation signal sequence region, and the second filler sequence may be located between the payload region and intron region. In one embodiment, a viral genome may comprise two filler sequences, the first filler sequence may be located between the 5′ ITR and polyadenylation signal sequence region, and the second filler sequence may be located between the payload region and enhancer region. In one embodiment, a viral genome may comprise two filler sequences, the first filler sequence may be located between the 5′ ITR and polyadenylation signal sequence region, and the second filler sequence may be located between the payload region and polyadenylation signal sequence region. In one embodiment, a viral genome may comprise two filler sequences, the first filler sequence may be located between the 5′ ITR and polyadenylation signal sequence region, and the second filler sequence may be located between the payload region and MCS region. In one embodiment, a viral genome may comprise two filler sequences, the first filler sequence may be located between the 5′ ITR and polyadenylation signal sequence region, and the second filler sequence may be located between the payload region and exon region. In one embodiment, a viral genome may comprise two filler sequences, the first filler sequence may be located between the 5′ ITR and polyadenylation signal sequence region, and the second filler sequence may be located between the payload region and 3′ ITR. In one embodiment, a viral genome may comprise two filler sequences, the first filler sequence may be located between the 5′ ITR and polyadenylation signal sequence region, and the second filler sequence may be located between the intron region and enhancer region. In one embodiment, a viral genome may comprise two filler sequences, the first filler sequence may be located between the 5′ ITR and polyadenylation signal sequence region, and the second filler sequence may be located between the intron region and polyadenylation signal sequence region. In one embodiment, a viral genome may comprise two filler sequences, the first filler sequence may be located between the 5′ ITR and polyadenylation signal sequence region, and the second filler sequence may be located between the intron region and MCS region. In one embodiment, a viral genome may comprise two filler sequences, the first filler sequence may be located between the 5′ ITR and polyadenylation signal sequence region, and the second filler sequence may be located between the intron region and exon region. In one embodiment, a viral genome may comprise two filler sequences, the first filler sequence may be located between the 5′ ITR and polyadenylation signal sequence region, and the second filler sequence may be located between the intron region and 3′ ITR. In one embodiment, a viral genome may comprise two filler sequences, the first filler sequence may be located between the 5′ ITR and polyadenylation signal sequence region, and the second filler sequence may be located between the enhancer region and polyadenylation signal sequence region. In one embodiment, a viral genome may comprise two filler sequences, the first filler sequence may be located between the 5′ ITR and polyadenylation signal sequence region, and the second filler sequence may be located between the enhancer region and MCS region. In one embodiment, a viral genome may comprise two filler sequences, the first filler sequence may be located between the 5′ ITR and polyadenylation signal sequence region, and the second filler sequence may be located between the enhancer region and exon region. In one embodiment, a viral genome may comprise two filler sequences, the first filler sequence may be located between the 5′ ITR and polyadenylation signal sequence region, and the second filler sequence may be located between the enhancer region and 3′ ITR. In one embodiment, a viral genome may comprise two filler sequences, the first filler sequence may be located between the 5′ ITR and polyadenylation signal sequence region, and the second filler sequence may be located between the polyadenylation signal sequence region and MCS region. In one embodiment, a viral genome may comprise two filler sequences, the first filler sequence may be located between the 5′ ITR and polyadenylation signal sequence region, and the second filler sequence may be located between the polyadenylation signal sequence region and exon region. In one embodiment, a viral genome may comprise two filler sequences, the first filler sequence may be located between the 5′ ITR and polyadenylation signal sequence region, and the second filler sequence may be located between the polyadenylation signal sequence region and 3′ ITR. In one embodiment, a viral genome may comprise two filler sequences, the first filler sequence may be located between the 5′ ITR and polyadenylation signal sequence region, and the second filler sequence may be located between the MCS region and exon region. In one embodiment, a viral genome may comprise two filler sequences, the first filler sequence may be located between the 5′ ITR and polyadenylation signal sequence region, and the second filler sequence may be located between the MCS region and 3′ ITR. In one embodiment, a viral genome may comprise two filler sequences, the first filler sequence may be located between the 5′ ITR and polyadenylation signal sequence region, and the second filler sequence may be located between the exon region and 3′ ITR.

[0391] In one embodiment, a viral genome may comprise two filler sequences, the first filler sequence may be located between the 5′ ITR and MCS region, and the second filler sequence may be located between the promoter region and payload region. In one embodiment, a viral genome may comprise two filler sequences, the first filler sequence may be located between the 5′ ITR and MCS region, and the second filler sequence may be located between the promoter region and intron region. In one embodiment, a viral genome may comprise two filler sequences, the first filler sequence may be located between the 5′ ITR and MCS region, and the second filler sequence may be located between the promoter region and enhancer region. In one embodiment, a viral genome may comprise two filler sequences, the first filler sequence may be located between the 5′ ITR and MCS region, and the second filler sequence may be located between the promoter region and polyadenylation signal sequence region. In one embodiment, a viral genome may comprise two filler sequences, the first filler sequence may be located between the 5′ ITR and MCS region, and the second filler sequence may be located between the promoter region and MCS region. In one embodiment, a viral genome may comprise two filler sequences, the first filler sequence may be located between the 5′ ITR and MCS region, and the second filler sequence may be located between the promoter region and exon region. In one embodiment, a viral genome may comprise two filler sequences, the first filler sequence may be located between the 5′ ITR and MCS region, and the second filler sequence may be located between the promoter region and 3′ ITR. In one embodiment, a viral genome may comprise two filler sequences, the first filler sequence may be located between the 5′ ITR and MCS region, and the second filler sequence may be located between the payload region and intron region. In one embodiment, a viral genome may comprise two filler sequences, the first filler sequence may be located between the 5′ ITR and MCS region, and the second filler sequence may be located between the payload region and enhancer region. In one embodiment, a viral genome may comprise two filler sequences, the first filler sequence may be located between the 5′ ITR and MCS region, and the second filler sequence may be located between the payload region and polyadenylation signal sequence region. In one embodiment, a viral genome may comprise two filler sequences, the first filler sequence may be located between the 5′ ITR and MCS region, and the second filler sequence may be located between the payload region and MCS region. In one embodiment, a viral genome may comprise two filler sequences, the first filler sequence may be located between the 5′ ITR and MCS region, and the second filler sequence may be located between the payload region and exon region. In one embodiment, a viral genome may comprise two filler sequences, the first filler sequence may be located between the 5′ ITR and MCS region, and the second filler sequence may be located between the payload region and 3′ ITR. In one embodiment, a viral genome may comprise two filler sequences, the first filler sequence may be located between the 5′ ITR and MCS region, and the second filler sequence may be located between the intron region and enhancer region. In one embodiment, a viral genome may comprise two filler sequences, the first filler sequence may be located between the 5′ ITR and MCS region, and the second filler sequence may be located between the intron region and polyadenylation signal sequence region. In one embodiment, a viral genome may comprise two filler sequences, the first filler sequence may be located between the 5′ ITR and MCS region, and the second filler sequence may be located between the intron region and MCS region. In one embodiment, a viral genome may comprise two filler sequences, the first filler sequence may be located between the 5′ ITR and MCS region, and the second filler sequence may be located between the intron region and exon region. In one embodiment, a viral genome may comprise two filler sequences, the first filler sequence may be located between the 5′ ITR and MCS region, and the second filler sequence may be located between the intron region and 3′ ITR. In one embodiment, a viral genome may comprise two filler sequences, the first filler sequence may be located between the 5′ ITR and MCS region, and the second filler sequence may be located between the enhancer region and polyadenylation signal sequence region. In one embodiment, a viral genome may comprise two filler sequences, the first filler sequence may be located between the 5′ ITR and MCS region, and the second filler sequence may be located between the enhancer region and MCS region. In one embodiment, a viral genome may comprise two filler sequences, the first filler sequence may be located between the 5′ ITR and MCS region, and the second filler sequence may be located between the enhancer region and exon region. In one embodiment, a viral genome may comprise two filler sequences, the first filler sequence may be located between the 5′ ITR and MCS region, and the second filler sequence may be located between the enhancer region and 3′ ITR. In one embodiment, a viral genome may comprise two filler sequences, the first filler sequence may be located between the 5′ ITR and MCS region, and the second filler sequence may be located between the polyadenylation signal sequence region and MCS region. In one embodiment, a viral genome may comprise two filler sequences, the first filler sequence may be located between the 5′ ITR and MCS region, and the second filler sequence may be located between the polyadenylation signal sequence region and exon region. In one embodiment, a viral genome may comprise two filler sequences, the first filler sequence may be located between the 5′ ITR and MCS region, and the second filler sequence may be located between the polyadenylation signal sequence region and 3′ ITR. In one embodiment, a viral genome may comprise two filler sequences, the first filler sequence may be located between the 5′ ITR and MCS region, and the second filler sequence may be located between the MCS region and exon region. In one embodiment, a viral genome may comprise two filler sequences, the first filler sequence may be located between the 5′ ITR and MCS region, and the second filler sequence may be located between the MCS region and 3′ ITR. In one embodiment, a viral genome may comprise two filler sequences, the first filler sequence may be located between the 5′ ITR and MCS region, and the second filler sequence may be located between the exon region and 3′ ITR.

[0392] In one embodiment, a viral genome may comprise two filler sequences, the first filler sequence may be located between the 5′ ITR and exon region, and the second filler sequence may be located between the promoter region and payload region. In one embodiment, a viral genome may comprise two filler sequences, the first filler sequence may be located between the 5′ ITR and exon region, and the second filler sequence may be located between the promoter region and intron region. In one embodiment, a viral genome may comprise two filler sequences, the first filler sequence may be located between the 5′ ITR and exon region, and the second filler sequence may be located between the promoter region and enhancer region. In one embodiment, a viral genome may comprise two filler sequences, the first filler sequence may be located between the 5′ ITR and exon region, and the second filler sequence may be located between the promoter region and polyadenylation signal sequence region. In one embodiment, a viral genome may comprise two filler sequences, the first filler sequence may be located between the 5′ ITR and exon region, and the second filler sequence may be located between the promoter region and MCS region. In one embodiment, a viral genome may comprise two filler sequences, the first filler sequence may be located between the 5′ ITR and exon region, and the second filler sequence may be located between the promoter region and exon region. In one embodiment, a viral genome may comprise two filler sequences, the first filler sequence may be located between the 5′ ITR and exon region, and the second filler sequence may be located between the promoter region and 3′ ITR. In one embodiment, a viral genome may comprise two filler sequences, the first filler sequence may be located between the 5′ ITR and exon region, and the second filler sequence may be located between the payload region and intron region. In one embodiment, a viral genome may comprise two filler sequences, the first filler sequence may be located between the 5′ ITR and exon region, and the second filler sequence may be located between the payload region and enhancer region. In one embodiment, a viral genome may comprise two filler sequences, the first filler sequence may be located between the 5′ ITR and exon region, and the second filler sequence may be located between the payload region and polyadenylation signal sequence region. In one embodiment, a viral genome may comprise two filler sequences, the first filler sequence may be located between the 5′ ITR and exon region, and the second filler sequence may be located between the payload region and MCS region. In one embodiment, a viral genome may comprise two filler sequences, the first filler sequence may be located between the 5′ ITR and exon region, and the second filler sequence may be located between the payload region and exon region. In one embodiment, a viral genome may comprise two filler sequences, the first filler sequence may be located between the 5′ ITR and exon region, and the second filler sequence may be located between the payload region and 3′ ITR. In one embodiment, a viral genome may comprise two filler sequences, the first filler sequence may be located between the 5′ ITR and exon region, and the second filler sequence may be located between the intron region and enhancer region. In one embodiment, a viral genome may comprise two filler sequences, the first filler sequence may be located between the 5′ ITR and exon region, and the second filler sequence may be located between the intron region and polyadenylation signal sequence region. In one embodiment, a viral genome may comprise two filler sequences, the first filler sequence may be located between the 5′ ITR and exon region, and the second filler sequence may be located between the intron region and MCS region. In one embodiment, a viral genome may comprise two filler sequences, the first filler sequence may be located between the 5′ ITR and exon region, and the second filler sequence may be located between the intron region and exon region. In one embodiment, a viral genome may comprise two filler sequences, the first filler sequence may be located between the 5′ ITR and exon region, and the second filler sequence may be located between the intron region and 3′ ITR. In one embodiment, a viral genome may comprise two filler sequences, the first filler sequence may be located between the 5′ ITR and exon region, and the second filler sequence may be located between the enhancer region and polyadenylation signal sequence region. In one embodiment, a viral genome may comprise two filler sequences, the first filler sequence may be located between the 5′ ITR and exon region, and the second filler sequence may be located between the enhancer region and MCS region. In one embodiment, a viral genome may comprise two filler sequences, the first filler sequence may be located between the 5′ ITR and exon region, and the second filler sequence may be located between the enhancer region and exon region. In one embodiment, a viral genome may comprise two filler sequences, the first filler sequence may be located between the 5′ ITR and exon region, and the second filler sequence may be located between the enhancer region and 3′ ITR. In one embodiment, a viral genome may comprise two filler sequences, the first filler sequence may be located between the 5′ ITR and exon region, and the second filler sequence may be located between the polyadenylation signal sequence region and MCS region. In one embodiment, a viral genome may comprise two filler sequences, the first filler sequence may be located between the 5′ ITR and exon region, and the second filler sequence may be located between the polyadenylation signal sequence region and exon region. In one embodiment, a viral genome may comprise two filler sequences, the first filler sequence may be located between the 5′ ITR and exon region, and the second filler sequence may be located between the polyadenylation signal sequence region and 3′ ITR. In one embodiment, a viral genome may comprise two filler sequences, the first filler sequence may be located between the 5′ ITR and exon region, and the second filler sequence may be located between the MCS region and exon region. In one embodiment, a viral genome may comprise two filler sequences, the first filler sequence may be located between the 5′ ITR and exon region, and the second filler sequence may be located between the MCS region and 3′ ITR. In one embodiment, a viral genome may comprise two filler sequences, the first filler sequence may be located between the 5′ ITR and exon region, and the second filler sequence may be located between the exon region and 3′ ITR.

[0393] In one embodiment, a viral genome may comprise two filler sequences, the first filler sequence may be located between the promoter region and payload region, and the second filler sequence may be located between the payload region and intron region. In one embodiment, a viral genome may comprise two filler sequences, the first filler sequence may be located between the promoter region and payload region, and the second filler sequence may be located between the payload region and enhancer region. In one embodiment, a viral genome may comprise two filler sequences, the first filler sequence may be located between the promoter region and payload region, and the second filler sequence may be located between the payload region and polyadenylation signal sequence region. In one embodiment, a viral genome may comprise two filler sequences, the first filler sequence may be located between the promoter region and payload region, and the second filler sequence may be located between the payload region and MCS region. In one embodiment, a viral genome may comprise two filler sequences, the first filler sequence may be located between the promoter region and payload region, and the second filler sequence may be located between the payload region and exon region. In one embodiment, a viral genome may comprise two filler sequences, the first filler sequence may be located between the promoter region and payload region, and the second filler sequence may be located between the payload region and 3′ ITR. In one embodiment, a viral genome may comprise two filler sequences, the first filler sequence may be located between the promoter region and payload region, and the second filler sequence may be located between the intron region and enhancer region. In one embodiment, a viral genome may comprise two filler sequences, the first filler sequence may be located between the promoter region and payload region, and the second filler sequence may be located between the intron region and polyadenylation signal sequence region. In one embodiment, a viral genome may comprise two filler sequences, the first filler sequence may be located between the promoter region and payload region, and the second filler sequence may be located between the intron region and MCS region. In one embodiment, a viral genome may comprise two filler sequences, the first filler sequence may be located between the promoter region and payload region, and the second filler sequence may be located between the intron region and exon region. In one embodiment, a viral genome may comprise two filler sequences, the first filler sequence may be located between the promoter region and payload region, and the second filler sequence may be located between the intron region and 3′ ITR. In one embodiment, a viral genome may comprise two filler sequences, the first filler sequence may be located between the promoter region and payload region, and the second filler sequence may be located between the enhancer region and polyadenylation signal sequence region. In one embodiment, a viral genome may comprise two filler sequences, the first filler sequence may be located between the promoter region and payload region, and the second filler sequence may be located between the enhancer region and MCS region. In one embodiment, a viral genome may comprise two filler sequences, the first filler sequence may be located between the promoter region and payload region, and the second filler sequence may be located between the enhancer region and exon region. In one embodiment, a viral genome may comprise two filler sequences, the first filler sequence may be located between the promoter region and payload region, and the second filler sequence may be located between the enhancer region and 3′ ITR. In one embodiment, a viral genome may comprise two filler sequences, the first filler sequence may be located between the promoter region and payload region, and the second filler sequence may be located between the polyadenylation signal sequence region and MCS region. In one embodiment, a viral genome may comprise two filler sequences, the first filler sequence may be located between the promoter region and payload region, and the second filler sequence may be located between the polyadenylation signal sequence region and exon region. In one embodiment, a viral genome may comprise two filler sequences, the first filler sequence may be located between the promoter region and payload region, and the second filler sequence may be located between the polyadenylation signal sequence region and 3′ ITR. In one embodiment, a viral genome may comprise two filler sequences, the first filler sequence may be located between the promoter region and payload region, and the second filler sequence may be located between the MCS region and exon region. In one embodiment, a viral genome may comprise two filler sequences, the first filler sequence may be located between the promoter region and payload region, and the second filler sequence may be located between the MCS region and 3′ ITR. In one embodiment, a viral genome may comprise two filler sequences, the first filler sequence may be located between the promoter region and payload region, and the second filler sequence may be located between the exon region and 3′ ITR.

[0394] In one embodiment, a viral genome may comprise two filler sequences, the first filler sequence may be located between the promoter region and intron region, and the second filler sequence may be located between the payload region and intron region. In one embodiment, a viral genome may comprise two filler sequences, the first filler sequence may be located between the promoter region and intron region, and the second filler sequence may be located between the payload region and enhancer region. In one embodiment, a viral genome may comprise two filler sequences, the first filler sequence may be located between the promoter region and intron region, and the second filler sequence may be located between the payload region and polyadenylation signal sequence region. In one embodiment, a viral genome may comprise two filler sequences, the first filler sequence may be located between the promoter region and intron region, and the second filler sequence may be located between the payload region and MCS region. In one embodiment, a viral genome may comprise two filler sequences, the first filler sequence may be located between the promoter region and intron region, and the second filler sequence may be located between the payload region and exon region. In one embodiment, a viral genome may comprise two filler sequences, the first filler sequence may be located between the promoter region and intron region, and the second filler sequence may be located between the payload region and 3′ ITR. In one embodiment, a viral genome may comprise two filler sequences, the first filler sequence may be located between the promoter region and intron region, and the second filler sequence may be located between the intron region and enhancer region. In one embodiment, a viral genome may comprise two filler sequences, the first filler sequence may be located between the promoter region and intron region, and the second filler sequence may be located between the intron region and polyadenylation signal sequence region. In one embodiment, a viral genome may comprise two filler sequences, the first filler sequence may be located between the promoter region and intron region, and the second filler sequence may be located between the intron region and MCS region. In one embodiment, a viral genome may comprise two filler sequences, the first filler sequence may be located between the promoter region and intron region, and the second filler sequence may be located between the intron region and exon region. In one embodiment, a viral genome may comprise two filler sequences, the first filler sequence may be located between the promoter region and intron region, and the second filler sequence may be located between the intron region and 3′ ITR. In one embodiment, a viral genome may comprise two filler sequences, the first filler sequence may be located between the promoter region and intron region, and the second filler sequence may be located between the enhancer region and polyadenylation signal sequence region. In one embodiment, a viral genome may comprise two filler sequences, the first filler sequence may be located between the promoter region and intron region, and the second filler sequence may be located between the enhancer region and MCS region. In one embodiment, a viral genome may comprise two filler sequences, the first filler sequence may be located between the promoter region and intron region, and the second filler sequence may be located between the enhancer region and exon region. In one embodiment, a viral genome may comprise two filler sequences, the first filler sequence may be located between the promoter region and intron region, and the second filler sequence may be located between the enhancer region and 3′ ITR. In one embodiment, a viral genome may comprise two filler sequences, the first filler sequence may be located between the promoter region and intron region, and the second filler sequence may be located between the polyadenylation signal sequence region and MCS region. In one embodiment, a viral genome may comprise two filler sequences, the first filler sequence may be located between the promoter region and intron region, and the second filler sequence may be located between the polyadenylation signal sequence region and exon region. In one embodiment, a viral genome may comprise two filler sequences, the first filler sequence may be located between the promoter region and intron region, and the second filler sequence may be located between the polyadenylation signal sequence region and 3′ ITR. In one embodiment, a viral genome may comprise two filler sequences, the first filler sequence may be located between the promoter region and intron region, and the second filler sequence may be located between the MCS region and exon region. In one embodiment, a viral genome may comprise two filler sequences, the first filler sequence may be located between the promoter region and intron region, and the second filler sequence may be located between the MCS region and 3′ ITR. In one embodiment, a viral genome may comprise two filler sequences, the first filler sequence may be located between the promoter region and intron region, and the second filler sequence may be located between the exon region and 3′ ITR.

[0395] In one embodiment, a viral genome may comprise two filler sequences, the first filler sequence may be located between the promoter region and enhancer region, and the second filler sequence may be located between the payload region and intron region. In one embodiment, a viral genome may comprise two filler sequences, the first filler sequence may be located between the promoter region and enhancer region, and the second filler sequence may be located between the payload region and enhancer region. In one embodiment, a viral genome may comprise two filler sequences, the first filler sequence may be located between the promoter region and enhancer region, and the second filler sequence may be located between the payload region and polyadenylation signal sequence region. In one embodiment, a viral genome may comprise two filler sequences, the first filler sequence may be located between the promoter region and enhancer region, and the second filler sequence may be located between the payload region and MCS region. In one embodiment, a viral genome may comprise two filler sequences, the first filler sequence may be located between the promoter region and enhancer region, and the second filler sequence may be located between the payload region and exon region. In one embodiment, a viral genome may comprise two filler sequences, the first filler sequence may be located between the promoter region and enhancer region, and the second filler sequence may be located between the payload region and 3′ ITR. In one embodiment, a viral genome may comprise two filler sequences, the first filler sequence may be located between the promoter region and enhancer region, and the second filler sequence may be located between the intron region and enhancer region. In one embodiment, a viral genome may comprise two filler sequences, the first filler sequence may be located between the promoter region and enhancer region, and the second filler sequence may be located between the intron region and polyadenylation signal sequence region. In one embodiment, a viral genome may comprise two filler sequences, the first filler sequence may be located between the promoter region and enhancer region, and the second filler sequence may be located between the intron region and MCS region. In one embodiment, a viral genome may comprise two filler sequences, the first filler sequence may be located between the promoter region and enhancer region, and the second filler sequence may be located between the intron region and exon region. In one embodiment, a viral genome may comprise two filler sequences, the first filler sequence may be located between the promoter region and enhancer region, and the second filler sequence may be located between the intron region and 3′ ITR. In one embodiment, a viral genome may comprise two filler sequences, the first filler sequence may be located between the promoter region and enhancer region, and the second filler sequence may be located between the enhancer region and polyadenylation signal sequence region. In one embodiment, a viral genome may comprise two filler sequences, the first filler sequence may be located between the promoter region and enhancer region, and the second filler sequence may be located between the enhancer region and MCS region. In one embodiment, a viral genome may comprise two filler sequences, the first filler sequence may be located between the promoter region and enhancer region, and the second filler sequence may be located between the enhancer region and exon region. In one embodiment, a viral genome may comprise two filler sequences, the first filler sequence may be located between the promoter region and enhancer region, and the second filler sequence may be located between the enhancer region and 3′ ITR. In one embodiment, a viral genome may comprise two filler sequences, the first filler sequence may be located between the promoter region and enhancer region, and the second filler sequence may be located between the polyadenylation signal sequence region and MCS region. In one embodiment, a viral genome may comprise two filler sequences, the first filler sequence may be located between the promoter region and enhancer region, and the second filler sequence may be located between the polyadenylation signal sequence region and exon region. In one embodiment, a viral genome may comprise two filler sequences, the first filler sequence may be located between the promoter region and enhancer region, and the second filler sequence may be located between the polyadenylation signal sequence region and 3′ ITR. In one embodiment, a viral genome may comprise two filler sequences, the first filler sequence may be located between the promoter region and enhancer region, and the second filler sequence may be located between the MCS region and exon region. In one embodiment, a viral genome may comprise two filler sequences, the first filler sequence may be located between the promoter region and enhancer region, and the second filler sequence may be located between the MCS region and 3′ ITR. In one embodiment, a viral genome may comprise two filler sequences, the first filler sequence may be located between the promoter region and enhancer region, and the second filler sequence may be located between the exon region and 3′ ITR.

[0396] In one embodiment, a viral genome may comprise two filler sequences, the first filler sequence may be located between the promoter region and polyadenylation signal sequence region, and the second filler sequence may be located between the payload region and intron region. In one embodiment, a viral genome may comprise two filler sequences, the first filler sequence may be located between the promoter region and polyadenylation signal sequence region, and the second filler sequence may be located between the payload region and enhancer region. In one embodiment, a viral genome may comprise two filler sequences, the first filler sequence may be located between the promoter region and polyadenylation signal sequence region, and the second filler sequence may be located between the payload region and polyadenylation signal sequence region. In one embodiment, a viral genome may comprise two filler sequences, the first filler sequence may be located between the promoter region and polyadenylation signal sequence region, and the second filler sequence may be located between the payload region and MCS region. In one embodiment, a viral genome may comprise two filler sequences, the first filler sequence may be located between the promoter region and polyadenylation signal sequence region, and the second filler sequence may be located between the payload region and exon region. In one embodiment, a viral genome may comprise two filler sequences, the first filler sequence may be located between the promoter region and polyadenylation signal sequence region, and the second filler sequence may be located between the payload region and 3′ ITR. In one embodiment, a viral genome may comprise two filler sequences, the first filler sequence may be located between the promoter region and polyadenylation signal sequence region, and the second filler sequence may be located between the intron region and enhancer region. In one embodiment, a viral genome may comprise two filler sequences, the first filler sequence may be located between the promoter region and polyadenylation signal sequence region, and the second filler sequence may be located between the intron region and polyadenylation signal sequence region. In one embodiment, a viral genome may comprise two filler sequences, the first filler sequence may be located between the promoter region and polyadenylation signal sequence region, and the second filler sequence may be located between the intron region and MCS region. In one embodiment, a viral genome may comprise two filler sequences, the first filler sequence may be located between the promoter region and polyadenylation signal sequence region, and the second filler sequence may be located between the intron region and exon region. In one embodiment, a viral genome may comprise two filler sequences, the first filler sequence may be located between the promoter region and polyadenylation signal sequence region, and the second filler sequence may be located between the intron region and 3′ ITR. In one embodiment, a viral genome may comprise two filler sequences, the first filler sequence may be located between the promoter region and polyadenylation signal sequence region, and the second filler sequence may be located between the enhancer region and polyadenylation signal sequence region. In one embodiment, a viral genome may comprise two filler sequences, the first filler sequence may be located between the promoter region and polyadenylation signal sequence region, and the second filler sequence may be located between the enhancer region and MCS region. In one embodiment, a viral genome may comprise two filler sequences, the first filler sequence may be located between the promoter region and polyadenylation signal sequence region, and the second filler sequence may be located between the enhancer region and exon region. In one embodiment, a viral genome may comprise two filler sequences, the first filler sequence may be located between the promoter region and polyadenylation signal sequence region, and the second filler sequence may be located between the enhancer region and 3′ ITR. In one embodiment, a viral genome may comprise two filler sequences, the first filler sequence may be located between the promoter region and polyadenylation signal sequence region, and the second filler sequence may be located between the polyadenylation signal sequence region and MCS region. In one embodiment, a viral genome may comprise two filler sequences, the first filler sequence may be located between the promoter region and polyadenylation signal sequence region, and the second filler sequence may be located between the polyadenylation signal sequence region and exon region. In one embodiment, a viral genome may comprise two filler sequences, the first filler sequence may be located between the promoter region and polyadenylation signal sequence region, and the second filler sequence may be located between the polyadenylation signal sequence region and 3′ ITR. In one embodiment, a viral genome may comprise two filler sequences, the first filler sequence may be located between the promoter region and polyadenylation signal sequence region, and the second filler sequence may be located between the MCS region and exon region. In one embodiment, a viral genome may comprise two filler sequences, the first filler sequence may be located between the promoter region and polyadenylation signal sequence region, and the second filler sequence may be located between the MCS region and 3′ ITR. In one embodiment, a viral genome may comprise two filler sequences, the first filler sequence may be located between the promoter region and polyadenylation signal sequence region, and the second filler sequence may be located between the exon region and 3′ ITR.

[0397] In one embodiment, a viral genome may comprise two filler sequences, the first filler sequence may be located between the promoter region and exon region, and the second filler sequence may be located between the payload region and intron region. In one embodiment, a viral genome may comprise two filler sequences, the first filler sequence may be located between the promoter region and exon region, and the second filler sequence may be located between the payload region and enhancer region. In one embodiment, a viral genome may comprise two filler sequences, the first filler sequence may be located between the promoter region and exon region, and the second filler sequence may be located between the payload region and polyadenylation signal sequence region. In one embodiment, a viral genome may comprise two filler sequences, the first filler sequence may be located between the promoter region and exon region, and the second filler sequence may be located between the payload region and MCS region. In one embodiment, a viral genome may comprise two filler sequences, the first filler sequence may be located between the promoter region and exon region, and the second filler sequence may be located between the payload region and exon region. In one embodiment, a viral genome may comprise two filler sequences, the first filler sequence may be located between the promoter region and exon region, and the second filler sequence may be located between the payload region and 3′ ITR. In one embodiment, a viral genome may comprise two filler sequences, the first filler sequence may be located between the promoter region and exon region, and the second filler sequence may be located between the intron region and enhancer region. In one embodiment, a viral genome may comprise two filler sequences, the first filler sequence may be located between the promoter region and exon region, and the second filler sequence may be located between the intron region and polyadenylation signal sequence region. In one embodiment, a viral genome may comprise two filler sequences, the first filler sequence may be located between the promoter region and exon region, and the second filler sequence may be located between the intron region and MCS region. In one embodiment, a viral genome may comprise two filler sequences, the first filler sequence may be located between the promoter region and exon region, and the second filler sequence may be located between the intron region and exon region. In one embodiment, a viral genome may comprise two filler sequences, the first filler sequence may be located between the promoter region and exon region, and the second filler sequence may be located between the intron region and 3′ ITR. In one embodiment, a viral genome may comprise two filler sequences, the first filler sequence may be located between the promoter region and exon region, and the second filler sequence may be located between the enhancer region and polyadenylation signal sequence region. In one embodiment, a viral genome may comprise two filler sequences, the first filler sequence may be located between the promoter region and exon region, and the second filler sequence may be located between the enhancer region and MCS region. In one embodiment, a viral genome may comprise two filler sequences, the first filler sequence may be located between the promoter region and exon region, and the second filler sequence may be located between the enhancer region and exon region. In one embodiment, a viral genome may comprise two filler sequences, the first filler sequence may be located between the promoter region and exon region, and the second filler sequence may be located between the enhancer region and 3′ ITR. In one embodiment, a viral genome may comprise two filler sequences, the first filler sequence may be located between the promoter region and exon region, and the second filler sequence may be located between the polyadenylation signal sequence region and MCS region. In one embodiment, a viral genome may comprise two filler sequences, the first filler sequence may be located between the promoter region and exon region, and the second filler sequence may be located between the polyadenylation signal sequence region and exon region. In one embodiment, a viral genome may comprise two filler sequences, the first filler sequence may be located between the promoter region and exon region, and the second filler sequence may be located between the polyadenylation signal sequence region and 3′ ITR. In one embodiment, a viral genome may comprise two filler sequences, the first filler sequence may be located between the promoter region and exon region, and the second filler sequence may be located between the MCS region and exon region. In one embodiment, a viral genome may comprise two filler sequences, the first filler sequence may be located between the promoter region and exon region, and the second filler sequence may be located between the MCS region and 3′ ITR. In one embodiment, a viral genome may comprise two filler sequences, the first filler sequence may be located between the promoter region and exon region, and the second filler sequence may be located between the exon region and 3′ ITR.

[0398] In one embodiment, a viral genome may comprise two filler sequences, the first filler sequence may be located between the promoter region and MCS region, and the second filler sequence may be located between the payload region and intron region. In one embodiment, a viral genome may comprise two filler sequences, the first filler sequence may be located between the promoter region and MCS region, and the second filler sequence may be located between the payload region and enhancer region. In one embodiment, a viral genome may comprise two filler sequences, the first filler sequence may be located between the promoter region and MCS region, and the second filler sequence may be located between the payload region and polyadenylation signal sequence region. In one embodiment, a viral genome may comprise two filler sequences, the first filler sequence may be located between the promoter region and MCS region, and the second filler sequence may be located between the payload region and MCS region. In one embodiment, a viral genome may comprise two filler sequences, the first filler sequence may be located between the promoter region and MCS region, and the second filler sequence may be located between the payload region and exon region. In one embodiment, a viral genome may comprise two filler sequences, the first filler sequence may be located between the promoter region and MCS region, and the second filler sequence may be located between the payload region and 3′ ITR. In one embodiment, a viral genome may comprise two filler sequences, the first filler sequence may be located between the promoter region and MCS region, and the second filler sequence may be located between the intron region and enhancer region. In one embodiment, a viral genome may comprise two filler sequences, the first filler sequence may be located between the promoter region and MCS region, and the second filler sequence may be located between the intron region and polyadenylation signal sequence region. In one embodiment, a viral genome may comprise two filler sequences, the first filler sequence may be located between the promoter region and MCS region, and the second filler sequence may be located between the intron region and MCS region. In one embodiment, a viral genome may comprise two filler sequences, the first filler sequence may be located between the promoter region and MCS region, and the second filler sequence may be located between the intron region and exon region. In one embodiment, a viral genome may comprise two filler sequences, the first filler sequence may be located between the promoter region and MCS region, and the second filler sequence may be located between the intron region and 3′ ITR. In one embodiment, a viral genome may comprise two filler sequences, the first filler sequence may be located between the promoter region and MCS region, and the second filler sequence may be located between the enhancer region and polyadenylation signal sequence region. In one embodiment, a viral genome may comprise two filler sequences, the first filler sequence may be located between the promoter region and MCS region, and the second filler sequence may be located between the enhancer region and MCS region. In one embodiment, a viral genome may comprise two filler sequences, the first filler sequence may be located between the promoter region and MCS region, and the second filler sequence may be located between the enhancer region and exon region. In one embodiment, a viral genome may comprise two filler sequences, the first filler sequence may be located between the promoter region and MCS region, and the second filler sequence may be located between the enhancer region and 3′ ITR. In one embodiment, a viral genome may comprise two filler sequences, the first filler sequence may be located between the promoter region and MCS region, and the second filler sequence may be located between the polyadenylation signal sequence region and MCS region. In one embodiment, a viral genome may comprise two filler sequences, the first filler sequence may be located between the promoter region and MCS region, and the second filler sequence may be located between the polyadenylation signal sequence region and exon region. In one embodiment, a viral genome may comprise two filler sequences, the first filler sequence may be located between the promoter region and MCS region, and the second filler sequence may be located between the polyadenylation signal sequence region and 3′ ITR. In one embodiment, a viral genome may comprise two filler sequences, the first filler sequence may be located between the promoter region and MCS region, and the second filler sequence may be located between the MCS region and exon region. In one embodiment, a viral genome may comprise two filler sequences, the first filler sequence may be located between the promoter region and MCS region, and the second filler sequence may be located between the MCS region and 3′ ITR. In one embodiment, a viral genome may comprise two filler sequences, the first filler sequence may be located between the promoter region and MCS region, and the second filler sequence may be located between the exon region and 3′ ITR.

[0399] In one embodiment, a viral genome may comprise two filler sequences, the first filler sequence may be located between the promoter region and 3′ITR, and the second filler sequence may be located between the payload region and intron region. In one embodiment, a viral genome may comprise two filler sequences, the first filler sequence may be located between the promoter region and 3′ITR, and the second filler sequence may be located between the payload region and enhancer region. In one embodiment, a viral genome may comprise two filler sequences, the first filler sequence may be located between the promoter region and 3′ITR, and the second filler sequence may be located between the payload region and polyadenylation signal sequence region. In one embodiment, a viral genome may comprise two filler sequences, the first filler sequence may be located between the promoter region and 3′ITR, and the second filler sequence may be located between the payload region and MCS region. In one embodiment, a viral genome may comprise two filler sequences, the first filler sequence may be located between the promoter region and 3′ITR, and the second filler sequence may be located between the payload region and exon region. In one embodiment, a viral genome may comprise two filler sequences, the first filler sequence may be located between the promoter region and 3′ITR, and the second filler sequence may be located between the payload region and 3′ ITR. In one embodiment, a viral genome may comprise two filler sequences, the first filler sequence may be located between the promoter region and 3′ITR, and the second filler sequence may be located between the intron region and enhancer region. In one embodiment, a viral genome may comprise two filler sequences, the first filler sequence may be located between the promoter region and 3′ITR, and the second filler sequence may be located between the intron region and polyadenylation signal sequence region. In one embodiment, a viral genome may comprise two filler sequences, the first filler sequence may be located between the promoter region and 3′ITR, and the second filler sequence may be located between the intron region and MCS region. In one embodiment, a viral genome may comprise two filler sequences, the first filler sequence may be located between the promoter region and 3′ITR, and the second filler sequence may be located between the intron region and exon region. In one embodiment, a viral genome may comprise two filler sequences, the first filler sequence may be located between the promoter region and 3′ITR, and the second filler sequence may be located between the intron region and 3′ ITR. In one embodiment, a viral genome may comprise two filler sequences, the first filler sequence may be located between the promoter region and 3′ITR, and the second filler sequence may be located between the enhancer region and polyadenylation signal sequence region. In one embodiment, a viral genome may comprise two filler sequences, the first filler sequence may be located between the promoter region and 3′ITR, and the second filler sequence may be located between the enhancer region and MCS region. In one embodiment, a viral genome may comprise two filler sequences, the first filler sequence may be located between the promoter region and 3′ITR, and the second filler sequence may be located between the enhancer region and exon region. In one embodiment, a viral genome may comprise two filler sequences, the first filler sequence may be located between the promoter region and 3′ITR, and the second filler sequence may be located between the enhancer region and 3′ ITR. In one embodiment, a viral genome may comprise two filler sequences, the first filler sequence may be located between the promoter region and 3′ITR, and the second filler sequence may be located between the polyadenylation signal sequence region and MCS region. In one embodiment, a viral genome may comprise two filler sequences, the first filler sequence may be located between the promoter region and 3′ITR, and the second filler sequence may be located between the polyadenylation signal sequence region and exon region. In one embodiment, a viral genome may comprise two filler sequences, the first filler sequence may be located between the promoter region and 3′ITR, and the second filler sequence may be located between the polyadenylation signal sequence region and 3′ ITR. In one embodiment, a viral genome may comprise two filler sequences, the first filler sequence may be located between the promoter region and 3′ITR, and the second filler sequence may be located between the MCS region and exon region. In one embodiment, a viral genome may comprise two filler sequences, the first filler sequence may be located between the promoter region and 3′ITR, and the second filler sequence may be located between the MCS region and 3′ ITR. In one embodiment, a viral genome may comprise two filler sequences, the first filler sequence may be located between the promoter region and 3′ITR, and the second filler sequence may be located between the exon region and 3′ ITR.

[0400] In one embodiment, a viral genome may comprise two filler sequences, the first filler sequence may be located between the payload region and intron region, and the second filler sequence may be located between the intron region and enhancer region. In one embodiment, a viral genome may comprise two filler sequences, the first filler sequence may be located between the payload region and intron region, and the second filler sequence may be located between the intron region and polyadenylation signal sequence region. In one embodiment, a viral genome may comprise two filler sequences, the first filler sequence may be located between the payload region and intron region, and the second filler sequence may be located between the intron region and MCS region. In one embodiment, a viral genome may comprise two filler sequences, the first filler sequence may be located between the payload region and intron region, and the second filler sequence may be located between the intron region and exon region. In one embodiment, a viral genome may comprise two filler sequences, the first filler sequence may be located between the payload region and intron region, and the second filler sequence may be located between the intron region and 3′ ITR. In one embodiment, a viral genome may comprise two filler sequences, the first filler sequence may be located between the payload region and intron region, and the second filler sequence may be located between the enhancer region and polyadenylation signal sequence region. In one embodiment, a viral genome may comprise two filler sequences, the first filler sequence may be located between the payload region and intron region, and the second filler sequence may be located between the enhancer region and MCS region. In one embodiment, a viral genome may comprise two filler sequences, the first filler sequence may be located between the payload region and intron region, and the second filler sequence may be located between the enhancer region and exon region. In one embodiment, a viral genome may comprise two filler sequences, the first filler sequence may be located between the payload region and intron region, and the second filler sequence may be located between the enhancer region and 3′ ITR. In one embodiment, a viral genome may comprise two filler sequences, the first filler sequence may be located between the payload region and intron region, and the second filler sequence may be located between the polyadenylation signal sequence region and MCS region. In one embodiment, a viral genome may comprise two filler sequences, the first filler sequence may be located between the payload region and intron region, and the second filler sequence may be located between the polyadenylation signal sequence region and exon region. In one embodiment, a viral genome may comprise two filler sequences, the first filler sequence may be located between the payload region and intron region, and the second filler sequence may be located between the polyadenylation signal sequence region and 3′ ITR. In one embodiment, a viral genome may comprise two filler sequences, the first filler sequence may be located between the payload region and intron region, and the second filler sequence may be located between the MCS region and exon region. In one embodiment, a viral genome may comprise two filler sequences, the first filler sequence may be located between the payload region and intron region, and the second filler sequence may be located between the MCS region and 3′ ITR. In one embodiment, a viral genome may comprise two filler sequences, the first filler sequence may be located between the payload region and intron region, and the second filler sequence may be located between the exon region and 3′ ITR.

[0401] In one embodiment, a viral genome may comprise two filler sequences, the first filler sequence may be located between the payload region and enhancer region, and the second filler sequence may be located between the intron region and enhancer region. In one embodiment, a viral genome may comprise two filler sequences, the first filler sequence may be located between the payload region and enhancer region, and the second filler sequence may be located between the intron region and polyadenylation signal sequence region. In one embodiment, a viral genome may comprise two filler sequences, the first filler sequence may be located between the payload region and enhancer region, and the second filler sequence may be located between the intron region and MCS region. In one embodiment, a viral genome may comprise two filler sequences, the first filler sequence may be located between the payload region and enhancer region, and the second filler sequence may be located between the intron region and exon region. In one embodiment, a viral genome may comprise two filler sequences, the first filler sequence may be located between the payload region and enhancer region, and the second filler sequence may be located between the intron region and 3′ ITR. In one embodiment, a viral genome may comprise two filler sequences, the first filler sequence may be located between the payload region and enhancer region, and the second filler sequence may be located between the enhancer region and polyadenylation signal sequence region. In one embodiment, a viral genome may comprise two filler sequences, the first filler sequence may be located between the payload region and enhancer region, and the second filler sequence may be located between the enhancer region and MCS region. In one embodiment, a viral genome may comprise two filler sequences, the first filler sequence may be located between the payload region and enhancer region, and the second filler sequence may be located between the enhancer region and exon region. In one embodiment, a viral genome may comprise two filler sequences, the first filler sequence may be located between the payload region and enhancer region, and the second filler sequence may be located between the enhancer region and 3′ ITR. In one embodiment, a viral genome may comprise two filler sequences, the first filler sequence may be located between the payload region and enhancer region, and the second filler sequence may be located between the polyadenylation signal sequence region and MCS region. In one embodiment, a viral genome may comprise two filler sequences, the first filler sequence may be located between the payload region and enhancer region, and the second filler sequence may be located between the polyadenylation signal sequence region and exon region. In one embodiment, a viral genome may comprise two filler sequences, the first filler sequence may be located between the payload region and enhancer region, and the second filler sequence may be located between the polyadenylation signal sequence region and 3′ ITR. In one embodiment, a viral genome may comprise two filler sequences, the first filler sequence may be located between the payload region and enhancer region, and the second filler sequence may be located between the MCS region and exon region. In one embodiment, a viral genome may comprise two filler sequences, the first filler sequence may be located between the payload region and enhancer region, and the second filler sequence may be located between the MCS region and 3′ ITR. In one embodiment, a viral genome may comprise two filler sequences, the first filler sequence may be located between the payload region and enhancer region, and the second filler sequence may be located between the exon region and 3′ ITR.

[0402] In one embodiment, a viral genome may comprise two filler sequences, the first filler sequence may be located between the payload region and polyadenylation signal sequence region, and the second filler sequence may be located between the intron region and enhancer region. In one embodiment, a viral genome may comprise two filler sequences, the first filler sequence may be located between the payload region and polyadenylation signal sequence region, and the second filler sequence may be located between the intron region and polyadenylation signal sequence region. In one embodiment, a viral genome may comprise two filler sequences, the first filler sequence may be located between the payload region and polyadenylation signal sequence region, and the second filler sequence may be located between the intron region and MCS region. In one embodiment, a viral genome may comprise two filler sequences, the first filler sequence may be located between the payload region and polyadenylation signal sequence region, and the second filler sequence may be located between the intron region and exon region. In one embodiment, a viral genome may comprise two filler sequences, the first filler sequence may be located between the payload region and polyadenylation signal sequence region, and the second filler sequence may be located between the intron region and 3′ ITR. In one embodiment, a viral genome may comprise two filler sequences, the first filler sequence may be located between the payload region and polyadenylation signal sequence region, and the second filler sequence may be located between the enhancer region and polyadenylation signal sequence region. In one embodiment, a viral genome may comprise two filler sequences, the first filler sequence may be located between the payload region and polyadenylation signal sequence region, and the second filler sequence may be located between the enhancer region and MCS region. In one embodiment, a viral genome may comprise two filler sequences, the first filler sequence may be located between the payload region and polyadenylation signal sequence region, and the second filler sequence may be located between the enhancer region and exon region. In one embodiment, a viral genome may comprise two filler sequences, the first filler sequence may be located between the payload region and polyadenylation signal sequence region, and the second filler sequence may be located between the enhancer region and 3′ ITR. In one embodiment, a viral genome may comprise two filler sequences, the first filler sequence may be located between the payload region and polyadenylation signal sequence region, and the second filler sequence may be located between the polyadenylation signal sequence region and MCS region. In one embodiment, a viral genome may comprise two filler sequences, the first filler sequence may be located between the payload region and polyadenylation signal sequence region, and the second filler sequence may be located between the polyadenylation signal sequence region and exon region. In one embodiment, a viral genome may comprise two filler sequences, the first filler sequence may be located between the payload region and polyadenylation signal sequence region, and the second filler sequence may be located between the polyadenylation signal sequence region and 3′ ITR. In one embodiment, a viral genome may comprise two filler sequences, the first filler sequence may be located between the payload region and polyadenylation signal sequence region, and the second filler sequence may be located between the MCS region and exon region. In one embodiment, a viral genome may comprise two filler sequences, the first filler sequence may be located between the payload region and polyadenylation signal sequence region, and the second filler sequence may be located between the MCS region and 3′ ITR. In one embodiment, a viral genome may comprise two filler sequences, the first filler sequence may be located between the payload region and polyadenylation signal sequence region, and the second filler sequence may be located between the exon region and 3′ ITR.

[0403] In one embodiment, a viral genome may comprise two filler sequences, the first filler sequence may be located between the payload region and MCS region, and the second filler sequence may be located between the intron region and enhancer region. In one embodiment, a viral genome may comprise two filler sequences, the first filler sequence may be located between the payload region and MCS region, and the second filler sequence may be located between the intron region and polyadenylation signal sequence region. In one embodiment, a viral genome may comprise two filler sequences, the first filler sequence may be located between the payload region and MCS region, and the second filler sequence may be located between the intron region and MCS region. In one embodiment, a viral genome may comprise two filler sequences, the first filler sequence may be located between the payload region and MCS region, and the second filler sequence may be located between the intron region and exon region. In one embodiment, a viral genome may comprise two filler sequences, the first filler sequence may be located between the payload region and MCS region, and the second filler sequence may be located between the intron region and 3′ ITR. In one embodiment, a viral genome may comprise two filler sequences, the first filler sequence may be located between the payload region and MCS region, and the second filler sequence may be located between the enhancer region and polyadenylation signal sequence region. In one embodiment, a viral genome may comprise two filler sequences, the first filler sequence may be located between the payload region and MCS region, and the second filler sequence may be located between the enhancer region and MCS region. In one embodiment, a viral genome may comprise two filler sequences, the first filler sequence may be located between the payload region and MCS region, and the second filler sequence may be located between the enhancer region and exon region. In one embodiment, a viral genome may comprise two filler sequences, the first filler sequence may be located between the payload region and MCS region, and the second filler sequence may be located between the enhancer region and 3′ ITR. In one embodiment, a viral genome may comprise two filler sequences, the first filler sequence may be located between the payload region and MCS region, and the second filler sequence may be located between the polyadenylation signal sequence region and MCS region. In one embodiment, a viral genome may comprise two filler sequences, the first filler sequence may be located between the payload region and MCS region, and the second filler sequence may be located between the polyadenylation signal sequence region and exon region. In one embodiment, a viral genome may comprise two filler sequences, the first filler sequence may be located between the payload region and MCS region, and the second filler sequence may be located between the polyadenylation signal sequence region and 3′ ITR. In one embodiment, a viral genome may comprise two filler sequences, the first filler sequence may be located between the payload region and MCS region, and the second filler sequence may be located between the MCS region and exon region. In one embodiment, a viral genome may comprise two filler sequences, the first filler sequence may be located between the payload region and MCS region, and the second filler sequence may be located between the MCS region and 3′ ITR. In one embodiment, a viral genome may comprise two filler sequences, the first filler sequence may be located between the payload region and MCS region, and the second filler sequence may be located between the exon region and 3′ ITR.

[0404] In one embodiment, a viral genome may comprise two filler sequences, the first filler sequence may be located between the payload region and exon region, and the second filler sequence may be located between the intron region and enhancer region. In one embodiment, a viral genome may comprise two filler sequences, the first filler sequence may be located between the payload region and exon region, and the second filler sequence may be located between the intron region and polyadenylation signal sequence region. In one embodiment, a viral genome may comprise two filler sequences, the first filler sequence may be located between the payload region and exon region, and the second filler sequence may be located between the intron region and MCS region. In one embodiment, a viral genome may comprise two filler sequences, the first filler sequence may be located between the payload region and exon region, and the second filler sequence may be located between the intron region and exon region. In one embodiment, a viral genome may comprise two filler sequences, the first filler sequence may be located between the payload region and exon region, and the second filler sequence may be located between the intron region and 3′ ITR. In one embodiment, a viral genome may comprise two filler sequences, the first filler sequence may be located between the payload region and exon region, and the second filler sequence may be located between the enhancer region and polyadenylation signal sequence region. In one embodiment, a viral genome may comprise two filler sequences, the first filler sequence may be located between the payload region and exon region, and the second filler sequence may be located between the enhancer region and MCS region. In one embodiment, a viral genome may comprise two filler sequences, the first filler sequence may be located between the payload region and exon region, and the second filler sequence may be located between the enhancer region and exon region. In one embodiment, a viral genome may comprise two filler sequences, the first filler sequence may be located between the payload region and exon region, and the second filler sequence may be located between the enhancer region and 3′ ITR. In one embodiment, a viral genome may comprise two filler sequences, the first filler sequence may be located between the payload region and exon region, and the second filler sequence may be located between the polyadenylation signal sequence region and MCS region. In one embodiment, a viral genome may comprise two filler sequences, the first filler sequence may be located between the payload region and exon region, and the second filler sequence may be located between the polyadenylation signal sequence region and exon region. In one embodiment, a viral genome may comprise two filler sequences, the first filler sequence may be located between the payload region and exon region, and the second filler sequence may be located between the polyadenylation signal sequence region and 3′ ITR. In one embodiment, a viral genome may comprise two filler sequences, the first filler sequence may be located between the payload region and exon region, and the second filler sequence may be located between the MCS region and exon region. In one embodiment, a viral genome may comprise two filler sequences, the first filler sequence may be located between the payload region and exon region, and the second filler sequence may be located between the MCS region and 3′ ITR. In one embodiment, a viral genome may comprise two filler sequences, the first filler sequence may be located between the payload region and exon region, and the second filler sequence may be located between the exon region and 3′ ITR.

[0405] In one embodiment, a viral genome may comprise two filler sequences, the first filler sequence may be located between the payload region and 3′ ITR region, and the second filler sequence may be located between the intron region and enhancer region. In one embodiment, a viral genome may comprise two filler sequences, the first filler sequence may be located between the payload region and 3′ ITR region, and the second filler sequence may be located between the intron region and polyadenylation signal sequence region. In one embodiment, a viral genome may comprise two filler sequences, the first filler sequence may be located between the payload region and 3′ ITR region, and the second filler sequence may be located between the intron region and MCS region. In one embodiment, a viral genome may comprise two filler sequences, the first filler sequence may be located between the payload region and 3′ ITR region, and the second filler sequence may be located between the intron region and exon region. In one embodiment, a viral genome may comprise two filler sequences, the first filler sequence may be located between the payload region and 3′ ITR region, and the second filler sequence may be located between the intron region and 3′ ITR. In one embodiment, a viral genome may comprise two filler sequences, the first filler sequence may be located between the payload region and 3′ ITR region, and the second filler sequence may be located between the enhancer region and polyadenylation signal sequence region. In one embodiment, a viral genome may comprise two filler sequences, the first filler sequence may be located between the payload region and 3′ ITR region, and the second filler sequence may be located between the enhancer region and MCS region. In one embodiment, a viral genome may comprise two filler sequences, the first filler sequence may be located between the payload region and 3′ ITR region, and the second filler sequence may be located between the enhancer region and exon region. In one embodiment, a viral genome may comprise two filler sequences, the first filler sequence may be located between the payload region and 3′ ITR region, and the second filler sequence may be located between the enhancer region and 3′ ITR. In one embodiment, a viral genome may comprise two filler sequences, the first filler sequence may be located between the payload region and 3′ ITR region, and the second filler sequence may be located between the polyadenylation signal sequence region and MCS region. In one embodiment, a viral genome may comprise two filler sequences, the first filler sequence may be located between the payload region and 3′ ITR region, and the second filler sequence may be located between the polyadenylation signal sequence region and exon region. In one embodiment, a viral genome may comprise two filler sequences, the first filler sequence may be located between the payload region and 3′ ITR region, and the second filler sequence may be located between the polyadenylation signal sequence region and 3′ ITR. In one embodiment, a viral genome may comprise two filler sequences, the first filler sequence may be located between the payload region and 3′ ITR region, and the second filler sequence may be located between the MCS region and exon region. In one embodiment, a viral genome may comprise two filler sequences, the first filler sequence may be located between the payload region and 3′ ITR region, and the second filler sequence may be located between the MCS region and 3′ ITR. In one embodiment, a viral genome may comprise two filler sequences, the first filler sequence may be located between the payload region and 3′ ITR region, and the second filler sequence may be located between the exon region and 3′ ITR.

[0406] In one embodiment, a viral genome may comprise two filler sequences, the first filler sequence may be located between the intron region and enhancer region, and the second filler sequence may be located between the enhancer region and polyadenylation signal sequence region. In one embodiment, a viral genome may comprise two filler sequences, the first filler sequence may be located between the intron region and enhancer region, and the second filler sequence may be located between the enhancer region and MCS region. In one embodiment, a viral genome may comprise two filler sequences, the first filler sequence may be located between the intron region and enhancer region, and the second filler sequence may be located between the enhancer region and exon region. In one embodiment, a viral genome may comprise two filler sequences, the first filler sequence may be located between the intron region and enhancer region, and the second filler sequence may be located between the enhancer region and 3′ ITR. In one embodiment, a viral genome may comprise two filler sequences, the first filler sequence may be located between the intron region and enhancer region, and the second filler sequence may be located between the polyadenylation signal sequence region and MCS region. In one embodiment, a viral genome may comprise two filler sequences, the first filler sequence may be located between the intron region and enhancer region, and the second filler sequence may be located between the polyadenylation signal sequence region and exon region. In one embodiment, a viral genome may comprise two filler sequences, the first filler sequence may be located between the intron region and enhancer region, and the second filler sequence may be located between the polyadenylation signal sequence region and 3′ ITR. In one embodiment, a viral genome may comprise two filler sequences, the first filler sequence may be located between the intron region and enhancer region, and the second filler sequence may be located between the MCS region and exon region. In one embodiment, a viral genome may comprise two filler sequences, the first filler sequence may be located between the intron region and enhancer region, and the second filler sequence may be located between the MCS region and 3′ ITR. In one embodiment, a viral genome may comprise two filler sequences, the first filler sequence may be located between the intron region and enhancer region, and the second filler sequence may be located between the exon region and 3′ ITR.

[0407] In one embodiment, a viral genome may comprise two filler sequences, the first filler sequence may be located between the intron region and polyadenylation signal sequence region, and the second filler sequence may be located between the enhancer region and polyadenylation signal sequence region. In one embodiment, a viral genome may comprise two filler sequences, the first filler sequence may be located between the intron region and polyadenylation signal sequence region, and the second filler sequence may be located between the enhancer region and MCS region. In one embodiment, a viral genome may comprise two filler sequences, the first filler sequence may be located between the intron region and polyadenylation signal sequence region, and the second filler sequence may be located between the enhancer region and exon region. In one embodiment, a viral genome may comprise two filler sequences, the first filler sequence may be located between the intron region and polyadenylation signal sequence region, and the second filler sequence may be located between the enhancer region and 3′ ITR. In one embodiment, a viral genome may comprise two filler sequences, the first filler sequence may be located between the intron region and polyadenylation signal sequence region, and the second filler sequence may be located between the polyadenylation signal sequence region and MCS region. In one embodiment, a viral genome may comprise two filler sequences, the first filler sequence may be located between the intron region and polyadenylation signal sequence region, and the second filler sequence may be located between the polyadenylation signal sequence region and exon region. In one embodiment, a viral genome may comprise two filler sequences, the first filler sequence may be located between the intron region and polyadenylation signal sequence region, and the second filler sequence may be located between the polyadenylation signal sequence region and 3′ ITR. In one embodiment, a viral genome may comprise two filler sequences, the first filler sequence may be located between the intron region and polyadenylation signal sequence region, and the second filler sequence may be located between the MCS region and exon region. In one embodiment, a viral genome may comprise two filler sequences, the first filler sequence may be located between the intron region and polyadenylation signal sequence region, and the second filler sequence may be located between the MCS region and 3′ ITR. In one embodiment, a viral genome may comprise two filler sequences, the first filler sequence may be located between the intron region and polyadenylation signal sequence region, and the second filler sequence may be located between the exon region and 3′ ITR.

[0408] In one embodiment, a viral genome may comprise two filler sequences, the first filler sequence may be located between the intron region and MCS region, and the second filler sequence may be located between the enhancer region and polyadenylation signal sequence region. In one embodiment, a viral genome may comprise two filler sequences, the first filler sequence may be located between the intron region and MCS region, and the second filler sequence may be located between the enhancer region and MCS region. In one embodiment, a viral genome may comprise two filler sequences, the first filler sequence may be located between the intron region and MCS region, and the second filler sequence may be located between the enhancer region and exon region. In one embodiment, a viral genome may comprise two filler sequences, the first filler sequence may be located between the intron region and MCS region, and the second filler sequence may be located between the enhancer region and 3′ ITR. In one embodiment, a viral genome may comprise two filler sequences, the first filler sequence may be located between the intron region and MCS region, and the second filler sequence may be located between the polyadenylation signal sequence region and MCS region. In one embodiment, a viral genome may comprise two filler sequences, the first filler sequence may be located between the intron region and MCS region, and the second filler sequence may be located between the polyadenylation signal sequence region and exon region. In one embodiment, a viral genome may comprise two filler sequences, the first filler sequence may be located between the intron region and MCS region, and the second filler sequence may be located between the polyadenylation signal sequence region and 3′ ITR. In one embodiment, a viral genome may comprise two filler sequences, the first filler sequence may be located between the intron region and MCS region, and the second filler sequence may be located between the MCS region and exon region. In one embodiment, a viral genome may comprise two filler sequences, the first filler sequence may be located between the intron region and MCS region, and the second filler sequence may be located between the MCS region and 3′ ITR. In one embodiment, a viral genome may comprise two filler sequences, the first filler sequence may be located between the intron region and MCS region, and the second filler sequence may be located between the exon region and 3′ ITR.

[0409] In one embodiment, a viral genome may comprise two filler sequences, the first filler sequence may be located between the intron region and exon region, and the second filler sequence may be located between the enhancer region and polyadenylation signal sequence region. In one embodiment, a viral genome may comprise two filler sequences, the first filler sequence may be located between the intron region and exon region, and the second filler sequence may be located between the enhancer region and MCS region. In one embodiment, a viral genome may comprise two filler sequences, the first filler sequence may be located between the intron region and exon region, and the second filler sequence may be located between the enhancer region and exon region. In one embodiment, a viral genome may comprise two filler sequences, the first filler sequence may be located between the intron region and exon region, and the second filler sequence may be located between the enhancer region and 3′ ITR. In one embodiment, a viral genome may comprise two filler sequences, the first filler sequence may be located between the intron region and exon region, and the second filler sequence may be located between the polyadenylation signal sequence region and MCS region. In one embodiment, a viral genome may comprise two filler sequences, the first filler sequence may be located between the intron region and exon region, and the second filler sequence may be located between the polyadenylation signal sequence region and exon region. In one embodiment, a viral genome may comprise two filler sequences, the first filler sequence may be located between the intron region and exon region, and the second filler sequence may be located between the polyadenylation signal sequence region and 3′ ITR. In one embodiment, a viral genome may comprise two filler sequences, the first filler sequence may be located between the intron region and exon region, and the second filler sequence may be located between the MCS region and exon region. In one embodiment, a viral genome may comprise two filler sequences, the first filler sequence may be located between the intron region and exon region, and the second filler sequence may be located between the MCS region and 3′ ITR. In one embodiment, a viral genome may comprise two filler sequences, the first filler sequence may be located between the intron region and exon region, and the second filler sequence may be located between the exon region and 3′ ITR.

[0410] In one embodiment, a viral genome may comprise two filler sequences, the first filler sequence may be located between the intron region and 3′ITR, and the second filler sequence may be located between the enhancer region and polyadenylation signal sequence region. In one embodiment, a viral genome may comprise two filler sequences, the first filler sequence may be located between the intron region and 3′ITR, and the second filler sequence may be located between the enhancer region and MCS region. In one embodiment, a viral genome may comprise two filler sequences, the first filler sequence may be located between the intron region and 3′ITR, and the second filler sequence may be located between the enhancer region and exon region. In one embodiment, a viral genome may comprise two filler sequences, the first filler sequence may be located between the intron region and 3′ITR, and the second filler sequence may be located between the enhancer region and 3′ ITR. In one embodiment, a viral genome may comprise two filler sequences, the first filler sequence may be located between the intron region and 3′ITR, and the second filler sequence may be located between the polyadenylation signal sequence region and MCS region. In one embodiment, a viral genome may comprise two filler sequences, the first filler sequence may be located between the intron region and 3′ITR, and the second filler sequence may be located between the polyadenylation signal sequence region and exon region. In one embodiment, a viral genome may comprise two filler sequences, the first filler sequence may be located between the intron region and 3′ITR, and the second filler sequence may be located between the polyadenylation signal sequence region and 3′ ITR. In one embodiment, a viral genome may comprise two filler sequences, the first filler sequence may be located between the intron region and 3′ITR, and the second filler sequence may be located between the MCS region and exon region. In one embodiment, a viral genome may comprise two filler sequences, the first filler sequence may be located between the intron region and 3′ITR, and the second filler sequence may be located between the MCS region and 3′ ITR. In one embodiment, a viral genome may comprise two filler sequences, the first filler sequence may be located between the intron region and 3′ITR, and the second filler sequence may be located between the exon region and 3′ ITR.

[0411] In one embodiment, a viral genome may comprise two filler sequences, the first filler sequence may be located between the enhancer region and polyadenylation signal sequence region, and the second filler sequence may be located between the polyadenylation signal sequence region and MCS region. In one embodiment, a viral genome may comprise two filler sequences, the first filler sequence may be located between the enhancer region and polyadenylation signal sequence region, and the second filler sequence may be located between the polyadenylation signal sequence region and exon region. In one embodiment, a viral genome may comprise two filler sequences, the first filler sequence may be located between the enhancer region and polyadenylation signal sequence region, and the second filler sequence may be located between the polyadenylation signal sequence region and 3′ ITR. In one embodiment, a viral genome may comprise two filler sequences, the first filler sequence may be located between the enhancer region and polyadenylation signal sequence region, and the second filler sequence may be located between the MCS region and exon region. In one embodiment, a viral genome may comprise two filler sequences, the first filler sequence may be located between the enhancer region and polyadenylation signal sequence region, and the second filler sequence may be located between the MCS region and 3′ ITR. In one embodiment, a viral genome may comprise two filler sequences, the first filler sequence may be located between the enhancer region and polyadenylation signal sequence region, and the second filler sequence may be located between the exon region and 3′ ITR.

[0412] In one embodiment, a viral genome may comprise two filler sequences, the first filler sequence may be located between the enhancer region and MCS region, and the second filler sequence may be located between the polyadenylation signal sequence region and MCS region. In one embodiment, a viral genome may comprise two filler sequences, the first filler sequence may be located between the enhancer region and MCS region, and the second filler sequence may be located between the polyadenylation signal sequence region and exon region. In one embodiment, a viral genome may comprise two filler sequences, the first filler sequence may be located between the enhancer region and MCS region, and the second filler sequence may be located between the polyadenylation signal sequence region and 3′ ITR. In one embodiment, a viral genome may comprise two filler sequences, the first filler sequence may be located between the enhancer region and MCS region, and the second filler sequence may be located between the MCS region and exon region. In one embodiment, a viral genome may comprise two filler sequences, the first filler sequence may be located between the enhancer region and MCS region, and the second filler sequence may be located between the MCS region and 3′ ITR. In one embodiment, a viral genome may comprise two filler sequences, the first filler sequence may be located between the enhancer region and MCS region, and the second filler sequence may be located between the exon region and 3′ ITR.

[0413] In one embodiment, a viral genome may comprise two filler sequences, the first filler sequence may be located between the enhancer region and exon region, and the second filler sequence may be located between the polyadenylation signal sequence region and MCS region. In one embodiment, a viral genome may comprise two filler sequences, the first filler sequence may be located between the enhancer region and exon region, and the second filler sequence may be located between the polyadenylation signal sequence region and exon region. In one embodiment, a viral genome may comprise two filler sequences, the first filler sequence may be located between the enhancer region and exon region, and the second filler sequence may be located between the polyadenylation signal sequence region and 3′ ITR. In one embodiment, a viral genome may comprise two filler sequences, the first filler sequence may be located between the enhancer region and exon region, and the second filler sequence may be located between the MCS region and exon region. In one embodiment, a viral genome may comprise two filler sequences, the first filler sequence may be located between the enhancer region and exon region, and the second filler sequence may be located between the MCS region and 3′ ITR. In one embodiment, a viral genome may comprise two filler sequences, the first filler sequence may be located between the enhancer region and exon region, and the second filler sequence may be located between the exon region and 3′ ITR.

[0414] In one embodiment, a viral genome may comprise two filler sequences, the first filler sequence may be located between the enhancer region and 3′ ITR, and the second filler sequence may be located between the polyadenylation signal sequence region and MCS region. In one embodiment, a viral genome may comprise two filler sequences, the first filler sequence may be located between the enhancer region and 3′ ITR, and the second filler sequence may be located between the polyadenylation signal sequence region and exon region. In one embodiment, a viral genome may comprise two filler sequences, the first filler sequence may be located between the enhancer region and 3′ ITR, and the second filler sequence may be located between the polyadenylation signal sequence region and 3′ ITR. In one embodiment, a viral genome may comprise two filler sequences, the first filler sequence may be located between the enhancer region and 3′ ITR, and the second filler sequence may be located between the MCS region and exon region. In one embodiment, a viral genome may comprise two filler sequences, the first filler sequence may be located between the enhancer region and 3′ ITR, and the second filler sequence may be located between the MCS region and 3′ ITR. In one embodiment, a viral genome may comprise two filler sequences, the first filler sequence may be located between the enhancer region and 3′ ITR, and the second filler sequence may be located between the exon region and 3′ ITR.

[0415] In one embodiment, a viral genome may comprise two filler sequences, the first filler sequence may be located between the polyadenylation signal sequence region and MCS region, and the second filler sequence may be located between the MCS region and exon region. In one embodiment, a viral genome may comprise two filler sequences, the first filler sequence may be located between the polyadenylation signal sequence region and MCS region, and the second filler sequence may be located between the MCS region and 3′ ITR. In one embodiment, a viral genome may comprise two filler sequences, the first filler sequence may be located between the polyadenylation signal sequence region and MCS region, and the second filler sequence may be located between the exon region and 3′ ITR.

[0416] In one embodiment, a viral genome may comprise two filler sequences, the first filler sequence may be located between the polyadenylation signal sequence region and exon region, and the second filler sequence may be located between the MCS region and exon region. In one embodiment, a viral genome may comprise two filler sequences, the first filler sequence may be located between the polyadenylation signal sequence region and exon region, and the second filler sequence may be located between the MCS region and 3′ ITR. In one embodiment, a viral genome may comprise two filler sequences, the first filler sequence may be located between the polyadenylation signal sequence region and exon region, and the second filler sequence may be located between the exon region and 3′ ITR.

[0417] In one embodiment, a viral genome may comprise two filler sequences, the first filler sequence may be located between the polyadenylation signal sequence region and 3′ ITR, and the second filler sequence may be located between the MCS region and exon region. In one embodiment, a viral genome may comprise two filler sequences, the first filler sequence may be located between the polyadenylation signal sequence region and 3′ ITR, and the second filler sequence may be located between the MCS region and 3′ ITR. In one embodiment, a viral genome may comprise two filler sequences, the first filler sequence may be located between the polyadenylation signal sequence region and 3′ ITR, and the second filler sequence may be located between the exon region and 3′ ITR.

[0418] In one embodiment, a viral genome may comprise two filler sequences, the first filler sequence may be located between the MCS region and exon region, and the second filler sequence may be located between the exon region and 3′ ITR.

### Payloads of the Invention

[0419] The AAV particles of the present disclosure comprise at least one payload region. As used herein, “payload” or “payload region” refers to one or more polynucleotides or polynucleotide regions encoded by or within a viral genome or an expression product of such polynucleotide or polynucleotide region, e.g., a transgene, a polynucleotide encoding a polypeptide or multi-polypeptide or a modulatory nucleic acid or regulatory nucleic acid. Payloads of the present invention typically encode modulatory polynucleotides or fragments or variants thereof.

[0420] The payload region may be constructed in such a way as to reflect a region similar to or mirroring the natural organization of an mRNA.

[0421] The payload region may comprise a combination of coding and non-coding nucleic acid sequences.

[0422] In some embodiments, the AAV payload region may encode a coding or non-coding RNA.

[0423] In one embodiment, the AAV particle comprises a viral genome with a payload region comprising nucleic acid sequences encoding a siRNA, miRNA or other RNAi agent. In such an embodiment, a viral genome encoding more than one polypeptide may be replicated and packaged into a viral particle. A target cell transduced with a viral particle may express the encoded siRNA, miRNA or other RNAi agent inside a single cell.

### Modulatory Polynucleotides

[0424] In one embodiment, modulatory polynucleotides, e.g., RNA or DNA molecules, may be used to treat at least one neurodegenerative disease. As used herein, a “modulatory polynucleotide” is any nucleic acid sequence(s) which functions to modulate (either increase or decrease) the level or amount of a target gene, e.g., mRNA or protein levels.

[0425] In one embodiment, the modulatory polynucleotides may comprise at least one nucleic acid sequence encoding at least one siRNA molecule. The nucleic acids may, independently if there is more than one, encode 1, 2, 3, 4, 5, 6, 7, 8, 9, or more than 9 siRNA molecules.

[0426] In one embodiment, the molecular scaffold may be located downstream of a CMV promoter, fragment or variant thereof.

[0427] In one embodiment, the molecular scaffold may be located downstream of a CBA promoter, fragment or variant thereof.

[0428] In one embodiment, the molecular scaffold may be a natural pri-miRNA scaffold located downstream of a CMV promoter. As a non-limiting example, the natural pri-miRNA scaffold is derived from the human miR155 scaffold.

[0429] In one embodiment, the molecular scaffold may be a natural pri-miRNA scaffold located downstream of a CBA promoter.

[0430] In one embodiment, the selection of a molecular scaffold and modulatory polynucleotide is determined by a method of comparing modulatory polynucleotides in pri-miRNA (see e.g., the method described by Miniarikova et al. Design, Characterization, and Lead Selection of Therapeutic miRNAs Targeting Huntingtin for Development of Gene Therapy for Huntington's Disease. Molecular Therapy-Nucleic Acids (2016) 5, e297 and International Publication No. WO2016102664; the contents of each of which are herein incorporated by reference in their entireties). To evaluate the activities of the modulatory polynucleotides, the molecular scaffold used which may be used is a human pri-miRNA scaffold (e.g., miR155 scaffold) and the promoter may be CMV. The activity may be determined in vitro using HEK293T cells and a reporter (e.g., Luciferase).

[0431] In order to evaluate the optimal molecular scaffold for the modulatory polynucleotide, the modulatory polynucleotide is used in pri-miRNA scaffolds with a CAG promoter. The constructs are co-transfected with a reporter (e.g., luciferase reporter) at 50 ng. Constructs with greater than 80% knockdown at 50 ng co-transfection are considered efficient. In one aspect, the constructs with strong guide-strand activity are preferred. The molecular scaffolds can be processed in HEK293T cells by NGS to determine guide-passenger ratios, and processing variability.

[0432] In one embodiment, the disease to be treated is HD and the modulatory polynucleotide may, but it not limited to, targeting exon 1, CAG repeats, SNP rs362331 in exon 50 and/or SNP rs362307 in exon 67. For exon 1 targeting, the modulatory polynucleotide is determined to be efficient at HTT knockdown if the knockdown is 80% or greater. For CAG targeting, the modulatory polynucleotide is determined to be efficient at HTT knockdown if the knockdown is at least 60%. For SNP targeting, the modulatory polynucleotide is determined to be efficient at HTT knockdown if the knockdown is at least 60%. For allele selectivity for CAG repeats or SNP targeting the modulatory polynucleotides may comprise at least 1 substitution in order to improve allele selectivity. As a non-limiting example, substitution may be a G or C replaced with a T or corresponding U and A or T/U replaced by a C.

[0433] To evaluate the molecular scaffolds and modulatory polynucleotides in vivo the molecular scaffolds comprising the modulatory polynucleotides are packaged in AAV (e.g., the serotype may be AAV5 (see e.g., the method and constructs described in WO2015060722, the contents of which are herein incorporated by reference in their entirety)) and administered to an in vivo model (e.g., For HD, a Hu128/21 HD mouse may be used) and the guide-passenger ratios, 5′ and 3′ end processing, reversal of guide and passenger strands, and knockdown can be determined in different areas of the model.

[0434] In one embodiment, the selection of a molecular scaffold and modulatory polynucleotide is determined by a method of comparing modulatory polynucleotides in natural pri-miRNA and synthetic pri-miRNA. The modulatory polynucleotide may, but it not limited to, targeting an exon other than exon 1. To evaluate the activities of the modulatory polynucleotides, the molecular scaffold is used with a CBA promoter. In one aspect, the activity may be determined in vitro using HEK293T cells, HeLa cell and a reporter (e.g., Luciferase) and knockdown efficient modulatory polynucleotides showed the gene of interest knockdown of at least 80% in the cell tested. Additionally, the modulatory polynucleotides which are considered most efficient showed low to no significant passenger strand (p-strand) activity. In another aspect, the endogenous gene of interest knockdown efficacy is evaluated by transfection in vitro using HEK293T cells, HeLa cell and a reporter. Efficient modulatory polynucleotides show greater than 50% endogenous gene of interest knockdown. In yet another aspect, the endogenous gene of interest knockdown efficacy is evaluated in different cell types (e.g., HEK293, HeLa, primary astrocytes. U251 astrocytes, SH-SYSY neuron cells and fibroblasts from subjects with the disease to be treated) by infection (e.g., AAV2). Efficient modulatory polynucleotides show greater than 60% endogenous gene of interest knockdown.

[0435] To evaluate the molecular scaffolds and modulatory polynucleotides in vivo the molecular scaffolds comprising the modulatory polynucleotides are packaged in AAV and administered to an in vivo model (e.g., For treating HD, a YAC128 HD mouse model may be used) and the guide-passenger ratios, 5′ and 3′ end processing, ratio of guide to passenger strands, and knockdown can be determined in different areas of the model (e.g., tissue regions). The molecular scaffolds can be processed from in vivo samples by NGS to determine guide-passenger ratios, and processing variability.

[0436] In one embodiment, the modulatory polynucleotide is designed using at least one of the following properties: loop variant, seed mismatch/bulge/wobble variant, stem mismatch, loop variant and vassal stem mismatch variant, seed mismatch and basal stem mismatch variant, stem mismatch and basal stem mismatch variant, seed wobble and basal stem wobble variant, or a stem sequence variant.

siRNA Molecules

[0437] The present invention relates to RNA interference (RNAi) induced inhibition of gene expression for treating neurodegenerative disorders. Provided herein are siRNA duplexes or encoded dsRNA that target the gene of interest (referred to herein collectively as “siRNA molecules”). Such siRNA duplexes or encoded dsRNA can reduce or silence gene expression in cells, such as but not limited to, medium spiny neurons, cortical neurons and/or astrocytes.

[0438] RNAi (also known as post-transcriptional gene silencing (PTGS), quelling, or co-suppression) is a post-transcriptional gene silencing process in which RNA molecules, in a sequence specific manner, inhibit gene expression, typically by causing the destruction of specific mRNA molecules. The active components of RNAi are short/small double stranded RNAs (dsRNAs), called small interfering RNAs (siRNAs), that typically contain 15-30 nucleotides (e.g., 19 to 25, 19 to 24 or 19-21 nucleotides) and 2 nucleotide 3′ overhangs and that match the nucleic acid sequence of the target gene. These short RNA species may be naturally produced in vivo by Dicer-mediated cleavage of larger dsRNAs and they are functional in mammalian cells.

[0439] Naturally expressed small RNA molecules, named microRNAs (miRNAs), elicit gene silencing by regulating the expression of mRNAs. The miRNAs containing RNA Induced Silencing Complex (RISC) targets mRNAs presenting a perfect sequence complementarity with nucleotides 2-7 in the 5′ region of the miRNA which is called the seed region, and other base pairs with its 3′ region. miRNA mediated down regulation of gene expression may be caused by cleavage of the target mRNAs, translational inhibition of the target mRNAs, or mRNA decay. miRNA targeting sequences are usually located in the 3′-UTR of the target mRNAs. A single miRNA may target more than 100 transcripts from various genes, and one mRNA may be targeted by different miRNAs.

[0440] siRNA duplexes or dsRNA targeting a specific mRNA may be designed and synthesized in vitro and introduced into cells for activating RNAi processes. Elbashir et al. demonstrated that 21-nucleotide siRNA duplexes (termed small interfering RNAs) were capable of effecting potent and specific gene knockdown without inducing immune response in mammalian cells (Elbashir S M et al., Nature, 2001, 411, 494-498). Since this initial report, post-transcriptional gene silencing by siRNAs quickly emerged as a powerful tool for genetic analysis in mammalian cells and has the potential to produce novel therapeutics.

[0441] RNAi molecules which were designed to target against a nucleic acid sequence that encodes poly-glutamine repeat proteins which cause poly-glutamine expansion diseases such as Huntington's Disease, are described in U.S. Pat. Nos. 9,169,483 and 9,181,544 and International Patent Publication No. WO2015179525, the content of each of which is herein incorporated by reference in their entirety. U.S. Pat. Nos. 9,169,483 and 9,181,544 and International Patent Publication No. WO2015179525 each provide isolated RNA duplexes comprising a first strand of RNA (e.g., 15 contiguous nucleotides) and second strand of RNA (e.g., complementary to at least 12 contiguous nucleotides of the first strand) where the RNA duplex is about 15 to 30 base pairs in length. The first strand of RNA and second strand of RNA may be operably linked by an RNA loop (˜4 to 50 nucleotides) to form a hairpin structure which may be inserted into an expression cassette. Non-limiting examples of loop portions include SEQ ID NO: 9-14 of U.S. Pat. No. 9,169,483, the content of which is herein incorporated by reference in its entirety. Non-limiting examples of strands of RNA which may be used, either full sequence or part of the sequence, to form RNA duplexes include SEQ ID NO: 1-8 of U.S. Pat. No. 9,169,483 and SEQ ID NO: 1-11, 33-59, 208-210, 213-215 and 218-221 of U.S. Pat. No. 9,181,544, the contents of each of which is herein incorporated by reference in its entirety. Non-limiting examples of RNAi molecules include SEQ ID NOs: 1-8 of U.S. Pat. No. 9,169,483, SEQ ID NOs: 1-11, 33-59, 208-210, 213-215 and 218-221 of U.S. Pat. No. 9,181,544 and SEQ ID NOs: 1, 6, 7, and 35-38 of International Patent Publication No. WO2015179525, the contents of each of which is herein incorporated by reference in their entirety.

[0442] In vitro synthetized siRNA molecules may be introduced into cells in order to activate RNAi. An exogenous siRNA duplex, when it is introduced into cells, similar to the endogenous dsRNAs, can be assembled to form the RNA Induced Silencing Complex (RISC), a multiunit complex that interacts with RNA sequences that are complementary to one of the two strands of the siRNA duplex (i.e., the antisense strand). During the process, the sense strand (or passenger strand) of the siRNA is lost from the complex, while the antisense strand (or guide strand) of the siRNA is matched with its complementary RNA. In particular, the targets of siRNA containing RISC complexes are mRNAs presenting a perfect sequence complementarity. Then, siRNA mediated gene silencing occurs by cleaving, releasing and degrading the target.

[0443] The siRNA duplex comprised of a sense strand homologous to the target mRNA and an antisense strand that is complementary to the target mRNA offers much more advantage in terms of efficiency for target RNA destruction compared to the use of the single strand (ss)-siRNAs (e.g. antisense strand RNA or antisense oligonucleotides). In many cases, it requires higher concentration of the ss-siRNA to achieve the effective gene silencing potency of the corresponding duplex.

[0444] Any of the foregoing molecules may be encoded by a viral genome.

Design and Sequences of siRNA Duplexes Targeting Gene of Interest

[0445] The present invention provides small interfering RNA (siRNA) duplexes (and modulatory polynucleotides encoding them) that target mRNA to interfere with gene expression and/or protein production.

[0446] The encoded siRNA duplex of the present invention contains an antisense strand and a sense strand hybridized together forming a duplex structure, wherein the antisense strand is complementary to the nucleic acid sequence of the targeted gene, and wherein the sense strand is homologous to the nucleic acid sequence of the targeted gene. In some aspects, the 5′ end of the antisense strand has a 5′ phosphate group and the 3′ end of the sense strand contains a 3′hydroxyl group. In other aspects, there are none, one or 2 nucleotide overhangs at the 3′end of each strand.

[0447] Some guidelines for designing siRNAs have been proposed in the art. These guidelines generally recommend generating a 19-nucleotide duplexed region, symmetric 2-3 nucleotide 3′overhangs, 5′-phosphate and 3′-hydroxyl groups targeting a region in the gene to be silenced. Other rules that may govern siRNA sequence preference include, but are not limited to, (i) A/U at the 5′ end of the antisense strand; (ii) G/C at the 5′ end of the sense strand; (iii) at least five A/U residues in the 5′ terminal one-third of the antisense strand; and (iv) the absence of any GC stretch of more than 9 nucleotides in length. In accordance with such consideration, together with the specific sequence of a target gene, highly effective siRNA molecules essential for suppressing mammalian target gene expression may be readily designed.

[0448] According to the present invention, siRNA molecules (e.g., siRNA duplexes or encoded dsRNA) that target the gene of interest are designed. Such siRNA molecules can specifically, suppress gene expression and protein production. In some aspects, the siRNA molecules are designed and used to selectively “knock out” gene variants in cells, i.e., mutated transcripts. In some aspects, the siRNA molecules are designed and used to selectively “knock down” gene variants in cells. In other aspects, the siRNA molecules are able to inhibit or suppress both the wild type and mutated version of the gene of interest.

[0449] In one embodiment, an siRNA molecule of the present invention comprises a sense strand and a complementary antisense strand in which both strands are hybridized together to form a duplex structure. The antisense strand has sufficient complementarity to the target mRNA sequence to direct target-specific RNAi, i.e., the siRNA molecule has a sequence sufficient to trigger the destruction of the target mRNA by the RNAi machinery or process.

[0450] In one embodiment, an siRNA molecule of the present invention comprises a sense strand and a complementary antisense strand in which both strands are hybridized together to form a duplex structure and where the start site of the hybridization to the mRNA is between nucleotide 10 and 7000 on the mRNA sequence. As a non-limiting example, the start site may be between nucleotide 10-20, 20-30, 30-40, 40-50, 60-70, 70-80, 80-90, 90-100, 100-150, 150-200, 200-250, 250-300, 300-350, 350-400, 400-450, 450-500, 500-550, 550-600, 600-650, 650-700, 700-70, 750-800, 800-850, 850-900, 900-950, 950-1000, 1000-1050, 1050-1100, 1100-1150, 1150-1200, 1200-1250, 1250-1300, 1300-1350, 1350-1400, 1400-1450, 1450-1500, 1500-1550, 1550-1600, 1600-1650, 1650-1700, 1700-1750, 1750-1800, 1800-1850, 1850-1900, 1900-1950, 1950-2000, 2000-2050, 2050-2100, 2100-2150, 2150-2200, 2200-2250, 2250-2300, 2300-2350, 2350-2400, 2400-2450, 2450-2500, 2500-2550, 2550-2600, 2600-2650, 2650-2700, 2700-2750, 2750-2800, 2800-2850, 2850-2900, 2900-2950, 2950-3000, 3000-3050, 3050-3100, 3100-3150, 3150-3200, 3200-3250, 3250-3300, 3300-3350, 3350-3400, 3400-3450, 3450-3500, 3500-3550, 3550-3600, 3600-3650, 3650-3700, 3700-3750, 3750-3800, 3800-3850, 3850-3900, 3900-3950, 3950-4000, 4000-4050, 4050-4100, 4100-4150, 4150-4200, 4200-4250, 4250-4300, 4300-4350, 4350-4400, 4400-4450, 4450-4500, 4500-4550, 4550-4600, 4600-4650, 4650-4700, 4700-4750, 4750-4800, 4800-4850, 4850-4900, 4900-4950, 4950-5000, 5000-5050, 5050-5100, 5100-5150, 5150-5200, 5200-5250, 5250-5300, 5300-5350, 5350-5400, 5400-5450, 5450-5500, 5500-5550, 5550-5600, 5600-5650, 5650-5700, 5700-5750, 5750-5800, 5800-5850, 5850-5900, 5900-5950, 5950-6000, 6000-6050, 6050-6100, 6100-6150, 6150-6200, 6200-6250, 6250-6300, 6300-6350, 6350-6400, 6400-6450, 6450-6500, 6500-6550, 6550-6600, 6600-6650, 6650-6700, 6700-6750, 6750-6800, 6800-6850, 6850-6900, 6900-6950, 6950-7000, 7000-7050, 7050-7100, 7100-7150, 7150-7200, 7200-7250, 7250-7300, 7300-7350, 7350-7400, 7400-7450, 7450-7500, 7500-7550, 7550-7600, 7600-7650, 7650-7700, 7700-7750, 7750-7800, 7800-7850, 7850-7900, 7900-7950, 7950-8000, 8000-8050, 8050-8100, 8100-8150, 8150-8200, 8200-8250, 8250-8300, 8300-8350, 8350-8400, 8400-8450, 8450-8500, 8500-8550, 8550-8600, 8600-8650, 8650-8700, 8700-8750, 8750-8800, 8800-8850, 8850-8900, 8900-8950, 8950-9000, 9000-9050, 9050-9100, 9100-9150, 9150-9200, 9200-9250, 9250-9300, 9300-9350, 9350-9400, 9400-9450, 9450-9500, 9500-9550, 9550-9600, 9600-9650, 9650-9700, 9700-9750, 9750-9800, 9800-9850, 9850-9900, 9900-9950, 9950-10000, 10000-10050, 10050-10100, 10100-10150, 10150-10200, 10200-10250, 10250-10300, 10300-10350, 10350-10400, 10400-10450, 10450-10500, 10500-10550, 10550-10600, 10600-10650, 10650-10700, 10700-10750, 10750-10800, 10800-10850, 10850-10900, 10900-10950,10950-11000, 11050-11100, 11100-11150, 11150-11200, 11200-11250, 11250-11300, 11300-11350, 11350-11400, 11400-11450, 11450-11500, 11500-11550, 11550-11600, 11600-11650, 11650-11700, 11700-11750, 11750-11800, 11800-11850, 11850-11900, 11900-11950, 11950-12000, 12000-12050, 12050-12100, 12100-12150, 12150-12200, 12200-12250, 12250-12300, 12300-12350, 12350-12400, 12400-12450, 12450-12500, 12500-12550, 12550-12600, 12600-12650, 12650-12700, 12700-12750, 12750-12800, 12800-12850, 12850-12900, 12900-12950, 12950-13000, 13050-13100, 13100-13150, 13150-13200, 13200-13250, 13250-13300, 13300-13350, 13350-13400, 13400-13450, and 13450-13500 on the target mRNA sequence. As yet another non-limiting example, the start site may be nucleotide 10, 11, 12, 13, 14, 15, 16, 17, 18, 19, 20, 21, 22, 23, 24, 25, 26, 27, 28, 29, 30, 31, 32, 33, 34, 35, 36, 37, 38, 39, 40, 41, 42, 43, 44, 45, 46, 47, 48, 49, 50, 51, 52, 53, 54, 55, 56, 57, 58, 59, 60, 61, 62, 63, 64, 65, 66, 67, 68, 69, 70, 71, 72, 73, 74, 75, 76, 77, 78, 79, 80, 81, 82, 83, 84, 85, 86, 87, 88, 89, 90, 91, 92, 93, 94, 95, 96, 97, 98, 99, 100, 101, 102, 103, 104, 105, 106, 107, 108, 109, 110, 111, 112, 113, 114, 115, 116, 117, 118, 119, 120, 121, 122, 123, 124, 125, 126, 127, 128, 129, 130, 131, 132, 133, 134, 135, 136, 137, 138, 139, 140, 141, 142, 143, 144, 145, 146, 147, 148, 149, 150, 151, 152, 153, 154, 155, 156, 157, 158, 159, 160, 161, 162, 163, 164, 165, 166, 167, 168, 169, 170, 171, 172, 173, 174, 175, 176, 177, 178, 179, 180, 181, 182, 183, 184, 185, 186, 187, 188, 189, 190, 191, 192, 193, 194, 195, 196, 197, 198, 199, 200, 201, 202, 203, 204, 205, 206, 207, 208, 209, 210, 211, 212, 213, 214, 215, 216, 217, 218, 219, 220, 221, 222, 223, 224, 225, 226, 227, 228, 229, 230, 231, 232, 233, 234, 235, 23, 236, 238, 239, 240, 241, 242, 243, 244, 245, 246, 247, 248, 249, 250, 251, 252, 253, 254, 255, 256, 257, 258, 259, 260, 261, 262, 263, 264, 265, 266, 267, 268, 269, 270, 271, 272, 273, 274, 275, 276, 277, 278, 279, 280, 281, 282, 283, 284, 285, 286, 287, 288, 289, 290, 291, 292, 293, 294, 295, 296, 297, 298, 299, 300, 301, 302, 303, 304, 305, 306, 307, 308, 309, 310, 311, 312, 313, 314, 315, 316, 317, 318, 319, 320, 321, 322, 323, 324, 325, 326, 327, 328, 329, 330, 331, 332, 333, 334, 335, 336, 337, 338, 339, 340, 341, 342, 343, 344, 345, 346, 347, 348, 349, 350, 351, 352, 353, 354, 355, 356, 357, 358, 359, 360, 361, 362, 363, 364, 365, 366, 367, 368, 369, 370, 371, 372, 373, 374, 375, 376, 377, 378, 379, 380, 381, 382, 383, 384, 385, 386, 387, 388, 389, 390, 391, 392, 393, 394, 395, 396, 397, 398, 399, 400, 401, 402, 403, 404, 405, 406, 407, 408, 409, 410, 411, 412, 413, 414, 415, 416, 417, 418, 419, 420, 421, 422, 423, 424, 425, 426, 427, 428, 429, 430, 431, 432, 433, 434, 435, 436, 437, 438, 439, 440, 441, 442, 443, 444, 445, 446, 447, 448, 449, 450, 451, 452, 453, 454, 455, 456, 457, 458, 459, 460, 461, 462, 463, 464, 465, 466, 467, 468, 469, 470, 471, 472, 473, 474, 475, 476, 477, 478, 479, 480, 481, 482, 483, 484, 485, 486, 487, 488, 489, 490, 491, 492, 493, 494, 495, 496, 497, 498, 499, 500, 501, 502, 503, 504, 505, 506, 507, 508, 509, 510, 511, 512, 513, 514, 515, 516, 517, 518, 519, 520, 521, 522, 523, 524, 525, 526, 527, 528, 529, 530, 531, 532, 533, 534, 535, 536, 537, 538, 539, 540, 541, 542, 543, 544, 545, 546, 547, 548, 549, 550, 551, 552, 553, 554, 555, 556, 557, 558, 559, 560, 561, 562, 563, 564, 565, 566, 567, 568, 569, 570, 571, 572, 573, 574, 575, 576, 577, 578, 579, 580, 581, 582, 583, 584, 585, 586, 587, 588, 589, 590, 591, 592, 593, 594, 595, 596, 597, 598, 599, 600, 601, 602, 603, 604, 605, 606, 607, 608, 609, 610, 611, 612, 613, 614, 615, 616, 617, 618, 619, 620, 621, 622, 623, 624, 625, 626, 627, 628, 629, 630, 631, 632, 633, 634, 635, 636, 637, 638, 639, 640, 641, 642, 643, 644, 645, 646, 647, 648, 649, 650, 651, 652, 653, 654, 655, 656, 657, 658, 659, 660, 661, 662, 663, 664, 665, 666, 667, 668, 669, 670, 671, 672, 673, 674, 675, 676, 677, 678, 679, 680, 681, 682, 683, 684, 685, 686, 687, 688, 689, 690, 691, 692, 693, 694, 695, 696, 697, 698, 699, 700, 701, 702, 703, 704, 705, 706, 707, 708, 709, 710, 711, 712, 713, 714, 715, 716, 717, 718, 719, 720, 721, 722, 723, 724, 725, 726, 727, 728, 729, 730, 731, 732, 733, 734, 735, 736, 737, 738, 739, 740, 741, 742, 743, 744, 745, 746, 747, 748, 749, 750, 751, 752, 753, 754, 755, 756, 757, 758, 759, 760, 761, 762, 763, 764, 765, 766, 767, 768, 769, 770, 771, 772, 773, 774, 775, 776, 777, 778, 779, 780, 781, 782, 783, 784, 785, 786, 787, 788, 789, 790, 791, 792, 793, 794, 795, 796, 797, 798, 799, 800, 801, 802, 803, 804, 805, 806, 807, 808, 809, 810, 811, 812, 813, 814, 815, 816, 817, 818, 819, 820, 821, 822, 823, 824, 825, 826, 827, 828, 829, 830, 831, 832, 833, 834, 835, 836, 837, 838, 839, 840, 841, 842, 843, 844, 845, 846, 847, 848, 849, 850, 851, 852, 853, 854, 855, 856, 857, 858, 859, 860, 861, 862, 863, 864, 865, 866, 867, 868, 869, 870, 871, 872, 873, 874, 875, 876, 877, 878, 879, 880, 881, 882, 883, 884, 885, 886, 887, 888, 889, 890, 891, 892, 893, 894, 895, 896, 897, 898, 899, 900, 901, 902, 903, 904, 905, 906, 907, 908, 909, 910, 911, 912, 913, 914, 915, 916, 917, 918, 919, 920, 921, 922, 923, 924, 925, 926, 927, 928, 929, 930, 931, 932, 933, 934, 935, 936, 937, 938, 939, 940, 941, 942, 943, 944, 945, 946, 947, 948, 949, 950, 951, 952, 953, 954, 955, 956, 957, 958, 959, 960, 961, 962, 963, 964, 965, 966, 967, 968, 969, 970, 971, 972, 973, 974, 975, 976, 977, 978, 979, 980, 981, 982, 983, 984, 985, 986, 987, 988, 989, 990, 991, 992, 993, 994, 995, 996, 997, 998, 999, 1000, 1375, 1376, 1377, 1378, 1379, 1380, 1381, 1382, 1383, 1384, 1385, 1386, 1387, 1388, 1389, 1390, 1391, 1392, 1393, 1394, 1395, 1396, 1397, 1398, 1399, 1400, 1401, 1402, 1403, 1404, 1405, 1406, 1407, 1408, 1409, 1410, 1411, 1412, 1413, 1414, 1415, 1416, 1417, 1418, 1419, 1420, 1421, 1422, 1423, 1424, 1425, 1426, 1427, 1428, 1429, 1430, 1431, 1432, 1433, 1434, 1435, 1436, 1437, 1438, 1439, 1440, 1441, 1442, 1443, 1444, 1445, 1446, 1447, 1448, 1449, 1450, 1660, 1661, 1662, 1663, 1664, 1665, 1666, 1667, 1668, 1669, 1670, 1671, 1672, 1673, 1674, 1675, 2050, 2051, 2052, 2053, 2054, 2055, 2056, 2057, 2058, 2059, 2060, 2061, 2062, 2063, 2064, 2065, 2066, 2067, 2068, 2069, 2070, 2071, 2072, 2073, 2074, 2075, 2076, 2077, 2078, 2079, 2080, 2081, 2082, 2083, 2084, 2085, 2086, 2087, 2088, 2089, 2090, 2091, 2092, 2093, 2094, 2095, 2096, 2097, 2098, 2099, 2100, 2580, 2581, 2582, 2583, 2584, 2585, 2586, 2587, 2588, 2589, 2590, 2591, 2592, 2593, 2594, 2595, 2596, 2597, 2598, 2599, 2600, 2601, 2602, 2603, 2604, 2605, 4525, 4526, 4527, 4528, 4529, 4530, 4531, 4532, 4533, 4534, 4535, 4536, 4537, 4538, 4539, 4540, 4541, 4542, 4543, 4544, 4545, 4546, 4547, 4548, 4549, 4550, 4575, 4576, 4577, 4578, 4579, 4580, 4581, 4582, 4583, 4584, 4585, 4586, 4587, 4588, 4589, 4590, 4591, 4592, 4593, 4594, 4595, 4596, 4597, 4598, 4599, 4600, 4850, 4851, 4852, 4853, 4854, 4855, 4856, 4857, 4858, 4859, 4860, 4861, 4862, 4863, 4864, 4865, 4866, 4867, 4868, 4869, 4870, 4871, 4872, 4873, 4874, 4875, 4876, 4877, 4878, 4879, 4880, 4881, 4882, 4883, 4884, 4885, 4886, 4887, 4888, 4889, 4890, 4891, 4892, 4893, 4894, 4895, 4896, 4897, 4898, 4899, 4900, 5460, 5461, 5462, 5463, 5464, 5465, 5466, 5467, 5468, 5469, 5470, 5471, 5472, 5473, 5474, 5475, 5476, 5477, 5478, 5479, 5480, 6175, 6176, 6177, 6178, 6179, 6180, 6181, 6182, 6183, 6184, 6185, 6186, 6187, 6188, 6189, 6190, 6191, 6192, 6193, 6194, 6195, 6196, 6197, 6198, 6199, 6200, 6315, 6316, 6317, 6318, 6319, 6320, 6321, 6322, 6323, 6324, 6325, 6326, 6327, 6328, 6329, 6330, 6331, 6332, 6333, 6334, 6335, 6336, 6337, 6338, 6339, 6340, 6341, 6342, 6343, 6344, 6345, 6600, 6601, 6602, 6603, 6604, 6605, 6606, 6607, 6608, 6609, 6610, 6611, 6612, 6613, 6614, 6615, 6725, 6726, 6727, 6728, 6729, 6730, 6731, 6732, 6733, 6734, 6735, 6736, 6737, 6738, 6739, 6740, 6741, 6742, 6743, 6744, 6745, 6746, 6747, 6748, 6749, 6750, 6751, 6752, 6753, 6754, 6755, 6756, 6757, 6758, 6759, 6760, 6761, 6762, 6763, 6764, 6765, 6766, 6767, 6768, 6769, 6770, 6771, 6772, 6773, 6774, 6775, 7655, 7656, 7657, 7658, 7659, 7660, 7661, 7662, 7663, 7664, 7665, 7666, 7667, 7668, 7669, 7670, 7671, 7672, 8510, 8511, 8512, 8513, 8514, 8515, 8516, 8715, 8716, 8717, 8718, 8719, 8720, 8721, 8722, 8723, 8724, 8725, 8726, 8727, 8728, 8729, 8730, 8731, 8732, 8733, 8734, 8735, 8736, 8737, 8738, 8739, 8740, 8741, 8742, 8743, 8744, 8745, 9250, 9251, 9252, 9253, 9254, 9255, 9256, 9257, 9258, 9259, 9260, 9261, 9262, 9263, 9264, 9265, 9266, 9267, 9268, 9269, 9270, 9480, 9481, 9482, 9483, 9484, 9485, 9486, 9487, 9488, 9489, 9490, 9491, 9492, 9493, 9494, 9495, 9496, 9497, 9498, 9499, 9500, 9575, 9576, 9577, 9578, 9579, 9580, 9581, 9582, 9583, 9584, 9585, 9586, 9587, 9588, 9589, 9590, 10525, 10526, 10527, 10528, 10529, 10530, 10531, 10532, 10533, 10534, 10535, 10536, 10537, 10538, 10539, 10540, 11545, 11546, 11547, 11548, 11549, 11550, 11551, 11552, 11553, 11554, 11555, 11556, 11557, 11558, 11559, 11560, 11875, 11876, 11877, 11878, 11879, 11880, 11881, 11882, 11883, 11884, 11885, 11886, 11887, 11888, 11889, 11890, 11891, 11892, 11893, 11894, 11895, 11896, 11897, 11898, 11899, 11900, 11915, 11916, 11917, 11918, 11919, 11920, 11921, 11922, 11923, 11924, 11925, 11926, 11927, 11928, 11929, 11930, 11931, 11932, 11933, 11934, 11935, 11936, 11937, 11938, 11939, 11940, 13375, 13376, 13377, 13378, 13379, 13380, 13381, 13382, 13383, 13384, 13385, 13386, 13387, 13388, 13389 and 13390 on the target mRNA sequence.

[0451] In some embodiments, the antisense strand and target mRNA sequences have 100% complementarity. The antisense strand may be complementary to any part of the target mRNA sequence.

[0452] In other embodiments, the antisense strand and target mRNA sequences comprise at least one mismatch. As a non-limiting example, the antisense strand and the target mRNA sequence have at least 30%, 40%, 50%, 60%, 70%, 80%, 81%, 82%, 83%, 84%, 85%, 86%, 87%, 88%, 89%, 90%, 91%, 92%, 93%, 94%, 95%, 96%, 97%, 98% or 99% or at least 20-30%, 20-40%, 20-50%, 20-60%, 20-70%, 20-80%, 20-90%, 20-95%, 20-99%, 30-40%, 30-50%, 30-60%, 30-70%, 30-80%, 30-90%, 30-95%, 30-99%, 40-50%, 40-60%, 40-70%, 40-80%, 40-90%, 40-95%, 40-99%, 50-60%, 50-70%, 50-80%, 50-90%, 50-95%, 50-99%, 60-70%, 60-80%, 60-90%, 60-95%, 60-99%, 70-80%, 70-90%, 70-95%, 70-99%, 80-90%, 80-95%, 80-99%, 90-95%, 90-99% or 95-99% complementarity.

[0453] In one embodiment, an siRNA or dsRNA includes at least two sequences that are complementary to each other.

[0454] According to the present invention, the siRNA molecule has a length from about 10-50 or more nucleotides, i.e., each strand comprising 10-50 nucleotides (or nucleotide analogs). Preferably, the siRNA molecule has a length from about 15-30, e.g., 15, 16, 17, 18, 19, 20, 21, 22, 23, 24, 25, 26, 27, 28, 29, or 30 nucleotides in each strand, wherein one of the strands is sufficiently complementarity to a target region. In one embodiment, each strand of the siRNA molecule has a length from about 19 to 25, 19 to 24 or 19 to 21 nucleotides. In one embodiment, at least one strand of the siRNA molecule is 19 nucleotides in length. In one embodiment, at least one strand of the siRNA molecule is 20 nucleotides in length. In one embodiment, at least one strand of the siRNA molecule is 21 nucleotides in length. In one embodiment, at least one strand of the siRNA molecule is 22 nucleotides in length. In one embodiment, at least one strand of the siRNA molecule is 23 nucleotides in length. In one embodiment, at least one strand of the siRNA molecule is 24 nucleotides in length. In one embodiment, at least one strand of the siRNA molecule is 25 nucleotides in length.

[0455] In some embodiments, the siRNA molecules of the present invention can be synthetic RNA duplexes comprising about 19 nucleotides to about 25 nucleotides, and two overhanging nucleotides at the 3′-end. In some aspects, the siRNA molecules may be unmodified RNA molecules. In other aspects, the siRNA molecules may contain at least one modified nucleotide, such as base, sugar or backbone modifications.

[0456] In one embodiment, the siRNA molecules of the present invention may comprise an antisense sequence and a sense sequence, or a fragment or variant thereof. As a non-limiting example, the antisense sequence and the sense sequence have at least 30%, 40%, 50%, 60%, 70%, 80%, 81%, 82%, 83%, 84%, 85%, 86%, 87%, 88%, 89%, 90%, 91%, 92%, 93%, 94%, 95%, 96%, 97%, 98% or 99% or at least 20-30%, 20-40%, 20-50%, 20-60%, 20-70%, 20-80%, 20-90%, 20-95%, 20-99%, 30-40%, 30-50%, 30-60%, 30-70%, 30-80%, 30-90%, 30-95%, 30-99%, 40-50%, 40-60%, 40-70%, 40-80%, 40-90%, 40-95%, 40-99%, 50-60%, 50-70%, 50-80%, 50-90%, 50-95%, 50-99%, 60-70%, 60-80%, 60-90%, 60-95%, 60-99%, 70-80%, 70-90%, 70-95%, 70-99%, 80-90%, 80-95%, 80-99%, 90-95%, 90-99^{%} or 95-99% complementarity.

[0457] In other embodiments, the siRNA molecules of the present invention can be encoded in plasmid vectors, AAV particles, viral genome or other nucleic acid expression vectors for delivery to a cell.

[0458] DNA expression plasmids can be used to stably express the siRNA duplexes or dsRNA of the present invention in cells and achieve long-term inhibition of the target gene expression. In one aspect, the sense and antisense strands of a siRNA duplex are typically linked by a short spacer sequence leading to the expression of a stem-loop structure termed short hairpin RNA (shRNA). The hairpin is recognized and cleaved by Dicer, thus generating mature siRNA molecules.

[0459] According to the present invention, AAV particles comprising the nucleic acids encoding the siRNA molecules targeting the mRNA are produced, the AAV serotypes may be any of the serotypes listed in Table 1. Non-limiting examples of the AAV serotypes include, AAV1, AAV2, AAV3, AAV4, AAV5, AAV6, AAV7, AAV8, AAV9, AAV9.47, AAV9(hu14), AAV10, AAV11, AAV12, AAVrh8, AAVrh10, AAV-DJ8, AAV-DJ, AAV-PHP.A. and/or AAV-PHP.B, AAVPHP.B2, AAVPHP.B3, AAVPHP.N/PHP.B-DGT, AAVPHP.B-EST, AAVPHP.B-GGT, AAVPHP.B-ATP, AAVPHP.B-ATT-T, AAVPHP.B-DGT-T, AAVPHP.B-GGT-T, AAVPHP.B-SGS, AAVPHP.B-AQP, AAVPHP.B-QQP, AAVPHP.B-SNP(3), AAVPHP.B-SNP, AAVPHP.B-QGT, AAVPHP.B-NQT, AAVPHP.B-EGS, AAVPHP.B-SGN, AAVPHP.B-EGT, AAVPHP.B-DST, AAVPHP.B-DST, AAVPHP.B-STP, AAVPHP.B-PQP, AAVPHP.B-SQP, AAVPHP.B-QLP, AAVPHP.B-TMP, AAVPHP.B-TTP AAVPHP.S/G2A12, AAVG2A15/G2A3, AAVG2B4, AAVG2B5 and variants thereof.

[0460] In some embodiments, the siRNA duplexes or encoded dsRNA of the present invention suppress (or degrade) the target mRNA. Accordingly, the siRNA duplexes or encoded dsRNA can be used to substantially inhibit the gene expression in a cell, for example a neuron. In some aspects, the inhibition of the gene expression refers to an inhibition by at least about 20%, preferably by at least about 30%, 40%, 50%, 60%, 70%, 80%, 85%, 90%, 95% and 100%, or at least 20-30%, 20-40%, 20-50%, 20-60%, 20-70%, 20-80%, 20-90%, 20-95%, 20-100%, 30-40%, 30-50%, 30-60%, 30-70%, 30-80%, 30-90%, 30-95%, 30-100%, 40-50%, 40-60%, 40-70%, 40-80%, 40-90%, 40-95%, 40-100%, 50-60%, 50-70%, 50-80%, 50-90%, 50-95%, 50-100%, 60-70%, 60-80%, 60-90.& 60-95%, 60-100%, 70-80%, 70-90%, 70-95%, 70-100%, 80-90%, 80-95%, 80-100%, 90-95%, 90-100% or 95-100%. Accordingly, the protein product of the targeted gene may be inhibited by at least about 20%, preferably by at least about 30%, 40%, 50%, 60%, 70%, 800, 85%, 90%, 95% and 100%, or at least 20-30%, 20-40%, 20-50%, 20-60%, 20-70%, 20-80%, 20-90%, 20-95%, 20-100%, 30-40%, 30-50%, 30-60%, 30-70%, 30-80%, 30-90%, 30-95%, 30-100%, 40-50%, 40-60%, 40-70%, 40-80%, 40-90%, 40-95%, 40-100%, 50-60%, 50-700%, 50-80%, 50-90%, 50-95%, 50-100%, 60-70%, 60-80%, 60-90%, 60-95%, 60-100%, 70-80%, 70-90%, 70-95%, 70-100%, 80-90%, 80-95%, 80-100%, 90-95%, 90-100% or 95-100%.

[0461] In one embodiment, the siRNA molecules comprise a miRNA seed match for the target located in the guide strand. In another embodiment, the siRNA molecules comprise a miRNA seed match for the target located in the passenger strand. In yet another embodiment, the siRNA duplexes or encoded dsRNA targeting the gene of interest do not comprise a seed match for the target located in the guide or passenger strand.

[0462] In one embodiment, the siRNA duplexes or encoded dsRNA targeting the gene of interest may have almost no significant full-length off target effects for the guide strand. In another embodiment, the siRNA duplexes or encoded dsRNA targeting the gene of interest may have almost no significant full-length off target effects for the passenger strand. The siRNA duplexes or encoded dsRNA targeting the gene of interest may have less than 1%, 2%, 3%, 4%, 5%, 6%, 7%, 8%, 9%, 10%,11%, 12%, 13%, 14%, 15%, 20%, 25%, 30%, 35%, 40%, 45%, 50%, 1-5%, 2-6%, 3-7%, 4-8%, 5-9%, 5-10%, 6-10%, 5-15%, 5-20%, 5-25% 5-30%, 10-20%, 10-30%, 10-40%, 10-50%, 15-30%, 15-40%, 15-45%, 20-40%, 20-50%, 25-50%, 30-40%, 30-50%, 35-50%, 40-50%, 45-50% full-length off target effects for the passenger strand. In yet another embodiment, the siRNA duplexes or encoded dsRNA targeting the gene of interest may have almost no significant full-length off target effects for the guide strand or the passenger strand. The siRNA duplexes or encoded dsRNA targeting the gene of interest may have less than 1%, 2%, 3%, 4%, 5%, 6%, 7%, 8%, 9%, 10%,11%, 12%, 13%, 14%, 15%, 20%, 25%, 30%, 35%, 40%, 45%, 50%, 1-5%, 2-6%, 3-7%, 4-8%, 5-9%, 5-10%, 6-10%, 5-15%, 5-20%, 5-25% 5-30%, 10-20%, 10-30%, 10-40%, 10-50%, 15-30%, 15-40%, 15-45%, 20-40%, 20-50%, 25-50%, 30-40%, 30-50%, 35-50%, 40-50%, 45-50% full-length off target effects for the guide or passenger strand.

[0463] In one embodiment, the siRNA duplexes or encoded dsRNA targeting the gene of interest may have high activity in vitro. In another embodiment, the siRNA molecules may have low activity in vitro. In yet another embodiment, the siRNA duplexes or dsRNA targeting the gene of interest may have high guide strand activity and low passenger strand activity in vitro.

[0464] In one embodiment, the siRNA molecules have a high guide strand activity and low passenger strand activity in vitro. The target knock-down (KD) by the guide strand may be at least 40%, 50%, 60%, 65%, 70%, 75%, 80%, 85%, 90%, 95%, 99%, 99.5% or 100%. The target knock-down by the guide strand may be 40-50%, 45-50%, 50-55%, 50-60%, 60-65%, 60-70%, 60-75%, 60-80%, 60-85%, 60-90%, 60-95%, 60-99%, 60-99.5%, 60-100%, 65-70%, 65-75%, 65-80%, 65-85%, 65-90%, 65-95%, 65-99%, 65-99.5%, 65-100%, 70-75%, 70-80%, 70-85%, 70-90%, 70-95%, 70-99%, 70-99.5%, 70-100%, 75-80%, 75-85%, 75-90%, 75-95%, 75-99%, 75-99.5%, 75-100%, 80-85%, 80-90%, 80-95%, 80-99%, 80-99.5%, 80-100%, 85-90%, 85-95%, 85-99%, 85-99.5%, 85-100%, 90-95%, 90-99%, 90-99.5%, 90-100%, 95-99%, 95-99.5%, 95-100%, 99-99.5%, 99-100% or 99.5-100%. As a non-limiting example, the target knock-down (KD) by the guide strand is greater than 70%. As a non-limiting example, the target knock-down (KD) by the guide strand is greater than 60%.

[0465] In one embodiment, the siRNA duplex is designed so there is no miRNA seed match for the sense or antisense sequence to the non-gene of interest sequence.

[0466] In one embodiment, the IC₅₀ of the guide strand for the nearest off target is greater than 100 multiplied by the IC₅₀ of the guide strand for the on-target gene. As a non-limiting example, if the IC₅₀ of the guide strand for the nearest off target is greater than 100 multiplied by the IC₅₀ of the guide strand for the target then the siRNA molecule is said to have high guide strand selectivity for inhibiting the gene of interest in vitro.

[0467] In one embodiment, the 5′ processing of the guide strand has a correct start (n) at the 5′ end at least 75%, 80%, 85%, 90%, 95%, 99% or 100% of the time in vitro or in vivo. As a non-limiting example, the 5′ processing of the guide strand is precise and has a correct start (n) at the 5′ end at least 99% of the time in vitro. As a non-limiting example, the 5′ processing of the guide strand is precise and has a correct start (n) at the 5′ end at least 99% of the time in vivo. As a non-limiting example, the 5′ processing of the guide strand is precise and has a correct start (n) at the 5′ end at least 90% of the time in vitro. As a non-limiting example, the 5′ processing of the guide strand is precise and has a correct start (n) at the 5′ end at least 90% of the time in vivo. As a non-limiting example, the 5′ processing of the guide strand is precise and has a correct start (n) at the 5′ end at least 85% of the time in vitro. As a non-limiting example, the 5′ processing of the guide strand is precise and has a correct start (n) at the 5′ end at least 85% of the time in vivo.

[0468] In one embodiment, the guide to passenger (G:P) (also referred to as the antisense to sense) strand ratio expressed is 1:10, 1:9, 1:8, 1:7, 1:6, 1:5, 1:4, 1:3, 1:2, 1;1, 2:10, 2:9, 2:8, 2:7, 2:6, 2:5, 2:4, 2:3, 2:2, 2:1, 3:10, 3:9, 3:8, 3:7, 3:6, 3:5, 3:4, 3:3, 3:2, 3:1, 4:10, 4:9, 4:8, 4:7, 4:6, 4:5, 4:4, 4:3.4:2, 4:1, 5:10, 5:9, 5:8, 5:7, 5:6, 5:5, 5:4, 5:3, 5:2, 5:1, 6:10, 6:9, 6:8, 6:7, 6:6, 6:5, 6:4, 6:3, 6:2, 6:1, 7:10, 7:9, 7:8, 7:7, 7:6, 7:5, 7:4, 7:3, 7:2, 7:1, 8:10, 8:9, 8:8, 8:7, 8:6, 8:5, 8:4, 8:3, 8:2, 8:1, 9:10, 9:9, 9:8, 9:7, 9:6, 9:5, 9:4, 9:3, 9:2, 9:1, 10:10, 10:9, 10:8, 10:7, 10:6, 10:5, 10:4, 10:3, 10:2, 10:1, 1:99, 5:95, 10:90, 15:85, 20:80, 25:75, 30:70, 35:65, 40:60, 45:55, 50:50, 55:45, 60:40, 65:35, 70:30, 75:25, 80:20, 85:15, 90:10, 95:5, or 99:1 in vitro or in vivo. The guide to passenger ratio refers to the ratio of the guide strands to the passenger strands after intracellular processing of the pri-microRNA. For example, a 80:20 of guide-to-passenger ratio would have 8 guide strands to every 2 passenger strands processed from the precursor. As a non-limiting example, the guide-to-passenger strand ratio is 8:2 in vitro. As a non-limiting example, the guide-to-passenger strand ratio is 8:2 in vivo. As a non-limiting example, the guide-to-passenger strand ratio is 9:1 in vitro. As a non-limiting example, the guide-to-passenger strand ratio is 9:1 in vivo.

[0469] In one embodiment, the guide to passenger (G:P) (also referred to as the antisense to sense) strand ratio expressed is greater than 1.

[0470] In one embodiment, the guide to passenger (G:P) (also referred to as the antisense to sense) strand ratio expressed is greater than 2.

[0471] In one embodiment, the guide to passenger (G:P) (also referred to as the antisense to sense) strand ratio expressed is greater than 5.

[0472] In one embodiment, the guide to passenger (G:P) (also referred to as the antisense to sense) strand ratio expressed is greater than 10.

[0473] In one embodiment, the guide to passenger (G:P) (also referred to as the antisense to sense) strand ratio expressed is greater than 20.

[0474] In one embodiment, the guide to passenger (G:P) (also referred to as the antisense to sense) strand ratio expressed is greater than 50.

[0475] In one embodiment, the guide to passenger (G:P) (also referred to as the antisense to sense) strand ratio expressed is at least 3:1.

[0476] In one embodiment, the guide to passenger (G:P) (also referred to as the antisense to sense) strand ratio expressed is at least 5:1.

[0477] In one embodiment, the guide to passenger (G:P) (also referred to as the antisense to sense) strand ratio expressed is at least 10:1.

[0478] In one embodiment, the guide to passenger (G:P) (also referred to as the antisense to sense) strand ratio expressed is at least 20:1.

[0479] In one embodiment, the guide to passenger (G:P) (also referred to as the antisense to sense) strand ratio expressed is at least 50:1.

[0480] In one embodiment, the passenger to guide (P:G) (also referred to as the sense to antisense) strand ratio expressed is 1:10, 1:9, 1:8, 1:7, 1:6, 1:5, 1:4, 1:3, 1:2, 1;1, 2:10, 2:9, 2:8, 2:7, 2:6, 2:5, 2:4, 2:3, 2:2, 2:1, 3:10, 3:9, 3:8, 3:7, 3:6, 3:5, 3:4, 3:3, 3:2, 3:1, 4:10, 4:9, 4:8, 4:7, 4:6, 4:5, 4:4, 4:3, 4:2, 4:1, 5:10, 5:9, 5:8, 5:7, 5:6, 5:5, 5:4, 5:3, 5:2, 5:1, 6:10, 6:9, 6:8, 6:7, 6:6, 6:5, 6:4, 6:3, 6:2, 6:1, 7:10, 7:9, 7:8, 7:7, 7:6, 7:5, 7:4, 7:3, 7:2, 7:1, 8:10, 8:9, 8:8, 8:7, 8:6, 8:5, 8:4, 8:3, 8:2, 8:1, 9:10, 9:9, 9:8, 9:7, 9:6, 9:5, 9:4, 9:3, 9:2, 9:1, 10:10, 10:9, 10:8, 10:7, 10:6, 10:5, 10:4, 10:3, 10:2, 10:1, 1:99, 5:95, 10:90, 15:85, 20:80, 25:75, 30:70, 35:65, 40:60, 45:55, 50:50, 55:45, 60:40, 65:35, 70:30, 75:25, 80:20, 85:15, 90:10, 95:5, or 99:1 in vitro or in vivo. The passenger to guide ratio refers to the ratio of the passenger strands to the guide strands after the intracellular processing of the pri-microRNA. For example, a 80:20 passenger-to-guide ratio would have 8 passenger strands to every 2 guide strands processed from the precursor. As a non-limiting example, the passenger-to-guide strand ratio is 80:20 in vitro. As a non-limiting example, the passenger-to-guide strand ratio is 80:20 in vivo. As a non-limiting example, the passenger-to-guide strand ratio is 8:2 in vitro. As a non-limiting example, the passenger-to-guide strand ratio is 8:2 in vivo. As a non-limiting example, the passenger-to-guide strand ratio is 9:1 in vitro. As a non-limiting example, the passenger-to-guide strand ratio is 9:1 in vivo.

[0481] In one embodiment, the passenger to guide (P:G) (also referred to as the sense to antisense) strand ratio expressed is greater than 1.

[0482] In one embodiment, the passenger to guide (P:G) (also referred to as the sense to antisense) strand ratio expressed is greater than 2.

[0483] In one embodiment, the passenger to guide (P:G) (also referred to as the sense to antisense) strand ratio expressed is greater than 5.

[0484] In one embodiment, the passenger to guide (P:G) (also referred to as the sense to antisense) strand ratio expressed is greater than 10.

[0485] In one embodiment, the passenger to guide (P:G) (also referred to as the sense to antisense) strand ratio expressed is greater than 20.

[0486] In one embodiment, the passenger to guide (P:G) (also referred to as the sense to antisense) strand ratio expressed is greater than 50.

[0487] In one embodiment, the passenger to guide (P:G) (also referred to as the sense to antisense) strand ratio expressed is at least 3:1.

[0488] In one embodiment, the passenger to guide (P:G) (also referred to as the sense to antisense) strand ratio expressed is at least 5:1.

[0489] In one embodiment, the passenger to guide (P:G) (also referred to as the sense to antisense) strand ratio expressed is at least 10:1.

[0490] In one embodiment, the passenger to guide (P:G) (also referred to as the sense to antisense) strand ratio expressed is at least 20:1.

[0491] In one embodiment, the passenger to guide (P:G) (also referred to as the sense to antisense) strand ratio expressed is at least 50:1.

[0492] In one embodiment, a passenger-guide strand duplex is considered effective when the pri- or pre-microRNAs demonstrate, but methods known in the art and described herein, greater than 2-fold guide to passenger strand ratio when processing is measured. As a non-limiting examples, the pri- or pre-microRNAs demonstrate great than 2-fold, 3-fold, 4-fold, 5-fold, 6-fold 7-fold, 8-fold, 9-fold, 10-fold, 1-fold, 12-fold, 13-fold, 14-fold, 15-fold, or 2 to 5-fold, 2 to 10-fold, 2 to 15-fold, 3 to 5-fold, 3 to 10-fold, 3 to 15-fold, 4 to 5-fold, 4 to 10-fold, 4 to 15-fold, 5 to 10-fold, 5 to 15-fold, 6 to 10-fold, 6 to 15-fold, 7 to 10-fold, 7 to 15-fold, 8 to 10-fold, 8 to 15-fold, 9 to 10-fold, 9 to 15-fold 10 to 15-fold, 11 to 15-fold, 12 to 15-fold, 13 to 15-fold, or 14 to 15-fold guide to passenger strand ratio when processing is measured.

[0493] In one embodiment, the vector genome encoding the dsRNA comprises a sequence which is at least 60%, 65%, 70%, 75%, 80%, 85%, 90%, 95%, 99% or more than 99% of the full length of the construct. As a non-limiting example, the vector genome comprises a sequence which is at least 80% of the full length sequence of the construct.

[0494] In one embodiment, the siRNA molecules may be used to silence wild type or mutant version of the gene of interest by targeting at least one exon on the gene of interest sequence. The exon may be exon 1, exon 2, exon 3, exon 4, exon 5, exon 6, exon 7, exon 8, exon 9, exon 10, exon 11, exon 12, exon 13, exon 14, exon 15, exon 16, exon 17, exon 18, exon 19, exon 20, exon 21, exon 22, exon 23, exon 24, exon 25, exon 26, exon 27, exon 28, exon 29, exon 30, exon 31, exon 32, exon 33, exon 34, exon 35, exon 36, exon 37, exon 38, exon 39, exon 40, exon 41, exon 42, exon 43, exon 44, exon 45, exon 46, exon 47, exon 48, exon 49, exon 50, exon 51, exon 52, exon 53, exon 54, exon 55, exon 56, exon 57, exon 58, exon 59, exon 60, exon 61, exon 62, exon 63, exon 64, exon 65, exon 66, and/or exon 67.

Design and Sequences of siRNA Duplexes Targeting HTT Gene

[0495] The present invention provides small interfering RNA (siRNA) duplexes (and modulatory polynucleotides encoding them) that target HTT mRNA to interfere with HT gene expression and/or HTT protein production.

[0496] The encoded siRNA duplex of the present invention contains an antisense strand and a sense strand hybridized together forming a duplex structure, wherein the antisense strand is complementary to the nucleic acid sequence of the targeted HTT gene, and wherein the sense strand is homologous to the nucleic acid sequence of the targeted HTT gene. In some aspects, the 5′end of the antisense strand has a 5′ phosphate group and the 3′end of the sense strand contains a 3′hydroxyl group. In other aspects, there are none, one or 2 nucleotide overhangs at the 3′end of each strand.

[0497] Some guidelines for designing siRNAs have been proposed in the art. These guidelines generally recommend generating a 19-nucleotide duplexed region, symmetric 2-3 nucleotide 3′overhangs, 5′-phosphate and 3′-hydroxyl groups targeting a region in the gene to be silenced. Other rules that may govern siRNA sequence preference include, but are not limited to, (i) A/U at the 5′ end of the antisense strand; (ii) G/C at the 5′ end of the sense strand; (iii) at least five A/U residues in the 5′ terminal one-third of the antisense strand; and (iv) the absence of any GC stretch of more than 9 nucleotides in length. In accordance with such consideration, together with the specific sequence of a target gene, highly effective siRNA molecules essential for suppressing the Htt gene expression may be readily designed.

[0498] According to the present invention, siRNA molecules (e.g., siRNA duplexes or encoded dsRNA) that target the HTT gene are designed. Such siRNA molecules can specifically, suppress HTT gene expression and protein production. In some aspects, the siRNA molecules are designed and used to selectively “knock out” HTT gene variants in cells, i.e., mutated HTT transcripts that are identified in patients with HD disease. In some aspects, the siRNA molecules are designed and used to selectively “knock down” HTT gene variants in cells. In other aspects, the siRNA molecules are able to inhibit or suppress both the wild type and mutated HTT gene.

[0499] In one embodiment, an siRNA molecule of the present invention comprises a sense strand and a complementary antisense strand in which both strands are hybridized together to form a duplex structure. The antisense strand has sufficient complementarity to the HTT mRNA sequence to direct target-specific RNAi, i.e., the siRNA molecule has a sequence sufficient to trigger the destruction of the target mRNA by the RNAi machinery or process.

[0500] In one embodiment, an siRNA molecule of the present invention comprises a sense strand and a complementary antisense strand in which both strands are hybridized together to form a duplex structure and where the start site of the hybridization to the HTT mRNA is between nucleotide 100 and 7000 on the HTT mRNA sequence. As a non-limiting example, the start site may be between nucleotide 100-150, 150-200, 200-250, 250-300, 300-350, 350-400, 400-450, 450-500, 500-550, 550-600, 600-650, 650-700, 700-70, 750-800, 800-850, 850-900, 900-950, 950-1000, 1000-1050, 1050-1100, 1100-1150, 1150-1200, 1200-1250, 1250-1300, 1300-1350, 1350-1400, 1400-1450, 1450-1500, 1500-1550, 1550-1600, 1600-1650, 1650-1700, 1700-1750, 1750-1800, 1800-1850, 1850-1900, 1900-1950, 1950-2000, 2000-2050, 2050-2100, 2100-2150, 2150-2200, 2200-2250, 2250-2300, 2300-2350, 2350-2400, 2400-2450, 2450-2500, 2500-2550, 2550-2600, 2600-2650, 2650-2700, 2700-2750, 2750-2800, 2800-2850, 2850-2900, 2900-2950, 2950-3000, 3000-3050, 3050-3100, 3100-3150, 3150-3200, 3200-3250, 3250-3300, 3300-3350, 3350-3400, 3400-3450, 3450-3500, 3500-3550, 3550-3600, 3600-3650, 3650-3700, 3700-3750, 3750-3800, 3800-3850, 3850-3900, 3900-3950, 3950-4000, 4000-4050, 4050-4100, 4100-4150, 4150-4200, 4200-4250, 4250-4300, 4300-4350, 4350-4400, 4400-4450, 4450-4500, 4500-4550, 4550-4600, 4600-4650, 4650-4700, 4700-4750, 4750-4800, 4800-4850, 4850-4900, 4900-4950, 4950-5000, 5000-5050, 5050-5100, 5100-5150, 5150-5200, 5200-5250, 5250-5300, 5300-5350, 5350-5400, 5400-5450, 5450-5500, 5500-5550, 5550-5600, 5600-5650, 5650-5700, 5700-5750, 5750-5800, 5800-5850, 5850-5900, 5900-5950, 5950-6000, 6000-6050, 6050-6100, 6100-6150, 6150-6200, 6200-6250, 6250-6300, 6300-6350, 6350-6400, 6400-6450, 6450-6500, 6500-6550, 6550-6600, 6600-6650, 6650-6700, 6700-6750, 6750-6800, 6800-6850, 6850-6900, 6900-6950, 6950-7000, 7000-7050, 7050-7100, 7100-7150, 7150-7200, 7200-7250, 7250-7300, 7300-7350, 7350-7400, 7400-7450, 7450-7500, 7500-7550, 7550-7600, 7600-7650, 7650-7700, 7700-7750, 7750-7800, 7800-7850, 7850-7900, 7900-7950, 7950-8000, 8000-8050, 8050-8100, 8100-8150, 8150-8200, 8200-8250, 8250-8300, 8300-8350, 8350-8400, 8400-8450, 8450-8500, 8500-8550, 8550-8600, 8600-8650, 8650-8700, 8700-8750, 8750-8800, 8800-8850, 8850-8900, 8900-8950, 8950-9000, 9000-9050, 9050-9100, 9100-9150, 9150-9200, 9200-9250, 9250-9300, 9300-9350, 9350-9400, 9400-9450, 9450-9500, 9500-9550, 9550-9600, 9600-9650, 9650-9700, 9700-9750, 9750-9800, 9800-9850, 9850-9900, 9900-9950, 9950-10000, 10000-10050, 10050-10100, 10100-10150, 10150-10200, 10200-10250, 10250-10300, 10300-10350, 10350-10400, 10400-10450, 10450-10500, 10500-10550, 10550-10600, 10600-10650, 10650-10700, 10700-10750, 10750-10800, 10800-10850, 10850-10900, 10900-10950, 10950-11000, 11050-11100, 11100-11150, 11150-11200, 11200-11250, 11250-11300, 11300-11350, 11350-11400, 11400-11450, 11450-11500, 11500-11550, 11550-11600, 11600-11650, 11650-11700, 11700-11750, 11750-11800, 11800-11850, 11850-11900, 11900-11950, 11950-12000, 12000-12050, 12050-12100, 12100-12150, 12150-12200, 12200-12250, 12250-12300, 12300-12350, 12350-12400, 12400-12450, 12450-12500, 12500-12550, 12550-12600, 12600-12650, 12650-12700, 12700-12750, 12750-12800, 12800-12850, 12850-12900, 12900-12950, 12950-13000, 13050-13100, 13100-13150, 13150-13200, 13200-13250, 13250-13300, 13300-13350, 13350-13400, 13400-13450, and 13450-13500 on the HTT mRNA sequence. As yet another non-limiting example, the start site may be nucleotide 315, 316, 317, 318, 319, 320, 321, 322, 323, 324, 325, 326, 327, 328, 329, 330, 331, 332, 333, 334, 335, 336, 337, 338, 339, 340, 341, 342, 343, 344, 345, 346, 347, 348, 349, 350, 595, 596, 597, 598, 599, 600, 601, 602, 603, 604, 605, 606, 607, 608, 609, 610, 611, 612, 613, 614, 615, 616, 617, 618, 619, 620, 621, 622, 623, 624, 625, 715, 716, 717, 718, 719, 720, 721, 722, 723, 724, 725, 875, 876, 877, 878, 879, 880, 881, 882, 883, 884, 885, 886, 887, 888, 889, 890, 891, 892, 893, 894, 895, 896, 897, 898, 899, 900, 1375, 1376, 1377, 1378, 1379, 1380, 1381, 1382, 1383, 1384, 1385, 1386, 1387, 1388, 1389, 1390, 1391, 1392, 1393, 1394, 1395, 1396, 1397, 1398, 1399, 1400, 1401, 1402, 1403, 1404, 1405, 1406, 1407, 1408, 1409, 1410, 1411, 1412, 1413, 1414, 1415, 1416, 1417, 1418, 1419, 1420, 1421, 1422, 1423, 1424, 1425, 1426, 1427, 1428, 1429, 1430, 1431, 1432, 1433, 1434, 1435, 1436, 1437, 1438, 1439, 1440, 1441, 1442, 1443, 1444, 1445, 1446, 1447, 1448, 1449, 1450, 1660, 1661, 1662, 1663, 1664, 1665, 1666, 1667, 1668, 1669, 1670, 1671, 1672, 1673, 1674, 1675, 2050, 2051, 2052, 2053, 2054, 2055, 2056, 2057, 2058, 2059, 2060, 2061, 2062, 2063, 2064, 2065, 2066, 2067, 2068, 2069, 2070, 2071, 2072, 2073, 2074, 2075, 2076, 2077, 2078, 2079, 2080, 2081, 2082, 2083, 2084, 2085, 2086, 2087, 2088, 2089, 2090, 2091, 2092, 2093, 2094, 2095, 2096, 2097, 2098, 2099, 2100, 2580, 2581, 2582, 2583, 2584, 2585, 2586, 2587, 2588, 2589, 2590, 2591, 2592, 2593, 2594, 2595, 2596, 2597, 2598, 2599, 2600, 2601, 2602, 2603, 2604, 2605, 4525, 4526, 4527, 4528, 4529, 4530, 4531, 4532, 4533, 4534, 4535, 4536, 4537, 4538, 4539, 4540, 4541, 4542, 4543, 4544, 4545, 4546, 4547, 4548, 4549, 4550, 4575, 4576, 4577, 4578, 4579, 4580, 4581, 4582, 4583, 4584, 4585, 4586, 4587, 4588, 4589, 4590, 4591, 4592, 4593, 4594, 4595, 4596, 45974598, 4599, 4600, 4850, 4851, 4852, 4853, 4854, 4855, 4856, 4857, 4858, 4859, 4860, 4861, 4862, 4863, 4864, 4865, 4866, 4867, 4868, 4869, 4870, 4871, 4872, 4873, 4874, 4875, 4876, 4877, 4878, 4879, 4880, 4881, 4882, 4883, 4884, 4885, 4886, 4887, 4888, 4889, 4890, 4891, 4892, 4893, 4894, 4895, 4896, 4897, 4898, 4899, 4900, 5460, 5461, 5462, 5463, 5464, 5465, 5466, 5467, 5468, 5469, 5470, 5471, 5472, 5473, 5474, 5475, 5476, 5477, 5478, 5479, 5480, 6175, 6176, 6177, 6178, 6179, 6180, 6181, 6182, 6183, 6184, 6185, 6186, 6187, 6188, 6189, 6190, 6191, 6192, 6193, 6194, 6195, 6196, 6197, 6198, 6199, 6200, 6315, 6316, 6317, 6318, 6319, 6320, 6321, 6322, 6323, 6324, 6325, 6326, 6327, 6328, 6329, 6330, 6331, 6332, 6333, 6334, 6335, 6336, 6337, 6338, 6339, 6340, 6341, 6342, 6343, 6344, 6345, 6600, 6601, 6602, 6603, 6604, 6605, 6606, 6607, 6608, 6609, 6610, 6611, 6612, 6613, 6614, 6615, 6725, 6726, 6727, 6728, 6729, 6730, 6731, 6732, 6733, 6734, 6735, 6736, 6737, 6738, 6739, 6740, 6741, 6742, 6743, 6744, 6745, 6746, 6747, 6748, 6749, 6750, 6751, 6752, 6753, 6754, 6755, 6756, 6757, 6758, 6759, 6760, 6761, 6762, 6763, 6764, 6765, 6766, 6767, 6768, 6769, 6770, 6771, 6772, 6773, 6774, 6775, 7655, 7656, 7657, 7658, 7659, 7660, 7661, 7662, 7663, 7664, 7665, 7666, 7667, 7668, 7669, 7670, 7671, 7672, 8510, 8511, 8512, 8513, 8514, 8515, 8516, 8715, 8716, 8717, 8718, 8719, 8720, 8721, 8722, 8723, 8724, 8725, 8726, 8727, 8728, 8729, 8730, 8731, 8732, 8733, 8734, 8735, 8736, 8737, 8738, 8739, 8740, 8741, 8742, 8743, 8744, 8745, 9250, 9251, 9252, 9253, 9254, 9255, 9256, 9257, 9258, 9259, 9260, 9261, 9262, 9263, 9264, 9265, 9266, 9267, 9268, 9269, 9270, 9480, 9481, 9482, 9483, 9484, 9485, 9486, 9487, 9488, 9489, 9490, 9491, 9492, 9493, 9494, 9495, 9496, 9497, 9498, 9499, 9500, 9575, 9576, 9577, 9578, 9579, 9580, 9581, 9582, 9583, 9584, 9585, 9586, 9587, 9588, 9589, 9590, 10525, 10526, 10527, 10528, 10529, 10530, 10531, 10532, 10533, 10534, 10535, 10536, 10537, 10538, 10539, 10540, 11545, 11546, 11547, 11548, 11549, 11550, 11551, 11552, 11553, 11554, 11555, 11556, 11557, 11558, 11559, 11560, 11875, 11876, 11877, 11878, 11879, 11880, 11881, 11882, 11883, 11884, 11885, 11886, 11887, 11888, 11889, 11890, 11891, 11892, 11893, 11894, 11895, 11896, 11897, 11898, 11899, 11900, 11915, 11916, 11917, 11918, 11919, 11920, 11921, 11922, 11923, 11924, 11925, 11926, 11927, 11928, 11929, 11930, 11931, 11932, 11933, 11934, 11935, 11936, 11937, 11938, 11939, 11940, 13375, 13376, 13377, 13378, 13379, 13380, 13381, 13382, 13383, 13384, 13385, 13386, 13387, 13388, 13389 and 13390 on the HTT mRNA sequence.

[0501] In some embodiments, the antisense strand and target Htt mRNA sequences have 100% complementarity. The antisense strand may be complementary to any part of the target Htt mRNA sequence.

[0502] In other embodiments, the antisense strand and target Htt mRNA sequences comprise at least one mismatch. As a non-limiting example, the antisense strand and the target Htt mRNA sequence have at least 30%, 40%, 50%, 60%, 70%, 80%, 81%, 82%, 83%, 84%, 85%, 86%, 87%, 88%, 89%, 90%, 91%, 92%, 93%, 94%, 95%, 96%, 97%, 98% or 99% or at least 20-30%, 20-40%, 20-50%, 20-60%, 20-70%, 20-80%, 20-90%, 20-95%, 20-99%, 30-40%, 30-50%, 30-60%, 30-70%, 30-80%, 30-90%, 30-95%, 30-99%, 40-50%, 40-60%, 40-70%, 40-80%, 40-90%, 40-95%, 40-99%, 50-60%, 50-70%, 50-80%, 50-90%, 50-95%, 50-99%, 60-70%, 60-80%, 60-90%, 60-95%, 60-99%, 70-80%, 70-90%, 70-95%, 70-99%, 80-90%, 80-95%, 80-99%, 90-95%, 90-99% or 95-99% complementarity.

[0503] In one embodiment, an siRNA or dsRNA targeting Htt includes at least two sequences that are complementary to each other.

[0504] According to the present invention, the siRNA molecule targeting Htt has a length from about 10-50 or more nucleotides, i.e., each strand comprising 10-50 nucleotides (or nucleotide analogs). Preferably, the siRNA molecule has a length from about 15-30, e.g., 15, 16, 17, 18, 19, 20, 21, 22, 23, 24, 25, 26, 27, 28, 29, or 30 nucleotides in each strand, wherein one of the strands is sufficiently complementarity to a target region. In one embodiment, each strand of the siRNA molecule has a length from about 19 to 25, 19 to 24 or 19 to 21 nucleotides. In one embodiment, at least one strand of the siRNA molecule is 19 nucleotides in length. In one embodiment, at least one strand of the siRNA molecule is 20 nucleotides in length. In one embodiment, at least one strand of the siRNA molecule is 21 nucleotides in length. In one embodiment, at least one strand of the siRNA molecule is 22 nucleotides in length. In one embodiment, at least one strand of the siRNA molecule is 23 nucleotides in length. In one embodiment, at least one strand of the siRNA molecule is 24 nucleotides in length. In one embodiment, at least one strand of the siRNA molecule is 25 nucleotides in length.

[0505] In some embodiments, the siRNA molecules of the present invention targeting Htt can be synthetic RNA duplexes comprising about 19 nucleotides to about 25 nucleotides, and two overhanging nucleotides at the 3′-end. In some aspects, the siRNA molecules may be unmodified RNA molecules. In other aspects, the siRNA molecules may contain at least one modified nucleotide, such as base, sugar or backbone modifications.

[0506] In one embodiment, the siRNA molecules of the present invention targeting Htt may comprise a nucleotide sequence such as, but not limited to, the antisense (guide) sequences in Table 2 or a fragment or variant thereof. As a non-limiting example, the antisense sequence used in the siRNA molecule of the present invention is at least 30%, 40%, 50%, 60%, 70%, 80%, 81%, 82%, 83%, 84%, 85%, 86%, 87%, 88%, 89%, 90%, 91%, 92%, 93%, 94%, 95%, 96%, 97%, 98% or 99% or at least 20-30%, 20-40%, 20-50%, 20-60%, 20-70%, 20-80%, 20-90%, 20-95%, 20-99%, 30-40%, 30-50%, 30-60%, 30-70%, 30-80%, 30-90%, 30-95%, 30-99%, 40-50%, 40-60%, 40-70%, 40-80%, 40-90%, 40-95%, 40-99%, 50-60%, 50-70%, 50-80%, 50-90%, 50-95%, 50-99%, 60-70%, 60-80%, 60-90%, 60-95%, 60-99%, 70-80%, 70-90%, 70-95%, 70-99%, 80-90%, 80-95%, 80-99%, 90-95%, 90-99% or 95-99% of a nucleotide sequence in Table 2. As another non-limiting example, the antisense sequence used in the siRNA molecule of the present invention comprises at least 3, 4, 5, 6, 7, 8, 9, 10, 11, 12, 13, 14, 15, 16, 17, 18, 19, 20, 21 or more than 21 consecutive nucleotides of a nucleotide sequence in Table 2. As yet another non-limiting example, the antisense sequence used in the siRNA molecule of the present invention comprises nucleotides 1 to 22, 1 to 21, 1 to 20, 1 to 19, 1 to 18, 1 to 17, to 16, 1 to 15, 1 to 14, 1 to 13, to 12, 1 to 11, 1 to 10, 1 to 9, 1 to 8, 2 to 22, 2 to 21, 2 to 20, 2 to 19, 2 to 18, 2 to 17, 2 to 16, 2 to 15, 2 to 14, 2 to 13, 2 to 12, 2 to 11, 2 to 10, 2 to 9, 2 to 8, 3 to 22, 3 to 21, 3 to 20, 3 to 19, 3 to 18, 3 to 17, 3 to 16, 3 to 15, 3 to 14, 3 to 13, 3 to 12, 3 to 11, 3 to 10, 3 to 9, 3 to 8, 4 to 22, 4 to 21, 4 to 20, 4 to 19, 4 to 18, 4 to 17, 4 to 16, 4 to 15, 4 to 14, 4 to 13, 4 to 12.4 to 11, 4 to 10, 4 to 9, 4 to 8, 5 to 22, 5 to 21, 5 to 20, 5 to 19, 5 to 18, 5 to 17, 5 to 16, 5 to 15, 5 to 14, 5 to 13, 5 to 12, 5 to 11, 5 to 10, 5 to 9, 5 to 8, 6 to 22, 6 to 21, 6 to 20, 6 to 19, 6 to 18, 6 to 17, 6 to 16, 6 to 15, 6 to 14, 6 to 13, 6 to 12, 6 to 11, 6 to 10, 7 to 22, 7 to 21, 7 to 20, 7 to 19, 7 to 18, 7 to 17, 7 to 16, 7 to 15, 7 to 14, 7 to 13, 7 to 12, 8 to 22, 8 to 21, 8 to 20, 8 to 19, 8 to 18, 8 to 17, 8 to 16, 8 to 15, 8 to 14, 8 to 13, 8 to 12, 9 to 22, 9 to 21, 9 to 20, 9 to 19, 9 to 18, 9 to 17, 9 to 16, 9 to 15, 9 to 14, 10 to 22, 10 to 21, 10 to 20, 10 to 19, 10 to 18, 10 to 17, 0 to 16, 10 to 15, 10 to 14, 11 to 22, 11 to 2, 11 to 20, 11 to 19, 11 to 18, 11 to 17, 11 to 16, 11 to 15, 11 to 14, 12 to 22, 12 to 21, 12 to 20, 12 to 19, 12 to 18, 12 to 17, 12 to 16, 13 to 22, 13 to 21, 13 to 20, 13 to 19, 13 to 18, 13 to 17, 13 to 16, 14 to 22, 14 to 21, 14 to 20, 14 to 19, 14 to 18, 14 to 17, 15 to 22, 15 to 21, 15 to 20, 15 wt 19, 15 t 18, 16 to 22, 16 to 21, 16 to 20, 17 to 22, 17 to 21, or 18 to 22 of the sequences in Table 2,

TABLE 2
Antisense Sequences

| Antisense | | SEQ |
|---|---|---|
| ID | Sequence | ID NO |
| A-2000 | UUAACGUCAGUUCAUAAACUU | 916 |
| A-2000dt | UUAACGUCAGUUCAUAAACdTdT | 917 |
| A-2001 | UGUCGGUACCGUCUAACACUU | 918 |
| A-2001dt | UGUCGGUACCGUCUAACACdTdT | 919 |
| A-2002 | UAAGCAUGGAGCUAGCAGGUU | 920 |
| A-2002dt | UAAGCAUGGAGCUAGCAGGdTdT | 921 |
| A-2003 | UACAACGAGACUGAAUUGCUU | 922 |
| A-2003dt | UACAACGAGACUGAAUUGCdTdT | 923 |
| A-2004 | UUCAGUUCAUAAACCUGGAUU | 924 |
| A-2004dt | UUCAGUUCAUAAACCUGGAdTdT | 925 |
| A-2005 | UAACGUCAGUUCAUAAACCUU | 926 |
| A-2005dt | UAACGUCAGUUCAUAAACCATdT | 927 |
| A-2006 | UCCGGUCACAACAUUGUGGUU | 928 |
| A-2006dt | UCCGGUCACAACAUUGUGGdTdT | 929 |
| A-2007 | UUGCACGGUUCUUUGUGACUU | 930 |
| A-2007dt | UUGCAGGUUCUUUGUGACdTdT | 931 |
| A-2008 | UUUUAUAACAAGAGGUUCAUU | 932 |
| A-2008dt | UUUUAUAACAGAGGUUCAdTdT | 933 |
| A-2009 | UCCAAAUACUGGUUGUCGGUU | 934 |
| A-2009dt | UCCAAAUACUGGUUGUCGGdTdT | 935 |
| A-2010 | UAUUUUAGGAAUUCCAAUGUU | 936 |
| A-2010dt | UAUUUUAGGAAUUCCAAUGdTdT | 937 |
| A-2011 | UUUAGGAAUUCCAAUGAUCUU | 938 |
| A-2011dt | UUUAGGAAUUCCAAUGAUCdTdT | 939 |
| A-2012dt | UUAAUCUCUUUACUGAUAUdTdT | 940 |
| A-2013dt | GAUUUUAGGAAUUCCAAUGdTdT | 941 |
| A-2014 | UAAGCAUGGAGCUAGCAGGCUU | 942 |
| A-2015 | UAAGCAUGGAGCUAGCAGGGU | 943 |
| A-2016 | AAGGACUUGAGGGACUCGAAGU | 944 |
| A-2017 | AAGGACUUGAGGGACUCGAAG | 945 |
| A-2018 | AAGGACUUGAGGGACUCGA | 946 |
| A-2019 | AGGACUUGAGGGACUCGAAGU | 947 |
| A-2020 | GAGGACUUGAGGGACUCGAAGU | 948 |
| A-2021 | AAGGACUUGAGGGACUCGAAGU | 949 |
| A-2022 | AAGGACUUGAGGGACUCGAAGUU | 950 |
| A-2023 | AAGGACUUGAGGGACUCGAAG | 951 |
| A-2024 | AAGGACUUGAGGGACUCGA | 952 |
| A-2025 | AAGGACUUGAGGGACUCGAAUG | 953 |
| A-2026 | AAGGACUUGAGGGACUCGAAU | 954 |
| A-2027 | AAGGACUUGAGGGACUCGAAGA | 955 |
| A-2028 | AAGGACUUGAGGGACUCGAAGG | 956 |
| A-2029 | AAGGACUUGAGGGACUCGAAGGU | 957 |
| A-2030 | AAGGACUUGAGGGACUCGAAGGA | 958 |
| A-2031 | AAGGACUUGAGGGACUCGAAG | 959 |
| A-2032 | AAGGACUUGAGGGACUCGAAGU | 960 |
| A-2033 | AAGGACUUGAGGGACUCGA | 961 |
| A-2034 | AAGGACUUGAGGGACUCGAAGGA | 962 |
| A-2035 | AAGGACUUGAGGGACUCGAAGG | 963 |
| A-2036 | AAGGACUUGAGGGACUCGAAGGAU | 964 |
| A-2037 | AAGGACUUGAGGGACUCGAAGGAUU | 965 |
| A-2038 | AAGGACUUGAGGGACUCGAAG | 966 |
| A-2039 | AAGGACUUGAGGGACUCGAAGGAA | 967 |
| A-2040 | GAUGAAGUGCACACAUUGGAUGA | 968 |
| A-2041 | GAUGAACUGCACACAUUGGAUG | 969 |
| A-2042 | GAUGAAUUGCACACAGUAGAUGA | 970 |
| A-2043 | AAGGACUUGAGGGACUCGAAGGUU | 971 |
| A-2044 | AAGGACUUGAGGGACUCGAAGUUU | 972 |
| A-2045 | AAGGACUUGAGGGACUCGAAGGU | 973 |
| A-2046 | AAGGACUUGAGGGACUCGAAGGUUUU | 974 |
| A-2047 | AAGGACUUGAGGGACUCGAAGGUUUUU | 975 |
| A-2048 | AAGGACUUGAGGGACUCGAAGG | 976 |
| A-2049 | UAAGGACUUGAGGGACUCGAAG | 977 |
| A-2050 | AAGGACUUGAGGGACUCGAAG | 978 |
| A-2051 | AAGGACUUGAGGGACUCGAAGU | 979 |
| A-2052 | AAGGACUUGAGGGACUCGAAGACGAGUCCC | 980 |
| A-2053 | AAGGACUUGAGGGACUCGAAGACGAGUCCCA | 981 |
| A-2054 | AAGGACUUGAGGGACUCGAAGACGAGUCCCU | 982 |
| A-2055 | GAUGAAGUGCACACAUUGGAUAC | 983 |
| A-2056 | GAUGAAGUGCACACAUUGGAUACA | 984 |
| A-2057 | GAUGAAGUGCACACAUUGGAUACAAUGUGU | 985 |
| A-2058 | GAUGAAGUGCACACAUUGGAU | 986 |
| A-2059 | GAUGAAGUGCACACAUUGGAUA | 987 |
| A-2060 | GAUGAAUUGCACACAGUAGAUAU | 988 |
| A-2061 | GAUGAAUUGCACACAGUAGAUAUAC | 989 |
| A-2062 | GAUGAAUUGCACACAGUAGAUAUACUGUGU | 990 |
| A-2063 | GAUGAAUUGCACACAGUAGAUAUA | 991 |
| A-2064 | AUGAAUUGCACACAGUAGAUAUAC | 992 |
| A-2065 | GAUGAAUUGCAGACAGUAGAUA | 993 |
| A-2066 | GAUGAAUUGCACACAGUAGAUAUACUGUGU | 994 |
| A-2067 | UACAACGAGACUGAAUUGCU | 995 |
| A-2068 | ACAACGAGACUGAAUUGCUU | 996 |
| A-2069 | UCCGGUCACAACAUUGUGGUUC | 997 |
| A-2070 | UCCGGUCACAACAUUGUGGU | 998 |
| A-2071 | UCCGGUCACAACAUUGUG | 999 |
| A-2072 | CCGGUCACAACAUUGUGGUU | 1000 |
| A-2073 | UUUUAUAACAAGAGGUUCAU | 1001 |
| A-2074 | UUUAUAACAAGAGGUUCAUU | 1002 |
| A-2075 | UAAGCAUGGAGCUAGCAGGU | 1003 |
| A-2076 | AAGCAUGGAGCUAGCAGGUU | 1004 |
| A-2077 | CCAAAUACUGGUUGUCGGUU | 1005 |
| A-2078 | UACAACGAGACUGAAUUGCUUU | 1006 |
| A-2079 | UAACGUCAGUUCAUAAACCUUU | 1007 |
| A-2080 | GUCCGGUCACAACAUUGGGUU | 1008 |
| A-2081 | UCCGGUCACAACAUUGUGGUUUG | 1009 |
| A-2082 | UCCGGUCACAACAUUGUGGUUU | 1010 |
| A-2083 | UCCGGUCACAACAUUGUGG | 1011 |
| A-2084 | UAAGCAUGGAGCUAGCAGGUUU | 1012 |
| A-2085 | AAGCAUGGAGCUAGCAGGUUU | 1013 |
| A-2086 | UCCAAAUACUGGUUGUCGGUUU | 1014 |
| A-2027 | CCAAAUACUGGUUGUCGGUUU | 1015 |

[0507] In one embodiment, the siRNA molecules of the present invention targeting Htt may comprise a nucleotide sequence such as, but not limited to, the sense (passenger) sequences in Table 3 or a fragment or variant thereof. As a non-limiting example, the sense sequence used in the siRNA molecule of the present invention is at least 30%, 40%, 50%, 60%, 700% 80%, 81%, 82%, 83%, 84%, 85%, 86%, 87%, 88%, 89%, 90%, 91%, 92%, 93%, 94%, 95%, 96%, 97%, 98% or 99% or at least 20-30%, 20-40%, 20-50%, 20-60%, 20-70% 20-80%, 20-90%, 20-95%, 20-99%, 30-40%, 30-50%, 30-60%, 30-70%, 30-80%, 30-90%, 30-95%, 30-99%, 40-50%, 40-60%, 40-70%, 40-80%, 40-90%, 40-95%, 40-99%, 50-60%, 50-70%, 50-80%, 50-90%, 50-95%, 50-99%, 60-70%, 60-80%, 60-90%, 60-95%, 60-99%, 70-80%, 70-90%, 70-95%, 70-99%, 80-90%, 80-95%, 80-99%, 90-95%, 90-99% or 95-99% of a nucleotide sequence in Table 3. As another non-limiting example, the sense sequence used in the siRNA molecule of the present invention comprises at least 3, 4, 5, 6, 7, 8, 9, 10, 11, 12, 13, 14, 15, 16, 17, 18, 19, 20, 21 or more than 21 consecutive nucleotides of a nucleotide sequence in Table 3. As yet another non-limiting example, the sense sequence used in the siRNA molecule of the present invention comprises nucleotides 1 to 22, 1 to 21, 1 to 20, 1 to 19, 1 to 18, 1 to 17, 1 to 16, 1 to 15, 1 to 14, 1 to 13, 1 to 12, 1 to 11, 1 to 10, 1 to 9, 1 to 8, 2 to 22, 2 to 21, 2 to 20, 2 to 19, 2 to 18, 2 to 17, 2 to 16, 2 to 15, 2 to 14, 2 to 13, 2 to 12, 2 to 112 to 10, 2 to 9, 2 to 8, 3 to 22, 3 to 21, 3 to 20, 3 to 19, 3 to 18, 3 to 17, 3 to 16, 3 to 15, 3 to 14, 3 to 13, 3 to 12, 3 to 11, 3 to 10, 3 to 9, 3 to 8, 4 to 22, 4 to 21, 4 to 20, 4 to 19, 4 to 18, 4 to 17, 4 to 16, 4 to 15, 4 to 14, 4 to 13, 4 to 12, 4 to 11, 4 to 10, 4 to 9, 4 to 8, 5 to 22, 5 to 21, 5 to 20, 5 to 19, 5 to 18, 5 to 17, 5 to 16, 5 to 15, 5 to 14, 5 to 13, 5 to 12, 5 to 11, 5 to 10, 5 to 9, 5 to 8, 6 to 22, 6 to 21, 6 to 20, 6 to 19, 6 to 18, 6 to 17, 6 to 16, 6 to 15, 6 to 14, 6 to 13, 6 to 12, 6 to 11, 6 to 10, 7 to 22, 7 to 21, 7 to 20, 7 to 19, 7 to 18, 7 to 17, 7 to 16, 7 to 15, 7 to 14, 7 to 13, 7 to 12, 8 to 22, 8 to 21, 8 to 20, 8 to 19, 8 to 18, 8 to 17, 8 to 16, 8 to 15, 8 to 14, 8 to 13, 8 to 12, 9 to 22, 9 to 21, 9 to 20, 9 to 19, 9 to 18, 9 to 17, 9 to 16, 9 to 15, 9 to 14, 10 to 22, 10 to 21, 10 to 20, 10 to 19, 10 to 18, 10 to 17, 10 to 16, 10 to 15, 10 to 14, 11 to 22, 11 to 21, 11 to 20, 11 to 19, 11 to 18, 11 to 17, 11 to 16, 11 to 15, 11 to 14, 12 to 22, 12 to 21, 12 to 20, 12 to 19, 12 to 18, 12 to 17, 12 to 16, 13 to 22, 13 to 21, 13 to 20, 13 to 19, 13 to 18, 13 to 17, 13 to 16, 14 to 22, 14 to 21, 14 to 20, 14 to 19, 14 to 18, 14 to 17, 15 to 22, 15 to 21, 15 to 20, 15 to 19, 15 to 18, 16 to 22, 16 to 21, 16 to 20, 17 to 22, 17 to 21, or 18 to 22 of the sequences in Table 3,

TABLE 3
Sense Sequences

| Sense ID | Sequence | SEQ ID NO |
|---|---|---|
| S-1000 | GUUUAUGAACUGAUCUUACCC | 1016 |
| S-1001 | GUGUUAGACGGUACUGAUCCC | 1017 |
| S-1002 | CCUGCUAGCUCCAUGCUUCCC | 1018 |
| S-1003 | GUUUAUGAACUGAUCUUAGCC | 1019 |
| S-1004 | GUGUUAGACGGUACUGAUGCC | 1020 |
| S-1005 | CCUGCUAGCUCCAUGCUUGCC | 1021 |
| S-1006 | GUUUAUGAAGUGAUCUUAACC | 1022 |
| S-1007 | GUGUUAGACCGUACUGAUACC | 1023 |
| S-1008 | CCUGCUAGCACCAUGCUUACC | 1024 |
| S-1009 | GUUUAUGAACUGAUCUUAACC | 1025 |
| S-1010 | GUGUUAGACGGUACUGAUACC | 1026 |
| S-1011 | CCUGCUAGCUCCAUGCUUACC | 1027 |
| S-1011dt | CCUGCUAGCUCCAUGCUUAdTdT | 1028 |
| S-1012 | GUUUAUGAACUGAUCUUGCCC | 1029 |
| S-1013 | GUUUAUGAACUGAUCUUGGCC | 1030 |
| S-1014 | GUUUAUGAACUGAUCUUGACC | 1031 |
| S-1015 | GCAAUUCAGUCUCGUUGUCCC | 1032 |
| S-1016 | UCCAGGUUUAUGAACUGACCC | 1033 |
| S-1017 | GGUUUAUGAACUGACGUUCCC | 1034 |
| S-1018 | CCACAAUGUUGUGACUGGCCC | 1035 |
| S-1019 | GUCACAAAGAACCGUGUACCC | 1036 |
| S-1020 | UGAACCUCUUGUUAUAAACCC | 1037 |
| S-1021 | CCGACAACCAGUAUUUGGCCC | 1038 |
| S-1022 | GCAAUUCAGUCUCGUUGUGCC | 1039 |
| S-1023 | UCCAGGUUUAUGAACUGAGCC | 1040 |
| S-1024 | GGUUUAUGAACUGACGUUGCC | 1041 |
| S-1025 | CCACAAUGUUGUGACUGGGCC | 1042 |
| S-1026 | GUCACAAAGAACCGUGUAGCC | 1043 |
| S-1027 | UGAACCUCUUGUUAUAAAGCC | 1044 |
| S-1028 | CCGACAACCAGUAUUUGGGCC | 1045 |
| S-1029 | GCAAUUCAGUCUCGUUGUACC | 1046 |
| S-1029dt | GCAAUUCAGUCUCGUUGUAdTdT | 1047 |
| S-1030 | UCCAGGUUUAUGAACUGAACC | 1048 |
| S-1030dt | UCCAGGUUUAUGAACUGAAdTdT | 1049 |
| S-1031 | GGUUUAUGAACUGACGUUACC | 1050 |
| S-1032 | CCACAAUGUUGUGACUGGACC | 1051 |
| S-1033 | GUCACAAAGAACCGUGUAACC | 1052 |
| S-1034 | UGAACCUCUUGUUAUAAAACC | 1053 |
| S-1034dt | UGAACCUCUUGUUAUAAAAdTdT | 1054 |
| S-1035 | CCGACAACCAGUAUUUGGACC | 1055 |
| S-1035dt | CCGACAACCAGUAUUUGGAdTdT | 1056 |
| S-1036 | GCAAUUCAGACUCGUUGUACC | 1057 |
| S-1037 | UCCAGGUUUUUGAACUGAACC | 1058 |
| S-1038 | GGUUUAUGAUCUGACGUUACC | 1059 |
| S-1039 | CCACAAUGUAGUGACUGGACC | 1060 |
| S-1040 | GUCACAAAGUACCGUGUAACC | 1061 |
| S-1041 | UGAACCUCUAGUUAUAAAACC | 1062 |
| S-1042 | CCGACAACCUGUAUUUGGACC | 1063 |
| S-1043 | CAUUGGAAUUCCUAAAAUUCC | 1064 |
| S-1044 | GAUCAUUGGAAUUCCUAAUCC | 1065 |
| S-1045 | CAUUGGAAUUCCUAAAAUGCC | 1066 |
| S-1046 | GAUCAUUGGAAUUCCUAAGCC | 1067 |
| S-1047 | CAUUGGAAUUCCUAAAAUACC | 1068 |
| S-1047dt | CAUUGGAAUUCCUAAAAUAdTdT | 1069 |
| S-1048 | GAUCAUUGGAAUUCCUAAACC | 1070 |
| S-1048dt | GAUCAUUGGAAUUCCUAAAdTdT | 1071 |
| S-1049 | CAUUGGAAUACCUAAAAUACC | 1072 |
| S-1050 | GAUCAUUGGUAUUCCUAAACC | 1073 |
| S-1051dt | GUUUAUGAACUGACGUUAAdTdT | 1074 |
| S-1052dt | GUGUUAGACGGUACCGACAdTdT | 1075 |
| S-1053dt | AUAUCAGUAAAGAGAUUAAdTdT | 1076 |
| S-1054dt | GGUUUAUGAACUGACGUUAdTdT | 1077 |
| S-1055dt | CCACAAUGUUGUGACCGGAdTdT | 1078 |
| S-1056dt | GUCACAAAGAACCGUGCAAdTdT | 1079 |
| S-1057dt | CAUUGGAAUUCCUAAAAUCdTdT | 1080 |
| S-1058 | CCUGCUAGCUCCAUGCUUGCU | 1081 |
| S-1059 | CCUGCUAGCUCCAUGCUUGAU | 1082 |
| S-1060 | CCUGCUAGCUCCAUGCUUAUU | 1083 |
| S-1061 | CCUGCUAGCUCCAUGCUUGUU | 1084 |
| S-1062 | UUCGAGUCCCUCAAGUAGCU | 1085 |
| S-1063 | UUCGAGUCCCUCAAGUAGCUUU | 1086 |
| S-1064 | UCGAGUCCCUCAAGUCCAUUCU | 1087 |
| S-1065 | UUCCAGUCCAUCAAGUCAAUU | 1088 |
| S-1066 | UUCCGAGUCUAAAAGUCCUUGG | 1089 |
| S-1067 | UUCCGAGUCUAAAAGUCCUUGGC | 1090 |
| S-1068 | CUUCCGAGUCUAAAAGUCCUUGG | 1091 |
| S-1069 | UUCCGAGUCUAAAAGUCCUUGGU | 1092 |
| S-1070 | UUCCGAGUCUAAAAGUCCUUGGCU | 1093 |
| S-1071 | UCCAAUGUGAAACUUCAUCGGCU | 1094 |
| S-1072 | UCCAAUGUGAAACUUCAUCGGC | 1095 |
| S-1073 | AUCCAAUGUGAAACUUCAUCGU | 1096 |
| S-1074 | AUCCAAUGUGAAACUUCAUCGGU | 1097 |
| S-1075 | UCCAAUGUGAAACUUCAUCGGU | 1098 |
| S-1076 | UCCAAUGUGAAACUUCAUCGGCUU | 1099 |
| S-1077 | AUCUACUGUGAAAAUUCAUCGG | 1100 |
| S-1078 | UCUACUGUGAAAAUUCAUCGG | 1101 |
| S-1079 | UCUAGUGUGAAAAUUCAUCGGC | 1102 |
| S-1080 | AUCUACUGUGAAAAUUCAUCGGU | 1103 |
| S-1081 | UCUACUGUGAAAAUUCAUCGGU | 1104 |
| S-1082 | UCUACUGUGAAAAUUCAUCGGCU | 1105 |
| S-1083 | CCUUCGGUCCUCAAGUCCUUCA | 1106 |
| S-1084 | UUCGAGUCCAUCAAAUCCUAUAGU | 1107 |
| S-1085 | UACAAUGUGUGCACUUCAUAU | 1108 |
| S-1086 | UAUACUGUGUGCAAUUCAUUUCU | 1109 |
| S-1087 | GCAAUUCAGUCUCGUUGUCC | 1110 |
| S-1088 | GCAAUUCAGUCUCGUUGUC | 1111 |
| S-1089 | CAAUUCAGUCUCGUUGUCCC | 1112 |
| S-1090 | CAAUUCAGUCUCGUUGUCC | 1113 |
| S-1091 | GCAAUUCAGUCUCGUUGUGC | 1114 |
| S-1092 | CAAUUCAGUCUCGUUGUGCC | 1115 |
| S-1093 | CCACAAUGUUGUGACUGGGCCU | 1116 |
| S-1094 | CCACAAUGUUGUGACUGGGC | 1117 |
| S-1095 | CACAAUGUUGUGACUGGGCC | 1118 |
| S-1096 | UGAACCUCUUGUUAUAAAGCCU | 1119 |
| S-1097 | UGAACCUCUUGUUAUAAAGC | 1120 |
| S-1098 | GAACCUCUUGUUAUAAAGCC | 1121 |
| S-1099 | CCUGCUAGCUCCAUGCUUGCCU | 1122 |
| S-1100 | CCUGCUAGCUCCAUGCUUGC | 1123 |
| S-1101 | CCUGCUAGCUCCAUGCUUG | 1124 |
| S-1102 | CUGCUAGCUCCAUGCUUGCC | 1125 |
| S-1103 | CCGACAACCAGUAUHUGGGCCU | 1126 |
| S-1104 | CCGACAACCAGUAUUUGGGC | 1127 |
| S-1105 | CCGACAACCAGUAUUUGGG | 1128 |
| S-1106 | CGACAACCAGUAUUUGGGCC | 1129 |
| S-1107 | CGACAACCAGUAUUUGGGC | 1130 |
| S-1108 | GCAAUUCAGUCUCGUUGUACCU | 1131 |
| S-1109 | GCAAUUCAGUCUCGUUGUAC | 1132 |
| S-1110 | GCAAUUCAGUCUCGUUGUA | 1133 |
| S-1111 | CAAUUCAGUCUCGUUGUACC | 1134 |
| S-1112 | GCAAUUCAGACUCGUUGUACCU | 1135 |
| S-1113 | GCAAUUCAGACUCGUUGUAC | 1136 |
| 5-1114 | GCAAUUCAGACUCGUUGUA | 1137 |
| S-1115 | CAAUUCAGACUCGUUGUACC | 1138 |
| S-1116 | AGCAAUUCAGUCUCGUUGUACC | 1139 |
| S-1117 | AGCAAUUCAGUCUCGUUGUAC | 1140 |
| S-1118 | AGGUUUAUGAACUGACGUUAC | 1141 |
| S-1119 | AGGUUUAUGAACUGACGUUACC | 1142 |
| S-1120 | ACCACAAUGUUGUGACUGGAC | 1143 |
| S-1121 | ACCACAAUGUUGUGACUGGACC | 1144 |
| S-1122 | CCACAAUGUUGUGACUGGACCGU | 1145 |
| S-1123 | CCACAAUGUUGUGACUGGACCG | 1146 |
| S-1124 | CCACAAUGUUGUGACUGGAC | 1147 |
| S-1125 | CACAAUGUUGUGACUGGACC | 1148 |
| S-1126 | ACCUGCUAGCUCCAUGCUUCCC | 1149 |
| S-1127 | ACCUGCUAGCUCCAUGCUUCC | 1150 |
| S-1128 | ACCUGCUAGCUCCAUGCUU | 1151 |
| S-1129 | CCUGCUAGCUCCAUGGUUCC | 1152 |
| S-1130 | CCUGCUAGCUCCAUGCUUC | 1153 |
| S-1131 | CUGCUAGCUCCAUGCUUCCC | 1154 |
| S-1132 | CUGCUAGCUCCAUGCUUCC | 1155 |
| S-1133 | ACCGACAACCAGUAUUUGGACC | 1156 |
| S-1134 | ACCGACAACCAGUAUUUGGAC | 1157 |
| S-1135 | CCGACAACCAGUAUUUGGACCGU | 1158 |
| S-1136 | CCGACTAACCAGUUUGGACCGU | 1159 |
| S-1137 | CCGACAACCAGUAUUUGGAC | 1160 |
| S-1138 | CGACAACCAGUAUUUGGACC | 1161 |
| S-1139 | CCUGCUAGCACCGUGGUUACC | 1162 |

[0508] In one embodiment, the siRNA molecules of the present invention targeting Htt may comprise an antisense sequence from Table 2 and a sense sequence from Table 3, or a fragment or variant thereof. As a non-limiting example, the antisense sequence and the sense sequence have at least 30%, 40%, 50%, 60%, 70%, 80%, 81%, 82%, 83%, 84%, 85%, 86%, 87%, 88%, 89%, 90%, 91%, 92%, 93%, 94%, 95%, 96%, 97%, 98% or 99% or at least 20-30%, 20-40%, 20-50%, 20-60%, 20-70%, 20-80%, 20-90%, 20-95%, 20-99%, 30-40%, 30-50%, 30-60%, 30-70%, 30-80%, 30-90%, 30-95%, 30-99%, 40-50%, 40-60%, 40-70%, 40-80%, 40-90%, 40-95%, 40-99%, 50-60%, 50-70%, 50-80%, 50-90&% 50-95&% 50-99%, 60-70%, 60-80%, 60-90%, 60-95%, 60-99%, 70-80%, 70-90%, 70-95%, 70-99%, 80-90%, 80-95%, 80-99%, 90-95%, 90-99% or 95-99% complementarity.

[0509] In one embodiment, the siRNA molecules of the present invention targeting Htt may comprise the sense and antisense siRNA duplex as described in Tables 4-6. As a non-limiting example, these siRNA duplexes may be tested for in vitro inhibitory activity on endogenous HTT gene expression. The start site for the sense and antisense sequence is compared to HTT gene sequence known as NM_002111.7 (SEQ ID NO: 1163) from NCBI.

TABLE 4
Sense and antisense strand sequences of HIT dsRNA

| sRNA | | | | | | | | AS |
|---|---|---|---|---|---|---|---|---|
| Duplex | | Start | Sense Strand | SS SEQ | | Start | Antisense Strand | SEQ |
| ID | SS ID | SS | Sequence (5′-3′) | ID | AS ID | AS | Sequence (5′-3′) | ID |
| D-3566 | S- | 6751 | CCUGCUAGCUCCA | 1081 | A-2002 | 6751 | UAAGCAUGGAGCU | 920 |
| | 1058 | | UGCUUGCU | | | | AGCAGGUU | |
| D-3567 | S- | 6751 | CCUGCUAGCUCCA | 1081 | A-2014 | 6748 | UAAGCAUGGAGCU | 942 |
| | 1058 | | UGCUUGCU | | | | AGCAGGCUU | |
| D-3568 | S- | 6751 | CCUGCUAGCUCCA | 1082 | A-2002 | 6751 | UAAGCAUGGAGCU | 920 |
| | 1059 | | UGCUUGAU | | | | AGCAGGUU | |
| D-3569 | S- | 6751 | CCUGCUAGCUCCA | 1083 | A-2015 | 6751 | UAAGCAUGGAGCU | 943 |
| | 1060 | | UGCUUAUU | | | | AGCAGGGU | |
| D-3570 | S- | 6751 | CCUGCUAGCUCCA | 1084 | A-2002 | 6751 | UAAGCAUGGAGCU | 920 |
| | 1061 | | UGCUUGUU | | | | AGCAGGUU | |
| D-3500 | S- | 1386 | UCCAGGUUUAUGA | 1033 | A-2004 | 1386 | UUCAGUUCAUAAA | 924 |
| | 1016 | | ACUGACCC | | | | CCUGGAUU | |
| D-3501 | S- | 1386 | UCCAGGUUUAUGA | 1040 | A-2004 | 1386 | UUCAGUUCAUAAA | 924 |
| | 1023 | | ACUGAGCC | | | | CCUGGAUU | |
| D-3502 | S- | 1386 | UCCAGGUUUAUGA | 1048 | A-2004 | 1386 | UUCAGUUCAUAAA | 924 |
| | 1030 | | ACUGAACC | | | | CCUGGAUU | |
| D-3503 | S- | 1386 | UCCAGGUUUUUG | 1058 | A-2004 | 1386 | UUCAGUUCAUAAA | 924 |
| | 1037 | | AACUGAACC | | | | CCUGGAUU | |
| D-3504 | S- | 1386 | UCCAGGUUUAUGA | 1048 | A-2001 | 2066 | UGUCGGUACCGUC | 918 |
| | 1030 | | ACUGAACC | | | | UAACACUU | |
| D-3505 | S- | 1390 | GGUUUAUGAACU | 1034 | A-2005 | 1389 | UAACGUCAGUUCA | 926 |
| | 1017 | | GACGUUCCC | | | | UAAACCUU | |
| D-3506 | S- | 1390 | GGUUUAUGAACU | 1041 | A-2005 | 1389 | UAACGUCAGUUCA | 926 |
| | 1024 | | GACGUUGCC | | | | UAAACCUU | |
| D-3507 | S- | 1390 | GGUUUAUGAACU | 1050 | A-2005 | 1389 | UAACGUCAGUUCA | 926 |
| | 1031 | | GACGUUACC | | | | UAAACCUU | |
| D-3508 | S- | 1390 | GGUUUAUGAUCU | 1059 | A-2005 | 1389 | UAACGUCAGUUCA | 926 |
| | 1038 | | GACGUUACC | | | | UAAACCUU | |
| D-3509 | S- | 1391 | GUUUAUGAACUG | 1016 | A-2000 | 1391 | UUAACGUCAGUUC | 916 |
| | 1000 | | AUCUUACCC | | | | AUAAACUU | |
| D-3510 | S- | 1391 | GUUUAUGAACUG | 1019 | A-2000 | 1391 | UUAACGUCAGUUC | 916 |
| | 1003 | | AUCUUAGCC | | | | AUAAACUU | |
| D-3511 | S- | 1391 | GUUUAUGAAGUG | 1022 | A-2000 | 1391 | UUAACGUCAGUUC | 916 |
| | 1006 | | AUCUUAACC | | | | AUAAACUU | |
| D-3512 | S- | 1391 | GUUUAUGAACUG | 1025 | A-2000 | 1391 | UUAACGUCAGUUC | 916 |
| | 1009 | | AUCUUAACC | | | | AUAAACUU | |
| D-3513 | S- | 1391 | GUUUAUGAACUG | 1029 | A-2000 | 1391 | UUAACGUCAGUUC | 916 |
| | 1012 | | AUCUUGCCC | | | | AUAAACUU | |
| D-3514 | S- | 1391 | GUUUAUGAACUG | 1030 | A-2000 | 1391 | UUAACGUCAGUUC | 916 |
| | 1013 | | AUCUUGGCC | | | | AUAAACUU | |
| D-3515 | S- | 1391 | GUUUAUGAACUG | 1031 | A-2000 | 1391 | UUAACGUCAGUUC | 916 |
| | 1014 | | AUCUUGACC | | | | AUAAACUU | |
| D-3516 | S- | 1429 | CCACAAUGUUGUG | 1035 | A-2006 | 1428 | UCCGGUCACAACA | 928 |
| | 1018 | | ACUGGCCC | | | | UUGUGGUU | |
| D-3517 | S- | 1429 | CCACAAUGUUGUG | 1042 | A-2006 | 1428 | UCCGGUCACAACA | 928 |
| | 1025 | | ACUGGGCC | | | | UUGUGGUU | |
| D-3518 | S- | 1429 | CCACAAUGUUGUG | 1051 | A-2006 | 1428 | UCCGGUCACAACA | 928 |
| | 1032 | | ACUGGACC | | | | UUGUGGUU | |
| D-3519 | S- | 1429 | CCACAAUGUAGUG | 1060 | A-2006 | 1428 | UCCGGUCACAACA | 928 |
| | 1039 | | ACUGGACC | | | | UUGUGGUU | |
| D-3520 | S- | 2066 | GUGUUAGACGGU | 1017 | A-2001 | 2066 | UGUCGGUACCGUC | 918 |
| | 1001 | | ACUGAUCCC | | | | UAACACUU | |
| D-3521 | S- | 2066 | GUGUUAGACGGU | 1020 | A-2001 | 2066 | UGUCGGUACCGUC | 918 |
| | 1004 | | ACUGAUGCC | | | | UAACACUU | |
| D-3522 | S- | 2066 | GUGUUAGACCGUA | 1023 | A-2001 | 2066 | UGUCGGUACCGUC | 918 |
| | 1007 | | CUGAUACC | | | | UAACACUU | |
| D-3523 | S- | 2066 | GUGUUAGACGGU | 1026 | A-2001 | 2066 | UGUCGGUACCGUC | 918 |
| | 1010 | | ACUGAUACC | | | | UAACACUU | |
| D-3524 | S- | 2079 | CCGACAACCAGUA | 1038 | A-2009 | 2078 | UCCAAAUACUGGU | 934 |
| | 1021 | | UUUGGCCC | | | | UGUCGGUU | |
| D-3525 | S- | 2079 | CCGACAACCAGUA | 1045 | A-2009 | 2078 | UCCAAAUACUGGU | 934 |
| | 1028 | | UUUGGGCC | | | | UGUCGGUU | |
| D-3526 | S- | 2079 | CCGACAACCAGUA | 1055 | A-2009 | 2078 | UCCAAAUACUGGU | 934 |
| | 1035 | | UUUGGACC | | | | UGUCGGUU | |
| D-3527 | S- | 2079 | CCGACAACCUGUA | 1063 | A-2009 | 2078 | UCCAAAUACUGGU | 934 |
| | 1042 | | UUUGGACC | | | | UGUCGGUU | |
| D-3528 | S- | 4544 | GUCACAAAGAACC | 1036 | A-2007 | 4544 | UUGCACGGUUCU | 930 |
| | 1019 | | GUGUACCC | | | | UUGUGACUU | |
| D-3529 | S- | 4544 | GUCACAAAGAACC | 1043 | A-2007 | 4544 | UUGCACGGUUCU | 930 |
| | 1026 | | GUGUAGCC | | | | UUGUGACUU | |
| D-3530 | S- | 4544 | GUCACAAAGAACC | 1052 | A-2007 | 4544 | UUGCACGGUUCU | 930 |
| | 1033 | | GUGUAACC | | | | UUGUGACUU | |
| D-3531 | S- | 4544 | GUCACAAAGUACC | 1061 | A-2007 | 4544 | UUGCACGGUUCU | 930 |
| | 1040 | | GUGUAACC | | | | UUGUGACUU | |
| D-3532 | S- | 4597 | UGAACCUCUUGUU | 1037 | A-2008 | 4597 | UUUUAUAACAAGA | 932 |
| | 1020 | | AUAAACCC | | | | GGUUCAUU | |
| D-3533 | S- | 4597 | UGAACCUCUUGUU | 1044 | A-2008 | 4597 | UUUUAUAACAAGA | 932 |
| | 1027 | | AUAAAGCC | | | | GGUUCAUU | |
| D-3534 | S- | 4597 | UGAACCUCUUGUU | 1053 | A-2008 | 4597 | UUUUAUAACAAGA | 932 |
| | 1034 | | AUAAAACC | | | | GGUUCAUU | |
| D-3535 | S- | 4597 | UGAACCUCUAGUU | 1062 | A-2008 | 4597 | UUUUAUAACAAGA | 932 |
| | 1041 | | AUAAAACC | | | | GGUUCAUU | |
| D-3536 | S- | 4861 | GAUCAUUGGAAU | 1065 | A-2011 | 4860 | UUUAGGAAUUCCA | 938 |
| | 1044 | | UCCUAAUCC | | | | AUGAUCUU | |
| D-3537 | S- | 4861 | GAUCAUUGGAAU | 1067 | A-2011 | 4860 | UUUAGGAAUUCCA | 938 |
| | 1046 | | UCCUAAGCC | | | | AUGAUCUU | |
| D-3538 | S- | 4861 | GAUCAUUGGAAU | 1070 | A-2011 | 4860 | UUUAGGAAUUCCA | 938 |
| | 1048 | | UCCUAAACC | | | | AUGAUCUU | |
| D-3539 | S- | 4861 | GAUCAUUGGUAU | 1073 | A-2011 | 4860 | UUUAGGAAUUCCA | 938 |
| | 1050 | | UCCUAAACC | | | | AUGAUCUU | |
| D-3540 | S- | 4864 | CAUUGGAAUUCCU | 1064 | A-2010 | 4864 | UAUUUUAGGAAU | 936 |
| | 1043 | | AAAAUUCC | | | | UCCAAUGUU | |
| D-3541 | S- | 4864 | CAUUGGAAUUCCU | 1066 | A-2010 | 4864 | UAUUUUAGGAAU | 936 |
| | 1045 | | AAAAUGCC | | | | UCCAAUGUU | |
| D-3542 | S- | 4864 | CAUUGGAAUUCCU | 1068 | A-2010 | 4864 | UAUUUUAGGAAU | 936 |
| | 1047 | | AAAAUACC | | | | UCCAAUGUU | |
| D-3543 | S- | 4864 | CAUUGGAAUACCU | 1072 | A-2010 | 4864 | UAUUUUAGGAAU | 936 |
| | 1049 | | AAAAUACC | | | | UCCAAUGUU | |
| D-3544 | S- | 6188 | GCAAUUCAGUCUC | 1032 | A-2003 | 6188 | UACAACGAGACUG | 922 |
| | 1015 | | GUUGUCCC | | | | AAUUGCUU | |
| D-3545 | S- | 6188 | GCAAUUCAGUCUC | 1039 | A-2003 | 6188 | UACAACGAGACUG | 922 |
| | 1022 | | GUUGUGCC | | | | AAUUGCUU | |
| D-3546 | S- | 6188 | GCAAUUCAGUCUC | 1046 | A-2003 | 6188 | UACAACGAGACUG | 922 |
| | 1029 | | GUUGUACC | | | | AAUUGCUU | |
| D-3547 | S- | 6188 | GCAAUUCAGACUC | 1057 | A-2003 | 6188 | UACAACGAGACUG | 922 |
| | 1036 | | GUUGUACC | | | | AAUUGCUU | |
| D-3548 | S- | 6751 | CCUGCUAGCUCCA | 1018 | A-2002 | 6751 | UAAGCAUGGAGCU | 920 |
| | 1002 | | UGCUUCCC | | | | AGCAGGUU | |
| D-3549 | S- | 6751 | CCUGCUAGCUCCA | 1021 | A-2002 | 6751 | UAAGCAUGGAGCU | 920 |
| | 1005 | | UGCUUGCC | | | | AGCAGGUU | |
| D-3550 | S- | 6751 | CCUGCUAGCACCA | 1024 | A-2002 | 6751 | UAAGCAUGGAGCU | 920 |
| | 1008 | | UGCUUACC | | | | AGCAGGUU | |
| D-3551 | S- | 6751 | CCUGCUAGCUCCA | 1027 | A-2002 | 6751 | UAAGCAUGGAGCU | 920 |
| | 1011 | | UGCUUACC | | | | AGCAGGUU | |

TABLE 5
Sense and antisense strand sequences of HTT dsRNA

| sRNA | | | | SS | | | | AS |
|---|---|---|---|---|---|---|---|---|
| Duplex | | Start | Sense Strand | SEQ | | Start | Antisense Strand | SEQ |
| ID | SS ID | SS | Sequence (5′-3′) | ID | AS ID | AS | Sequence (5′-3′) | ID |
| D-3552 | S-1051dt | 1391 | GUUUAUGAACUGAC | 1074 | A- | 1391 | UUAACGUCAGUUC | 917 |
| | | | GUUAAdTdT | | 2000dt | | AUAAACdTdT | |
| D-3553 | S-1052dt | 2066 | GUGUUAGACGGUAC | 1075 | A- | 2066 | UGUCGGUACCGUC | 919 |
| | | | CGACAdTdT | | 2001dt | | UAACACdTdT | |
| D-3554 | S-1011th | 6751 | CCUGCUAGCUCCAUG | 1028 | A- | 6751 | UAAGCAUGGAGCU | 921 |
| | | | CUUAdTdT | | 2002dt | | AGCAGGdTdT | |
| D-3555 | S-1053dt | 10322 | AUAUCAGUAAAGAG | 1076 | A- | 10322 | UUAAUCUCUUUAC | 940 |
| | | | AUUAAdTdT | | 2012dt | | UGAUAUdTdT | |
| D-3556 | S-1030dt | 1386 | UCCAGGUUUAUGAA | 1049 | A- | 1386 | UUCAGUUCAUAAAC | 925 |
| | | | CUGAAdTdT | | 2004dt | | CUGGAdTdT | |
| D-3557 | S-1054dt | 1390 | GGUUUAUGAACUGA | 1077 | A- | 1390 | UAACGUCAGUUCA | 927 |
| | | | CGUUAdTdT | | 2005dt | | UAAACCdTdT | |
| D-3558 | S-1055dt | 1429 | CCACAAUGUUGUGA | 1078 | A- | 1429 | UCCGGUCACAACAU | 929 |
| | | | CCGGAdTdT | | 2006dt | | UGUGGdTdT | |
| D-3559 | S-1035dt | 2079 | CCGACAACCAGUAUU | 1056 | A- | 2079 | UCCAAAUACUGGU | 935 |
| | | | UGGAdTdT | | 2009dt | | UGUCGGdTdT | |
| D-3560 | S-1056dt | 4544 | GUCACAAAGAACCGU | 1079 | A- | 4544 | UUGCACGGUUCUU | 931 |
| | | | GCAAdTdT | | 2007dt | | UGUGACdTdT | |
| D-3561 | S-1034dt | 4597 | UGAACCUCUUGUUA | 1054 | A- | 4597 | UUUUAUAACAAGA | 933 |
| | | | UAAAAdTdT | | 2008dt | | GGUUCAdTdT | |
| D-3562 | S-1029dt | 6188 | GCAAUUCAGUCUCG | 1047 | A- | 6188 | UACAACGAGACUGA | 923 |
| | | | UUGUAdTdT | | 2003dt | | AUUGCdTdT | |
| D-3563 | S-1047dt | 4864 | CAUUGGAAUUCCUA | 1069 | A- | 4864 | UAUUUUAGGAAUU | 937 |
| | | | AAAUAdTdT | | 2010dt | | CCAAUGdTdT | |
| D-3564 | S-1048dt | 4861 | GAUCAUUGGAAUUC | 1071 | A- | 4861 | UUUAGGAAUUCCA | 939 |
| | | | CUAAAdTdT | | 2011dt | | AUGAUCdTdT | |
| D-3565 | S-1057dt | 4864 | CAUUGGAAUUCCUA | 1080 | A- | 4864 | GAUUUUAGGAAUU | 941 |
| | | | AAAUCdTdT | | 2013dt | | CCAAUGdTdT | |

TABLE 6
Antisense and Sense strand sequences of HTT dsRNA

| sRNA | | | | | | | | SS |
|---|---|---|---|---|---|---|---|---|
| Duplex | AS | Start | Antisense Strand | AS SEQ | SS ID | Start | Sense Strand | SEQ |
| ID | ID | AS | Sequence (5′-3′) | ID | | SS | Sequence (5′-3′) | ID |
| D-3569 | S- | 6751 | CCUGCUAGCUCCA | 1083 | A- | 6751 | UAAGCAUGGAGCU | 943 |
| | 1060 | | UGCUUAUU | | 2015 | | AGCAGGGU | |
| D-3570 | S- | 6751 | CCUGCUAGCUCCA | 1084 | A- | 6751 | UAAGCAUGGAGCU | 920 |
| | 1061 | | UGCUUGUU | | 2002 | | AGCAGGUU | |

[0510] In other embodiments, the siRNA molecules of the present invention targeting Htt can be encoded in plasmid vectors, AAV particles, viral genome or other nucleic acid expression vectors for delivery to a cell.

[0511] DNA expression plasmids can be used to stably express the siRNA duplexes or dsRNA of the present invention targeting Htt in cells and achieve long-term inhibition of the target gene expression. In one aspect, the sense and antisense strands of a siRNA duplex are typically linked by a short spacer sequence leading to the expression of a stem-loop structure termed short hairpin RNA (shRNA). The hairpin is recognized and cleaved by Dicer, thus generating mature siRNA molecules.

[0512] According to the present invention, AAV particles comprising the nucleic acids encoding the siRNA molecules targeting HTT mRNA are produced, the AAV serotypes may be any of the serotypes listed in Table 1. Non-limiting examples of the AAV serotypes include, AAV1, AAV2, AAV3, AAV4, AAV5, AAV6, AAV7, AAV8, AAV9, AAV9.47, AAV9(hu14), AAV10, AAV1, AAV12, AAVrh8, AAVrh10, AAV-DJ8, AAV-DJ, AAV-PHP.A, and/or AAV-PHP.B, and variants thereof.

[0513] In some embodiments, the siRNA duplexes or encoded dsRNA of the present invention suppress (or degrade) HTT mRNA. Accordingly, the siRNA duplexes or encoded dsRNA can be used to substantially inhibit HTT gene expression in a cell, for example a neuron. In some aspects, the inhibition of HTT gene expression refers to an inhibition by at least about 20%, preferably by at least about 30%, 40%, 50%, 60%, 70%, 80%, 85%, 90%, 95% and 100%, or at least 20-30%, 20-40%, 20-50%, 20-60%, 20-70%, 20-80%, 20-90%, 20-95%, 20-100%, 30-40%, 30-50%, 30-60%, 30-70%, 30-80%, 30-90%, 30-95%, 30-100%, 40-50%, 40-60%, 40-70%, 40-80%, 40-90%, 40-95%, 40-100%, 50-60%, 50-70%, 50-80%, 50-90%, 50-95%, 50-100%, 60-70%, 60-80%, 60-90%, 60-95%, 60-100%, 70-80%, 70-90%, 70-95%, 70-100%, 80-90%, 80-95%, 80-100%, 90-95%, 90-100% or 95-100%. Accordingly, the protein product of the targeted gene may be inhibited by at least about 20%, preferably by at least about 30%, 40%, 50%, 60%, 70%, 80%, 85%, 90%, 95% and 100%, or at least 20-30%, 20-40%, 20-50%, 20-60%, 20-70%, 20-80%, 20-90%, 20-95%, 20-100%, 30-40%, 30-50%, 30-60%, 30-70%, 30-80%, 30-90%, 30-95%, 30-100%, 40-50%, 40-60%, 40-70%, 40-80%, 40-90%, 40-95%, 40-100%, 50-60%, 50-70%, 50-80%, 50-90%, 50-95%, 50-100%, 60-70%, 60-80%, 60-90%, 60-95%, 60-100%, 70-80%, 70-90%, 70-95%, 70-100%, 80-90%, 80-95%, 80-100%, 90-95%, 90-100% or 95-100%.

[0514] According to the present invention, the siRNA molecules are designed and tested for their ability in reducing HTT mRNA levels in cultured cells. Such siRNA molecules may form a duplex such as, but not limited to, include those listed in Table 4, Table 5 or Table 6. As a non-limiting example, the siRNA duplexes may be siRNA duplex IDs: D-3500 to D-3570.

[0515] In one embodiment, the siRNA molecules comprise a miRNA seed match for HTT located in the guide strand. In another embodiment, the siRNA molecules comprise a miRNA seed match for HTT located in the passenger strand. In yet another embodiment, the siRNA duplexes or encoded dsRNA targeting HTT gene do not comprise a seed match for HTT located in the guide or passenger strand.

[0516] In one embodiment, the siRNA duplexes or encoded dsRNA targeting HTT gene may have almost no significant full-length off target effects for the guide strand. In another embodiment, the siRNA duplexes or encoded dsRNA targeting HTT gene may have almost no significant full-length off target effects for the passenger strand. The siRNA duplexes or encoded dsRNA targeting HTT gene may have less than 1%, 2%, 3%, 4%, 5%, 6%, 7%, 8%, 9%, 10%,11%, 12%, 13%, 14%, 15%, 20%, 25%, 30%, 35%, 40%, 45%, 50%, 1-5%, 2-6%, 3-7%, 4-8%, 5-9%, 5-10%, 6-10%, 5-15%, 5-20%, 5-25% 5-30%, 10-20%, 10-30%, 10-40%, 10-50%, 15-30%, 15-40%, 15-45%, 20-40%, 20-50%, 25-50%, 30-40%, 30-50%, 35-50%, 40-50%, 45-50% full-length off target effects for the passenger strand. In yet another embodiment, the siRNA duplexes or encoded dsRNA targeting HTT gene may have almost no significant full-length off target effects for the guide strand or the passenger strand. The siRNA duplexes or encoded dsRNA targeting HTT gene may have less than 1%, 2%, 3%, 4%, 5%, 6%, 7%, 8%, 9%, 10%,11%, 12%, 13%, 14%, 15%, 20%, 25%, 30%, 35%, 40%, 45%, 50%, 1-5%, 2-6%, 3-7%, 4-8%, 5-9%, 5-10%, 6-10%, 5-15%, 5-20%, 5-25% 5-30%, 10-20%, 10-30%, 10-40%, 10-50%, 15-30%, 15-40%, 15-45%, 20-40%, 20-50%, 25-50%, 30-40%, 30-50%, 35-50%, 40-50%, 45-50% full-length off target effects for the guide or passenger strand.

[0517] In one embodiment, the siRNA duplexes or encoded dsRNA targeting HTT gene may have high activity in vitro. In another embodiment, the siRNA molecules may have low activity in vitro. In yet another embodiment, the siRNA duplexes or dsRNA targeting the HTT gene may have high guide strand activity and low passenger strand activity in vitro.

[0518] In one embodiment, the siRNA molecules targeting HTT have a high guide strand activity and low passenger strand activity in vitro. The target knock-down (KD) by the guide strand may be at least 40%, 50%, 60%, 65%, 70%, 75%, 80%, 85%, 90%, 95%, 99%, 99.5% or 100%. The target knock-down by the guide strand may be 40-50%, 45-50%, 50-55%, 50-60%, 60-65%, 60-70%, 60-75%, 60-80%, 60-85%, 60-90%, 60-95%, 60-99%, 60-99.5%, 60-100%, 65-70%, 65-75%, 65-80%, 65-85%, 65-90%, 65-95%, 65-99%, 65-99.5%, 65-100%, 70-75%, 70-80%, 70-85%, 70-90%, 70-95%, 70-99%, 70-99.5%, 70-100%, 75-80%, 75-85%, 75-90%, 75-95%, 75-99%, 75-99.5%, 75-100%, 80-85%, 80-90%, 80-95%, 80-99%, 80-99.5%, 80-100%, 85-90%, 85-95%, 85-99%, 85-99.5%, 85-100%, 90-95%, 90-99%, 90-99.5%, 90-100%, 95-99%, 95-99.5%, 95-100%, 99-99.5%, 99-100% or 99.5-100%. As a non-limiting example, the target knock-down (KD) by the guide strand is greater than 70%. As a non-limiting example, the target knock-down (KD) by the guide strand is greater than 60%.

[0519] In one embodiment, the siRNA duplex target HTT is designed so there is no miRNA seed match for the sense or antisense sequence to the non-Htt sequence.

[0520] In one embodiment, the IC₅₀ of the guide strand in the siRNA duplex targeting HTT for the nearest off target is greater than 100 multiplied by the IC₅₀ of the guide strand for the on-target gene, Htt. As a non-limiting example, if the IC₅₀ of the guide strand for the nearest off target is greater than 100 multiplied by the IC₅₀ of the guide strand for the target then the siRNA molecule is said to have high guide strand selectivity for inhibiting Htt in vitro.

[0521] In one embodiment, the 5′ processing of the guide strand of the siRNA duplex targeting HTT has a correct start (n) at the 5′ end at least 75%, 80%, 85%, 90%, 95%, 99% or 100% of the time in vitro or in vivo. As a non-limiting example, the 5′ processing of the guide strand is precise and has a correct start (n) at the 5′ end at least 99% of the time in vitro. As a non-limiting example, the 5′ processing of the guide strand is precise and has a correct start (n) at the 5′ end at least 99% of the time in vivo. As a non-limiting example, the 5′ processing of the guide strand is precise and has a correct start (n) at the 5′ end at least 90% of the time in vitro. As a non-limiting example, the 5′ processing of the guide strand is precise and has a correct start (n) at the 5′ end at least 90% of the time in vivo. As a non-limiting example, the 5′ processing of the guide strand is precise and has a correct start (n) at the 5′ end at least 85% of the time in vitro. As a non-limiting example, the 5′ processing of the guide strand is precise and has a correct start (n) at the 5′ end at least 85% of the time in vivo.

[0522] In one embodiment, a passenger-guide strand duplex for HTT is considered effective when the pri- or pre-microRNAs demonstrate, by methods known in the art and described herein, greater than 2-fold guide to passenger strand ratio when processing is measured. As a non-limiting examples, the pri- or pre-microRNAs demonstrate great than 2-fold, 3-fold, 4-fold, 5-fold, 6-fold, 7-fold, 8-fold, 9-fold, 10-fold, 11-fold, 12-fold, 13-fold, 14-fold, 15-fold, or 2 to 5-fold, 2 to 10-fold, 2 to 15-fold, 3 to 5-fold, 3 to 10-fold, 3 to 15-fold, 4 to 5-fold, 4 to 10-fold, 4 to 15-fold, 5 to 10-fold, 5 to 15-fold, 6 to 10-fold, 6 to 15-fold, 7 to 10-fold, 7 to 15-fold, 8 to 10-fold, 8 to 15-fold, 9 to 10-fold, 9 to 15-fold, 10 to 15-fold, 11 to 15-fold, 12 to 15-fold, 13 to 15-fold, or 14 to 15-fold guide to passenger strand ratio when processing is measured.

[0523] In one embodiment, the siRNA molecules may be used to silence wild type or mutant HTT by targeting at least one exon on the htt sequence. The exon may be exon 1, exon 2, exon 3, exon 4, exon 5, exon 6, exon 7, exon 8, exon 9, exon 10, exon 11, exon 12, exon 13, exon 14, exon 15, exon 16, exon 17, exon 18, exon 19, exon 20, exon 21, exon 22, exon 23, exon 24, exon 25, exon 26, exon 27, exon 28, exon 29, exon 30, exon 31, exon 32, exon 33, exon 34, exon 35, exon 36, exon 37, exon 38, exon 39, exon 40, exon 41, exon 42, exon 43, exon 44, exon 45, exon 46, exon 47, exon 48, exon 49, exon 50, exon 51, exon 52, exon 53, exon 54, exon 55, exon 56, exon 57, exon 58, exon 59, exon 60, exon 61, exon 62, exon 63, exon 64, exon 65, exon 66, and/or exon 67. As a non-limiting example, the siRNA molecules may be used to silence wild type or mutant HTT by targeting exon 1. As another non-limiting example, the siRNA molecules may be used to silence wild type or mutant HTT by targeting an exon other than exon 1. As another non-limiting example, the siRNA molecules may be used to silence wild type or mutant HTT by targeting exon 50. As another non-limiting example, the siRNA molecules may be used to silence wild type or mutant HTT by targeting exon 67.

[0524] In one embodiment, the siRNA molecules may be used to silence wild type and/or mutant HTT by targeting at least one exon on the htt sequence. The exon may be exon 1, exon 2, exon 3, exon 4, exon 5, exon 6, exon 7, exon 8, exon 9, exon 10, exon 11, exon 12, exon 13, exon 14, exon 15, exon 16, exon 17, exon 18, exon 19, exon 20, exon 21, exon 22, exon 23, exon 24, exon 25, exon 26, exon 27, exon 28, exon 29, exon 30, exon 31, exon 32, exon 33, exon 34, exon 35, exon 36, exon 37, exon 38, exon 39, exon 40, exon 41, exon 42, exon 43, exon 44, exon 45, exon 46, exon 47, exon 48, exon 49, exon 50, exon 51, exon 52, exon 53, exon 54, exon 55, exon 56, exon 57, exon 58, exon 59, exon 60, exon 61, exon 62, exon 63, exon 64, exon 65, exon 66, and/or exon 67. As a non-limiting example, the siRNA molecules may be used to silence wild type and/or mutant HTT by targeting exon 1. As another non-limiting example, the siRNA molecules may be used to silence wild type and/or mutant HTT by targeting an exon other than exon 1. As another non-limiting example, the siRNA molecules may be used to silence wild type and/or mutant HTT by targeting exon 50. As another non-limiting example, the siRNA molecules may be used to silence wild type and/or mutant HTT by targeting exon 67.

Design and Sequences of siRNA Duplexes Targeting SOD1 Gene

[0525] The present invention provides small interfering RNA (siRNA) duplexes (and modulatory polynucleotides encoding them) that target SOD1 mRNA to interfere with SOD1 gene expression and/or SOD1 protein production.

[0526] The encoded siRNA duplex of the present invention contains an antisense strand and a sense strand hybridized together forming a duplex structure, wherein the antisense strand is complementary to the nucleic acid sequence of the targeted SOD1 gene, and wherein the sense strand is homologous to the nucleic acid sequence of the targeted SOD1 gene. In some aspects, the 5′end of the antisense strand has a 5′ phosphate group and the 3′end of the sense strand contains a 3′hydroxyl group. In other aspects, there are none, one or 2 nucleotide overhangs at the 3′end of each strand.

[0527] Some guidelines for designing siRNAs have been proposed in the art. These guidelines generally recommend generating a 19-nucleotide duplexed region, symmetric 2-3 nucleotide 3′overhangs, 5′-phosphate and 3′-hydroxyl groups targeting a region in the gene to be silenced. Other rules that may govern siRNA sequence preference include, but are not limited to, (i) A/U at the 5′ end of the antisense strand; (ii) G/C at the 5′ end of the sense strand; (iii) at least five A/U residues in the 5′ terminal one-third of the antisense strand; and (iv) the absence of any GC stretch of more than 9 nucleotides in length. In accordance with such consideration, together with the specific sequence of a target gene, highly effective siRNA molecules essential for suppressing the SOD1 gene expression may be readily designed.

[0528] According to the present invention, siRNA molecules (e.g., siRNA duplexes or encoded dsRNA) that target the SOD1 gene are designed. Such siRNA molecules can specifically, suppress SOD1 gene expression and protein production. In some aspects, the siRNA molecules are designed and used to selectively “knock out” SOD1 gene variants in cells, i.e., mutated SOD1 transcripts that are identified in patients with ALS disease. In some aspects, the siRNA molecules are designed and used to selectively “knock down” SOD1 gene variants in cells. In other aspects, the siRNA molecules are able to inhibit or suppress both the wild type and mutated SOD1 gene.

[0529] In one embodiment, an siRNA molecule of the present invention comprises a sense strand and a complementary antisense strand in which both strands are hybridized together to form a duplex structure. The antisense strand has sufficient complementarity to the SOD1 mRNA sequence to direct target-specific RNAi, i.e., the siRNA molecule has a sequence sufficient to trigger the destruction of the target mRNA by the RNAi machinery or process.

[0530] In one embodiment, an siRNA molecule of the present invention comprises a sense strand and a complementary antisense strand in which both strands are hybridized together to form a duplex structure and where the start site of the hybridization to the SOD1 mRNA is between nucleotide 15 and 1000 on the SOD1 mRNA sequence. As a non-limiting example, the start site may be between nucleotide 15-25, 15-50, 15-75, 15-100, 100-150, 150-200, 200-250, 250-300, 300-350, 350-400, 400-450, 450-500, 500-550, 550-600, 600-650, 650-700, 700-70, 750-800, 800-850, 850-900, 900-950, and 950-1000 on the SOD1 mRNA sequence. As yet another non-limiting example, the start site may be nucleotide 26, 27, 28, 29, 30, 32, 33, 34, 35, 36, 37, 74, 76, 77, 78, 149, 153, 157, 160, 177, 192, 193, 195, 196, 197, 198, 199, 206, 209, 210, 239, 241, 261, 263, 264, 268, 269, 276, 278, 281, 284, 290, 291, 295, 296, 316, 317, 329, 330, 337, 350, 351, 352, 354, 357, 358, 364, 375, 378, 383, 384, 390, 392, 395, 404, 406, 417, 418, 469, 470, 475, 476, 480, 487, 494, 496, 497, 501, 504, 515, 518, 522, 523, 524, 552, 554, 555, 562, 576, 577, 578, 579, 581, 583, 584, 585, 587, 588, 589, 593, 594, 595, 596, 597, 598, 599, 602, 607, 608, 609, 610, 611, 612, 613, 616, 621, 633, 635, 636, 639, 640, 641, 642, 643, 644, 645, 654, 660, 661, 666, 667, 668, 669, 673, 677, 692, 698, 699, 700, 701, 706, 749, 770, 772, 775, 781, 800, 804, 819, 829, 832, 833, 851, 854, 855, 857, 858, 859, 861, 869, 891, 892, 906, 907, 912, 913, 934, 944, and 947 on the SOD1 mRNA sequence.

[0531] In some embodiments, the antisense strand and target SOD1 mRNA sequences have 100% complementarity. The antisense strand may be complementary to any part of the target SOD1 mRNA sequence.

[0532] In other embodiments, the antisense strand and target SOD1 mRNA sequences comprise at least one mismatch. As a non-limiting example, the antisense strand and the target SOD1 mRNA sequence have at least 30%, 40%, 50%, 60%, 70%, 80%, 81%, 82%, 83%, 84%, 85%, 86%, 87%, 88%, 89%, 90%, 91%, 92%, 93%, 94%, 95%, 96%, 97%, 98% or 99% or at least 20-30%, 20-40%, 20-50%, 20-60%, 20-70%, 20-80%, 20-90%, 20-95%, 20-99%, 30-40%, 30-50%, 30-60%, 30-70%, 30-80%, 30-90%, 30-95%, 30-99%, 40-50%, 40-60%, 40-70%, 40-80%, 40-90%, 40-95%, 40-99%, 50-60%, 50-70%, 50-80%, 50-90%, 50-95%, 50-99%, 60-70%, 60-80%, 60-90%, 60-95%, 60-99%, 70-80%, 70-90%, 70-95%, 70-99%, 80-90%, 80-95%, 80-99%, 90-95%, 90-99% or 95-99% complementarity.

[0533] In one embodiment, an siRNA or dsRNA targeting SOD1 includes at least two sequences that are complementary to each other.

[0534] According to the present invention, the siRNA molecule targeting SOD1 has a length from about 10-50 or more nucleotides, i.e., each strand comprising 10-50 nucleotides (or nucleotide analogs). Preferably, the siRNA molecule has a length from about 15-30, e.g., 15, 16, 17, 18, 19, 20, 21, 22, 23, 24, 25, 26, 27, 28, 29, or 30 nucleotides in each strand, wherein one of the strands is sufficiently complementarity to a target region. In one embodiment, each strand of the siRNA molecule has a length from about 19 to 25, 19 to 24 or 19 to 21 nucleotides. In one embodiment, at least one strand of the siRNA molecule is 19 nucleotides in length. In one embodiment, at least one strand of the siRNA molecule is 20 nucleotides in length. In one embodiment, at least one strand of the siRNA molecule is 21 nucleotides in length. In one embodiment, at least one strand of the siRNA molecule is 22 nucleotides in length. In one embodiment, at least one strand of the siRNA molecule is 23 nucleotides in length. In one embodiment, at least one strand of the siRNA molecule is 24 nucleotides in length. In one embodiment, at least one strand of the siRNA molecule is 25 nucleotides in length.

[0535] In some embodiments, the siRNA molecules of the present invention targeting SOD1 can be synthetic RNA duplexes comprising about 19 nucleotides to about 25 nucleotides, and two overhanging nucleotides at the 3′-end. In some aspects, the siRNA molecules may be unmodified RNA molecules. In other aspects, the siRNA molecules may contain at least one modified nucleotide, such as base, sugar or backbone modifications.

[0536] In one embodiment, the siRNA molecules of the present invention targeting SOD1 may comprise a nucleotide sequence such as, but not limited to, the antisense (guide) sequences in Table 7 or a fragment or variant thereof. As a non-limiting example, the antisense sequence used in the siRNA molecule of the present invention is at least 30%, 40%, 50%, 60%, 70%, 80%, 81%, 82%, 83%, 84%, 85&% 86%, 87%, 88%, 89%, 90%, 91&% 92%, 93%, 94%, 95%, 96%, 97%, 98% or 99% or at least 20-30%, 20-40%, 20-50%, 20-60%, 20-70%, 20-80%, 20-90%, 20-95%, 20-99%, 30-40%, 30-50%, 30-60%, 30-70%, 30-80%, 30-90%, 30-95%, 30-99%, 40-50%, 40-60%, 40-70%, 40-80%, 40-90%, 40-95%, 40-99%, 50-60%, 50-70%, 50-80%, 50-90%, 50-95%, 50-99%, 60-70%, 60-80%, 60-90%, 60-95%, 60-99%, 70-80%, 70-90%, 70-95%, 70-99%, 80-90%, 80-95%, 80-99%, 90-95%, 90-99% or 95-99% of a nucleotide sequence in Table 7. As another non-limiting example, the antisense sequence used in the siRNA molecule of the present invention comprises at least 3, 4, 5, 6, 7, 8, 9, 10, 11, 12, 13, 14, 15, 16, 17, 18, 19, 20, 21 or more than 21 consecutive nucleotides of a nucleotide sequence in Table 7. As yet another non-limiting example, the antisense sequence used in the siRNA molecule of the present invention comprises nucleotides 1 to 22, 1 to 21, 1 to 20, 1 to 19, 1 to 18, 1 to 17, 1 to 16, 1 to 15, 1 to 14, 1 to 13, 1 to 12, 1 to 11, 1 to 10, 1 to 9, 1 to 8, 2 to 22, 2 to 21, 2 to 20, 2 to 19, 2 to 18, 2 to 17, 2 to 16, 2 to 15, 2 to 14, 2 to 13, 2 to 12, 2 to 1, 2 to 10, 2 to 9, 2 to 8, 3 to 22, 3 to 21, 3 to 20, 3 to 19, 3 to 18, 3 to 17, 3 to 16, 3 to 15, 3 to 14, 3 to 13, 3 to 12, 3 to 11, 3 to 10, 3 to 9, 3 to 8, 4 to 22, 4 to 21, 4 to 20, 4 to 19, 4 to 18, 4 to 17, 4 to 16, 4 to 15, 4 to 14, 4 to 13, 4 to 12, 4 to 11, 4 to 10, 4 to 9, 4 to 8, 5 to 22, 5 to 21, 5 to 20, 5 to 19, 5 to 18, 5 to 17, 5 to 16, 5 to 15, 5 to 14, 5 to 13, 5 to 12, 5 to 11, 5 to 10, 5 to 9, 5 to 8, 6 to 22, 6 to 21, 6 to 20, 6 to 19, 6 to 18, 6 to 17, 6 to 16, 6 to 15, 6 to 14, 6 to 13, 6 to 12, 6 to 11, 6 to 10, 7 to 22, 7 to 21, 7 to 20, 7 to 19, 7 to 18, 7 to 17, 7 to 16, 7 to 15, 7 to 14, 7 to 13, 7 to 12, 8 to 22, 8 to 21, 8 to 20, 8 to 19, 8 to 18, 8 to 17, 8 to 16, 8 to 15, 8 to 14, 8 to 13, 8 to 12, 9 to 22, 9 to 21, 9 to 20, 9 to 19, 9 to 18, 9 to 17, 9 to 16, 9 to 15, 9 to 14, 10 to 22, 10 to 21, 10 to 20, 10 to 19, 10 to 18, 10 to 17, 10 to 16, 10 to 15, 10 to 14, 11 to 22, 11 to 21, 11 to 20, 11 to 19, 11 to 18, 11 to 17, 11 to 16, 11 to 15, 11 to 14, 12 to 22, 12 to 21, 12 to 20, 12 to 19, 12 to 18, 12 to 17, 12 to 16, 13 to 22, 13 to 21, 13 to 20, 13 to 19, 13 to 18, 13 to 17, 13 to 16, 14 to 22, 14 to 21, 14 to 20, 14 to 19, 14 to 18, 14 to 17, 15 to 22, 15 to 21, 15 to 20, 15 to 19, 15 to 18, 16 to 22, 16 to 21, 16 to 20, 17 to 22, 17 to 21, or 18 to 22 of the sequences in Table 7.

TABLE 7
Antisense Sequences

| Antisense | | SEQ |
|---|---|---|
| ID | Sequence | ID NO |
| A-3000 | UUUAUAGGCCAGACCUCCGdTdT | 1164 |
| A-3001 | UUUUAUAGGCCAGACCUCCdTdT | 1165 |
| A-3002 | UCUUUAUAGGCCAGACCUCdTdT | 1166 |
| A-3003 | UACUUUAUAGGCCAGACCUdTdT | 1167 |
| A-3004 | UUACUUUAUAGGCCAGACCdTdT | 1168 |
| A-3005 | UACUACUUUAUAGGCCAGAdTdT | 1169 |
| A-3006 | UGACUACUUUAUAGGCCAGdTdT | 1170 |
| A-3007 | UCGACUACUUUAUAGGCCAdTdT | 1171 |
| A-3008 | UGCGACUACUUUAUAGGCCdTdT | 1172 |
| A-3009 | UCGCGACUACUUUAUAGGCdTdT | 1173 |
| A-3010 | UCCGCGACUACUUUAUAGGdTdT | 1174 |
| A-3011 | UGCUGCAGGAGACUACGACdTdT | 1175 |
| A-3012 | UACGCUGCAGGAGACUACGdTdT | 1176 |
| A-3013 | UGACGCUGCAGGAGACUACdTdT | 1177 |
| A-3014 | UAGACGCUGCAGGAGACUAdTdT | 1178 |
| A-3015 | UCACGGCCUUCGUCGCCATATdT | 1179 |
| A-3016 | UCGCACACGGCCUUCGUCGdTdT | 1180 |
| A-3017 | UAGCACGCACACGGCCUUCdTdT | 1181 |
| A-3018 | UUUCAGCACGCACACGGCCdTdT | 1182 |
| A-3019 | UGCACUGGGCCGUCGCCCUdTdT | 1183 |
| A-3020 | UAAUUGAUGAUGCCCUGCAdTdT | 1184 |
| A-3021 | UAAAUUGAUGAUGCCCUGCdTdT | 1185 |
| A-3022 | UCGAAAUUGAUGAUGCCCUdTdT | 1186 |
| A-3023 | UUCGAAAUUGAUGAUGCCCdTdT | 1187 |
| A-3024 | UCUCGAAAUUGAUGAUGCCdTdT | 1188 |
| A-3025 | UGCUCGAAAUUGAUGAUGCdTdT | 1189 |
| A-3026 | UUGCUCGAAAUUGAUGAUGdTdT | 1190 |
| A-3027 | UUUCCUUCUGCUCGAAAUUdTdT | 1191 |
| A-3028 | UACUUUCCUUCUGCUCGAAdTdT | 1192 |
| A-3029 | UUACUUUCCUUCUGCUCGAdTdT | 1193 |
| A-3030 | UAAUGCUUCCCCACACCUUdTdT | 1194 |
| A-3031 | UUUAAUGCUUCCCCACACCdTdT | 1195 |
| A-3032 | UGCAGGCCUUCAGUCAGUCdTdT | 1196 |
| A-3033 | UAUGCAGGCCUUCAGUCAGdTdT | 1197 |
| A-3034 | UCAUGCAGGCCUUCAGUCAdTdT | 1198 |
| A-3035 | UAAUCCAUGCAGGCCUUCAdTdT | 1199 |
| A-3036 | UGAAUCCAUGCAGGCCUUCdTdT | 1200 |
| A-3037 | UGAACAUGGAAUCCAUGCAdTdT | 1201 |
| A-3038 | UAUGAACAUGGAAUCCAUGdTdT | 1202 |
| A-3039 | UCUCAUGAACAUGGAAUCCdTdT | 1203 |
| A-3040 | UAAACUCAUGAACAUGGAAdTdT | 1204 |
| A-3041 | UAUCUCCAAACUCAUGAACdTdT | 1205 |
| A-3042 | UUAUCUCCAAACUCAUGAAdTdT | 1206 |
| A-3043 | UGUAUUAUCUCCAAACUCAdTdT | 1207 |
| A-3044 | UUGUAUUAUCUCCAAACUCdTdT | 1208 |
| A-3045 | UCCUGCACUGGUACAGCCUdTdT | 1209 |
| A-3046 | UACCUGCACUGGUACAGCCdTdT | 1210 |
| A-3047 | UAUUAAAGUGAGGACCUGCdTdT | 1211 |
| A-3048 | UGAUUAAAGUGAGGACCUGdTdT | 1212 |
| A-3049 | UGAUAGAGGAUUAAAGUGAdTdT | 1213 |
| A-3050 | UACCGUGUUUUCUGGAUAGdTdT | 1214 |
| A-3051 | UCACCGUGUUUUCUGGAUAdTdT | 1215 |
| A-3052 | UCCACCGUGUUUUCUGGAUdTdT | 1216 |
| A-3053 | UGCCCACCGUGUUUUCUGGdTdT | 1217 |
| A-3054 | UUUGGCCCACCGUGUUUUCdTdT | 1218 |
| A-3055 | UTUUGGCCCACCGUGUUUUdTdT | 1219 |
| A-3056 | UUCAUCCUUUGGCCCACCGdTdT | 1220 |
| A-3057 | UCAUGCCUCUCUUCAUCCUdTdT | 1221 |
| A-3058 | UCAACAUGCCUCUCUUCAUdTdT | 1222 |
| A-3059 | UGUCUCCAACAUGCCUCUCdTdT | 1223 |
| A-3060 | UAGUCUCCAACAUGCCUCUdTdT | 1224 |
| A-3061 | UUGCCCAAGUCUCCAACAUdTdT | 1225 |
| A-3062 | UAUUGCCCAAGUCUCCAACdTdT | 1226 |
| A-3063 | UCACAUUGCCCAAGUCUCCdTdT | 1227 |
| A-3064 | UGUCAGCAGUCACAUUGCCdTdT | 1228 |
| A-3065 | UUUGUCAGCAGUCACAUUGdTdT | 1229 |
| A-3066 | UCCACACCAUCUUUGUCAGdTdT | 1230 |
| A-3067 | UGCCACACCAUCUUUGUCAdTdT | 1231 |
| A-3068 | UAUGCAAUGGUCUCCUGAGdTdT | 1232 |
| A-3069 | UGAUGCAAUGGUCUCCUGAdTdT | 1233 |
| A-3070 | UCCAAUGAUGCAAUGGUCUdTdT | 1234 |
| A-3071 | UGCCAAUGAUGCAAUGGUCdTdT | 1235 |
| A-3072 | UUGCGGCCAAUGAUGCAAUdfdT | 1236 |
| A-3073 | UACCAGUGUGCGGCCAAUGdTdT | 1237 |
| A-3074 | UAUGGACCACCAGUGUGCGdTdT | 1238 |
| A-3075 | UUCAUGGACCACCAGUGUGdTdT | 1239 |
| A-3076 | UUUCAUGGACCACCAGUGUdTdT | 1240 |
| A-3077 | UCUUUUUCAUGGACCACCAdTdT | 1241 |
| A-3078 | UCUGCUUUUUCAUGGACCAdTdT | 1242 |
| A-3079 | UGCCCAAGUCAUCUGCUUUdTdT | 1243 |
| A-3080 | UUUUGCCCAAGUCAUCUGCdTdT | 1244 |
| A-3081 | UCACCUUUGCCCAAGUCAUdTdT | 1245 |
| A-3082 | UCCACCUUUGCCCAAGUCAdTdT | 1246 |
| A-3083 | UUCCACCUUUGCCCAAGUCdTdT | 1247 |
| A-3084 | UCGUUUCCUGUCUUUGUACdTdT | 1248 |
| A-3085 | UAGCGUUUCCUGUCUUUGUdTdT | 1249 |
| A-3086 | UCAGCGUUUCCUGUCUUUGdTdT | 1250 |
| A-3087 | UCGACUUCCAGCGUUUCCUdTdT | 1251 |
| A-3088 | UCACCACAAGCCAAACGACdTdT | 1252 |
| A-3089 | UACACCACAAGCCAAACGAdTdT | 1253 |
| A-3090 | UUACACCACAAGCCAAACGdTdT | 1254 |
| A-3091 | UUUACACCACAAGCCAAACdTdT | 1255 |
| A-3092 | UAAUUACACCACAAGCCAAdTdT | 1256 |
| A-3093 | UCCAAUUACACCACAAGCCdTdT | 1157 |
| A-3094 | UCCCAAUUACACCACAAGCdTdT | 1258 |
| A-3095 | UUCCCAAUUACACCACAAGdTdT | 1259 |
| A-3096 | UGAUCCCAAUUACACCACAdTdT | 1260 |
| A-3097 | UCGAUCCCAAUUACACCACdTdT | 1261 |
| A-3098 | UGCGAUCCCAAUUACACCAdTdT | 1262 |
| A-3099 | UUUGGGCGAUCCCAAUUACdTdT | 1263 |
| A-3100 | UAUUGGGCGAUCCCAAUUAdTdT | 1264 |
| A-3101 | UUAUUGGGCGAUCCCAAUUdTdT | 1265 |
| A-3102 | UUUAUUGGGCGAUCCCAAUdTdT | 1266 |
| A-3103 | UUUUAUUGGGCGAUCCCAAdTdT | 1267 |
| A-3104 | UGUUUAUUGGGCGAUCCCAdTdT | 1268 |
| A-3105 | UUGUUUAUUGGGCGAUCCCdTdT | 1269 |
| A-3106 | UGAAUGUUUAUUGGGCGAUdTdT | 1270 |
| A-3107 | UCAAGGGAAUGUUUAUUGGdTdT | 1271 |
| A-3108 | UCCAAGGGAAUGUUUAUUGdTdT | 1272 |
| A-3109 | UUCCAAGGGAAUGUUUAUUdTdT | 1273 |
| A-3110 | UAUCCAAGGGAAUGUUUAUdTdT | 1274 |
| A-3111 | UCAUCCAAGGGAAUGUUUAdTdT | 1275 |
| A-3112 | UACAUCCAAGGGAAUGUUUdTdT | 1276 |
| A-3113 | UUACAUCCAAGGGAAUGUUdTdT | 1277 |
| A-3114 | UGACUACAUCCAAGGGAAUdTdT | 1278 |
| A-3115 | UCCUCAGACUACAUCCAAGdTdT | 1279 |
| A-3116 | UUGAGUUAAGGGGCCUCAGdTdT | 1280 |
| A-3117 | UGAUGAGUUAAGGGGCCUCdTdT | 1281 |
| A-3118 | UAGAUGAGUUAAGGGGCCUdTdT | 1282 |
| A-3119 | UAACAGAUGAGUUAAGGGGdTdT | 1283 |
| A-3120 | UUAACAGAUGAGUUAAGGGdTdT | 1284 |
| A-3121 | UAUAACAGAUGAGUUAAGGdTdT | 1285 |
| A-3122 | UGAUAACAGAUGAGUUAAGdTdT | 1286 |
| A-3123 | UGGAUAACAGAUGAGUUAAdTdT | 1287 |
| A-3124 | UAGGAUAACAGAUGAGUUAdTdT | 1288 |
| A-3125 | UCAGGAUAACAGAUGAGUUdTdT | 1289 |
| A-3126 | UUACAGCUAGCAGGAUAACdTdT | 1290 |
| A-3127 | UCAUUUCUACAGCUAGCAGdTdT | 1291 |
| A-3128 | UACAUUUCUACAGCUAGCAdTdT | 1292 |
| A-3129 | UAGGAUACAUUUCUACAGCdTdT | 1293 |
| A-3130 | UCAGGAUACAUUUCUACAGdTdT | 1294 |
| A-3131 | UUCAGGAUACAUUUCUACAdTdT | 1295 |
| A-3132 | UAUCAGGAUACAUUUCUACdTdT | 1296 |
| A-3133 | UGUUUAUCAGGAUACAUUUdTdT | 1297 |
| A-3134 | UUAAUGUUUAUCAGGAUACdTdT | 1298 |
| A-3135 | UUAAGAUUACAGUGUUUAAdTdT | 1299 |
| A-3136 | UCACUUUUAAGAUUACAGUdTdT | 1300 |
| A-3137 | UACACUUUUAAGAUUACAGdTdT | 1301 |
| A-3138 | UUACACUUUUAAGAUUACAdTdT | 1302 |
| A-3139 | UUUACACUUUUAAGAUUACdTdT | 1303 |
| A-3140 | UCACAAUUACACUUUUAAGdTdT | 1304 |
| A-3141 | UAGUUUCUCACUACAGGUAdTdT | 1305 |
| A-3142 | UUCUUCCAAGUGAUCAUAAdTdT | 1306 |
| A-3143 | UAAUCUUCCAAGUGAUCAUdTdT | 1307 |
| A-3144 | UACAAAUCUUCCAAGUGAUdTdT | 1308 |
| A-3145 | UAACUAUACAAAUCUUCCAdTdT | 1309 |
| A-3146 | UUUUUAACUGAGUUUUAUAdTdT | 1310 |
| A-3147 | UGACAUUUUAACUGAGUUUdTdT | 1311 |
| A-3148 | UCAGGUCAUUGAAACAGACdTdT | 1312 |
| A-3149 | UUGGCAAAAUACAGGUCAUdTdT | 1313 |
| A-3150 | UGUCUGGCAAAAUACAGGUdTdT | 1314 |
| A-3151 | UAGUCUGGCAAAAUACAGGdTdT | 1315 |
| A-3152 | UAUACCCAUCUGUGAUUUAdTdT | 1316 |
| A-3153 | UUUAAUACCCAUCUGUGAUdTdT | 1317 |
| A-3154 | UUUUAAUACCCAUCUGUGAdTdT | 1318 |
| A-3155 | UAGUUUAAUACCCAUCUGUdTdT | 1319 |
| A-3156 | UAAGUUUAAUACCCAUCUGdTdT | 1320 |
| A-3157 | UCAAGUUUAAUACCCAUCUdTdT | 1321 |
| A-3158 | UGACAAGUUUAAUACCCAUdTdT | 1322 |
| A-3159 | UGAAAUUCUGACAAGUUUAdTdT | 1323 |
| A-3160 | UAUUCACAGGCUUGAAUGAdTdT | 1324 |
| A-3161 | UUAUUCACAGGCUUGAAUGdTdT | 1325 |
| A-3162 | UCCAUACAGGGUUUUUAUUdTdT | 1326 |
| A-3163 | UGCCAUACAGGGUUUUUAUdTdT | 1327 |
| A-3164 | UUAAGUGCCAUACAGGGUUdTdT | 1328 |
| A-3165 | UAUAAGUGCCAUACAGGGUdTdT | 1329 |
| A-3166 | UGAUUCUUUUAAUAGCCUCdTdT | 1330 |
| A-3167 | UUUUGAAUUUGGAUUCUUUdTdT | 1331 |
| A-3168 | UUAGUUUGAAUUUGGAUUCdTdT | 1332 |

[0537] In one embodiment, the siRNA molecules of the present invention targeting SOD1 may comprise a nucleotide sequence such as, but not limited to, the sense (passenger) sequences in Table 8 or a fragment or variant thereof. As a non-limiting example, the sense sequence used in the siRNA molecule of the present invention is at least 30%, 40%, 50%, 60%, 70%, 80%, 81%, 82%, 83%, 84%, 85%, 86%, 87%, 88%, 89%, 90%, 91%, 92%, 93%, 94%, 95%, 96%, 97%, 98% or 99% or at least 20-30%, 20-40%, 20-50%, 20-60%, 20-70%, 20-80%, 20-90%, 20-95%, 20-99%, 30-40%, 30-50%, 30-60%, 30-70%, 30-80%, 30-90%, 30-95%, 30-99%, 40-50%, 40-60%, 40-70%, 40-80%, 40-90%, 40-95%, 40-99%, 50-60%, 50-70%, 50-80%, 50-90%, 50-95%, 50-99%, 60-70%, 60-80%, 60-90%, 60-95%, 60-99%, 70-80%, 70-90%, 70-95%, 70-99%, 80-90%, 80-95%, 80-99%, 90-95%, 90-99% or 95-99% of a nucleotide sequence in Table 8. As another non-limiting example, the sense sequence used in the siRNA molecule of the present invention comprises at least 3, 4, 5, 6, 7, 8, 9, 10, 11, 12, 13, 14, 15, 16, 17, 18, 19, 20, 21 or more than 21 consecutive nucleotides of a nucleotide sequence in Table 8. As yet another non-limiting example, the sense sequence used in the siRNA molecule of the present invention comprises nucleotides 1 to 22, 1 to 21, 1 to 20, 1 to 19, 1 to 18, 1 to 17, 1 to 16, 1 to 15, 1 to 14, 1 to 13, 1 to 12, 1 to 11, 1 to 10, 1 to 9, 1 to 8, 2 to 22, 2 to 21, 2 to 20, 2 to 19, 2 to 18, 2 to 17, 2 to 16, 2 to 15, 2 to 14, 2 to 13, 2 to 12, 2 to 11, 2 to 10, 2 to 9, 2 to 8, 3 to 22, 3 to 21, 3 to 20, 3 to 19, 3 to 18, 3 to 17, 3 to 16, 3 to 15, 3 to 14, 3 to 13, 3 to 12, 3 to 11, 3 to 10, 3 to 9, 3 to 8, 4 to 22, 4 to 21, 4 to 20, 4 to 19, 4 to 18, 4 to 17, 4 to 16, 4 to 15, 4 to 14, 4 to 13, 4 to 12, 4 to 1, 4 to 10, 4 to 9, 4 to 8, 5 to 22, 5 to 21, 5 to 20, 5 to 19, 5 to 18, 5 to 17, 5 to 16, 5 to 15, 5 to 14, 5 to 13, 5 to 12, 5 to 11, 5 to 10, 5 to 9, 5 to 8, 6 to 22, 6 to 21, 6 to 20, 6 to 19, 6 to 18, 6 to 17, 6 to 16, 6 to 15, 6 to 14, 6 to 13, 6 to 12, 6 to 11, 6 to 10, 7 to 22, 7 to 21, 7 to 20, 7 to 19, 7 to 18, 7 to 17, 7 to 16, 7 to 15, 7 to 14, 7 to 13, 7 to 12, 8 to 22, 8 to 21, 8 to 20, 8 to 19, 8 to 18, 8 to 17, 8 to 16, 8 to 15, 8 to 14, 8 to 13, 8 to 12, 9 to 22, 9 to 21, 9 to 20, 9 to 19, 9 to 18, 9 to 17, 9 to 16, 9 to 15, 9 to 14, 10 to 22, 10 to 21, 10 to 20, 10 to 19, 10 to 18, 10 to 17, 10 to 16, 10 to 15, 10 to 14, 11 to 22, 11 to 21, 11 to 20, 11 to 19, 11 to 18, 11 to 17, 11 to 16, 11 to 15, 11 to 14, 12 to 22, 12 to 21, 12 to 20, 12 to 19, 12 to 18, 12 to 17, 12 to 16, 13 to 22, 13 to 21, 13 to 20, 13 to 19, 13 to 18, 13 to 17, 13 to 16, 14 to 22, 14 to 21, 14 to 20, 14 to 19, 14 to 18, 14 to 17, 15 to 22, 15 to 21, 15 to 20, 15 to 19, 15 to 18, 16 to 22, 16 to 21, 16 to 20, 17 to 22, 17 to 21, or 18 to 22 of the sequences in Table 8.

TABLE 8
Sense Sequences

| Sense | | |
|---|---|---|
| ID | Sequence | SEQ ID NO |
| S- | CGGAGGUCUGGCCUAUAACdTdT | 1333 |
| 3000 | | |
| S- | GGAGGUCUGGCCUAUAAACdTdT | 1334 |
| 3001 | | |
| S- | GAGGUCUGGCCUAUAAAGCdTdT | 1335 |
| 3002 | | |
| S- | AGGUCUGGCCUAUAAAGUCdTdT | 1336 |
| 3003 | | |
| S- | GGUCUGGCCUAUAAAGUACdTdT | 1337 |
| 3004 | | |
| S- | UCUGGCCUAUAAAGUAGUCdTdT | 1338 |
| 3005 | | |
| S- | CUGGCCUAUAAAGUAGUCCdTdT | 1339 |
| 3006 | | |
| S- | UGGCCUAUAAAGUAGUCGCdTdT | 1340 |
| 3007 | | |
| S- | GGCCUAUAAAGUAGUCGCCdTdT | 1341 |
| 3008 | | |
| S- | GCCUAUAAAGUAGUCGCGCdTdT | 1342 |
| 3009 | | |
| S- | CCUAUAAAGUAGUCGCGGCdTdT | 1343 |
| 3010 | | |
| S- | GUCGUAGUCUCCUGCAGCCdTdT | 1344 |
| 3011 | | |
| S- | CGUAGUCUCCUGCAGCGUCdTdT | 1345 |
| 3012 | | |
| S- | GUAGUCUCCUGCAGCGUCCdTdT | 1346 |
| 3013 | | |
| S- | UAGUCUCCUGCAGCGUCUCdTdT | 1347 |
| 3014 | | |
| S- | AUGGCGACGAAGGCCGUGCdTdT | 1348 |
| 3015 | | |
| S- | CGACGAAGGCCGUGUGCGCdTdT | 1349 |
| 3016 | | |
| S- | GAAGGCCGUGUGCGUGCUCdTdT | 1350 |
| 3017 | | |
| S- | GGCCGUGUGCGUGCUGAACdTdT | 1351 |
| 3018 | | |
| S- | AGGGCGACGGCCCAGUGCCdTdT | 1352 |
| 3019 | | |
| S- | UGCAGGGCAUCAUCAAUUCdTdT | 1353 |
| 3020 | | |
| S- | GCAGGGCAUCAUCAAUUUCdTdT | 1354 |
| 3021 | | |
| S- | AGGGCAUCAUCAAUUUCGCdTdT | 1355 |
| 3022 | | |
| S- | GGGCAUCAUCAAUUUCGACdTdT | 1356 |
| 3023 | | |
| S- | GGCAUCAUCAAUUUCGAGCdTdT | 1357 |
| 3024 | | |
| S- | GCAUCAUCAAUUUCGAGCCdTdT | 1358 |
| 3025 | | |
| S- | CAUCAUCAAUUUCGAGCACdTdT | 1359 |
| 3026 | | |
| S- | AAUUUCGAGCAGAAGGAACdTdT | 1360 |
| 3027 | | |
| S- | UUCGAGCAGAAGGAAAGUCdTdT | 1361 |
| 3028 | | |
| S- | UCGAGCAGAAGGAAAGUACdTdT | 1362 |
| 3029 | | |
| S- | AAGGUGUGGGGAAGCAUUCdTdT | 1363 |
| 3030 | | |
| S- | GGUGUGGGGAAGCAUUAACdTdT | 1364 |
| 3031 | | |
| S- | GACUGACUGAAGGCCUGCCdTdT | 1365 |
| 3032 | | |
| S- | CUGACUGAAGGCCUGCAUCdTdT | 1366 |
| 3033 | | |
| S- | UGACUGAAGGCCUGCAUGCdTdT | 1367 |
| 3034 | | |
| S- | UGAAGGCCUGCAUGGAUUCdTdT | 1368 |
| 3035 | | |
| S- | GAAGGCCUGCAUGGAUUCCdTdT | 1369 |
| 3036 | | |
| S- | UGCAUGGAUUCCAUGUUCCdTdT | 1370 |
| 3037 | | |
| S- | CAUGGAUUCCAUGUUCAUCdTdT | 1371 |
| 3038 | | |
| S- | GGAUUCCAUGUUCAUGAGCdTdT | 1372 |
| 3039 | | |
| S- | UUCCAUGUUCAUGAGUUUCdTdT | 1373 |
| 3040 | | |
| S- | GUUCAUGAGUUUGGAGAUCdTdT | 1374 |
| 3041 | | |
| S- | UUCAUGAGUUUGGAGAUACdTdT | 1375 |
| 3042 | | |
| S- | UGAGUUUGGAGAUAAUACCdTdT | 1376 |
| 3043 | | |
| S- | GAGUUUGGAGAUAAUACACdTdT | 1377 |
| 3044 | | |
| S- | AGGCUGUACCAGUGCAGGCdTdT | 1378 |
| 3045 | | |
| S- | GGCUGUACCAGUGCAGGUCdTdT | 1379 |
| 3046 | | |
| S- | GCAGGUCCUCACUUUAAUCdTdT | 1380 |
| 3047 | | |
| S- | CAGGUCCUCACUUUAAUCCdTdT | 1381 |
| 3048 | | |
| S- | UCACUUUAAUCCUCUAUCCdTdT | 1382 |
| 3049 | | |
| S- | CUAUCCAGAAAACACGGUCdTdT | 1383 |
| 3050 | | |
| S- | UAUCCAGAAAACACGGUGCdTdT | 1384 |
| 3051 | | |
| S- | AUCCAGAAAACACGGUGGCdTdT | 1385 |
| 3052 | | |
| S- | CCAGAAAACACGGUGGGCCdTdT | 1386 |
| 3053 | | |
| S- | GAAAACACGGUGGGCCAACdTdT | 1387 |
| 3054 | | |
| S- | AAAACACGGUGGGCCAAACdTdT | 1388 |
| 3055 | | |
| S- | CGGUGGGCCAAAGGAUGACdTdT | 1389 |
| 3056 | | |
| S- | AGGAUGAAGAGAGGCAUGCdTdT | 1390 |
| 3057 | | |
| S- | AUGAAGAGAGGCAUGUUGCdTdT | 1391 |
| 3058 | | |
| S- | GAGAGGCAUGUUGGAGACCdTdT | 1392 |
| 3059 | | |
| S- | AGAGGCAUGUUGGAGACUCdTdT | 1393 |
| 3060 | | |
| S- | AUGUUGGAGACUUGGGCACdTdT | 1394 |
| 3061 | | |
| S- | GUUGGAGACUUGGGCAAUCdTdT | 1395 |
| 3062 | | |
| S- | GGAGACUUGGGCAAUGUGCdTdT | 1396 |
| 3063 | | |
| S- | GGCAAUGUGACUGCUGACCdTdT | 1397 |
| 3064 | | |
| S- | CAAUGUGACUGCUGACAACdTdT | 1398 |
| 3065 | | |
| S- | CUGACAAAGAUGGUGUGGCdTdT | 1399 |
| 3066 | | |
| S- | UGACAAAGAUGGUGUGGCCdTdT | 1400 |
| 3067 | | |
| S- | CUCAGGAGACCAUUGCAUCdTdT | 1401 |
| 3068 | | |
| S- | UCAGGAGACCAUUGCAUCCdTdT | 1402 |
| 3069 | | |
| S- | AGACCAUUGCAUCAUUGGCdTdT | 1403 |
| 3070 | | |
| S- | GACCAUUGCAUCAUUGGCCdTdT | 1404 |
| 3071 | | |
| S- | AUUGCAUCAUUGGCCGCACdTdT | 1405 |
| 3072 | | |
| S- | CAUUGGCCGCACACUGGUCdTdT | 1406 |
| 3073 | | |
| S- | CGCACACUGGUGGUCCAUCdTdT | 1407 |
| 3074 | | |
| S- | CACACUGGUGGUCCAUGACdTdT | 1408 |
| 3075 | | |
| S- | ACACUGGUGGUCCAUGAACdTdT | 1409 |
| 3076 | | |
| S- | UGGUGGUCCAUGAAAAAGCdTdT | 1410 |
| 3077 | | |
| S- | UGGUCCAUGAAAAAGCAGCdTdT | 1411 |
| 3078 | | |
| S- | AAAGCAGAUGACUUGGGCCdTdT | 1412 |
| 3079 | | |
| S- | GCAGAUGACUUGGGCAAACdTdT | 1413 |
| 3080 | | |
| S- | AUGACUUGGGCAAAGGUGCdTdT | 1414 |
| 3081 | | |
| S- | UGACUUGGGCAAAGGUGGCdTdT | 1415 |
| 3082 | | |
| S- | GACUUGGGCAAAGGUGGACdTdT | 1416 |
| 3083 | | |
| S- | GUACAAAGACAGGAAACGCdTdT | 1417 |
| 3084 | | |
| S- | ACAAAGACAGGAAACGCUCdTdT | 1418 |
| 3085 | | |
| S- | CAAAGACAGGAAACGCUGCdTdT | 1419 |
| 3086 | | |
| S- | AGGAAACGCUGGAAGUCGCdTdT | 1420 |
| 3087 | | |
| S- | GUCGUUUGGCUUGUGGUGCdTdT | 1421 |
| 3088 | | |
| S- | UCGUUUGGCUUGUGGUGUCdTdT | 1422 |
| 3089 | | |
| S- | CGUUUGGCUUGUGGUGUACdTdT | 1423 |
| 3090 | | |
| S- | GUUUGGCUUGUGGUGUAACdTdT | 1424 |
| 3091 | | |
| S- | UUGGCUUGUGGUGUAAUUCdTdT | 1425 |
| 3092 | | |
| S- | GGCUUGUGGUGUAAUUGGCdTdT | 1426 |
| 3093 | | |
| S- | GCUUGUGGUGUAAUUGGGCdTdT | 1427 |
| 3094 | | |
| S- | CUUGUGGUGUAAUUGGGACdTdT | 1428 |
| 3095 | | |
| S- | UGUGGUGUAAUUGGGAUCCdTdT | 1429 |
| 3096 | | |
| S- | GUGGUGUAAUUGGGAUCGCdTdT | 1430 |
| 3097 | | |
| S- | UGGUGUAAUUGGGAUCGCCdTdT | 1341 |
| 3098 | | |
| S- | GUAAUUGGGAUCGCCCAACdTdT | 1432 |
| 3099 | | |
| S- | UAAUUGGGAUCGCCCAAUCdTdT | 1433 |
| 3100 | | |
| S- | AAUUGGGAUCGCCCAAUACdTdT | 1434 |
| 3101 | | |
| S- | AUUGGGAUCGCCCAAUAACdTdT | 1435 |
| 3102 | | |
| S- | UUGGGAUCGCCCAAUAAACdTdT | 1436 |
| 3103 | | |
| S- | UGGGAUCGCCCAAUAAACCdTdT | 1437 |
| 3104 | | |
| S- | GGGAUCGCCCAAUAAACACdTdT | 1438 |
| 3105 | | |
| S- | AUCGCCCAAUAAACAUUCCdTdT | 1439 |
| 3106 | | |
| S- | CCAAUAAACAUUCCCUUGCdTdT | 1440 |
| 3107 | | |
| S- | CAAUAAACAUUCCCUUGGCdTdT | 1441 |
| 3108 | | |
| S- | AAUAAACAUUCCCUUGGACdTdT | 1442 |
| 3109 | | |
| S- | AUAAACAUUCCCUUGGAUCdTdT | 1443 |
| 3110 | | |
| S- | UAAACAUUCCCUUGGAUGCdTdT | 1444 |
| 3111 | | |
| S- | AAACAUUCCCUUGGAUGUCdTdT | 1445 |
| 3112 | | |
| S- | AACAUUCCCUUGGAUGUACdTdT | 1446 |
| 3113 | | |
| S- | AUUCCCUUGGAUGUAGUCCdTdT | 1447 |
| 3114 | | |
| S- | CUUGGAUGUAGUCUGAGGCdTdT | 1448 |
| 3115 | | |
| S- | CUGAGGCCCCUUAACUCACdTdT | 1449 |
| 3116 | | |
| S- | GAGGCCCCUUAACUCAUCCdTdT | 1450 |
| 3117 | | |
| S- | AGGCCCCUUAACUCAUCUCdTdT | 1451 |
| 3118 | | |
| S- | CCCCUUAACUCAUCUGUUCdTdT | 1452 |
| 3119 | | |
| S- | CCCUUAACUCAUCUGUUACdTdT | 1453 |
| 3120 | | |
| S- | CCUUAACUCAUCUGUUAUCdTdT | 1454 |
| 3121 | | |
| S- | CUUAACUCAUCUGUUAUCCdTdT | 1455 |
| 3122 | | |
| S- | UUAACUCAUCUGUUAUCCCdTdT | 1456 |
| 3123 | | |
| S- | UAACUCAUCUGUUAUCCUCdTdT | 1457 |
| 3124 | | |
| S- | AACUCAUCUGUUAUCCUGCdTdT | 1458 |
| 3125 | | |
| S- | GUUAUCCUGCUAGCUGUACdTdT | 1459 |
| 3126 | | |
| S- | CUGCUAGCUGUAGAAAUGCdTdT | 1460 |
| 3127 | | |
| S- | UGCUAGCUGUAGAAAUGUCdTdT | 1461 |
| 3128 | | |
| S- | GCUGUAGAAAUGUAUCCUCdTdT | 1462 |
| 3129 | | |
| S- | CUGUAGAAAUGUAUCCUGCdTdT | 1463 |
| 3130 | | |
| S- | UGUAGAAAUGUAUCCUGACdTdT | 1464 |
| 3131 | | |
| S- | GUAGAAAUGUAUCCUGAUCdTdT | 1465 |
| 3132 | | |
| S- | AAAUGUAUCCUGAUAAACCdTdT | 1466 |
| 3133 | | |
| S- | GUAUCCUGAUAAACAUUACdTdT | 1467 |
| 3134 | | |
| S- | UUAAACACUGUAAUCUUACdTdT | 1468 |
| 3135 | | |
| S- | ACUGUAAUCUUAAAAGUGCdTdT | 1469 |
| 3136 | | |
| S- | CUGUAAUCUUAAAAGUGUCdTdT | 1470 |
| 3137 | | |
| S- | UGUAAUCUUAAAAGUGUACdTdT | 1471 |
| 3138 | | |
| S- | GUAAUCUUAAAAGUGUAACdTdT | 1472 |
| 3139 | | |
| S- | CUUAAAAGUGUAAUUGUGCdTdT | 1473 |
| 3140 | | |
| S- | UACCUGUAGUGAGAAACUCdTdT | 1474 |
| 3141 | | |
| S- | UUAUGAUCACUUGGAAGACdTdT | 1475 |
| 3142 | | |
| S- | AUGAUCACUUGGAAGAUUCdTdT | 1476 |
| 3143 | | |
| S- | AUCACUUGGAAGAUUUGUCdTdT | 1477 |
| 3144 | | |
| S- | UGGAAGAUUUGUAUAGUUCdTdT | 1478 |
| 3145 | | |
| S- | UAUAAAACUCAGUUAAAACdTdT | 1479 |
| 3146 | | |
| S- | AAACUCAGUUAAAAUGUCCdTdT | 1480 |
| 3147 | | |
| S- | GUCUGUUUCAAUGACCUGCdTdT | 1481 |
| 3148 | | |
| S- | AUGACCUGUAUUUUGCCACdTdT | 1482 |
| 3149 | | |
| S- | ACCUGUAUUUUGCCAGACCdTdT | 1483 |
| 3150 | | |
| S- | CCUGUAUUUUGCCAGACUCdTdT | 1484 |
| 3151 | | |
| S- | UAAAUCACAGAUGGGUAUCdTdT | 1485 |
| 3152 | | |
| S- | AUCACAGAUGGGUAUUAACdTdT | 1486 |
| 3153 | | |
| S- | UCACAGAUGGGUAUUAAACdTdT | 1487 |
| 3154 | | |
| S- | ACAGAUGGGUAUUAAACUCdTdT | 1488 |
| 3155 | | |
| S- | CAGAUGGGUAUUAAACUUCdTdT | 1489 |
| 3156 | | |
| S- | AGAUGGGUAUUAAACUUGCdTdT | 1490 |
| 3157 | | |
| S- | AUGGGUAUUAAACUUGUCCdTdT | 1491 |
| 3158 | | |
| S- | UAAACUUGUCAGAAUUUCCdTdT | 1492 |
| 3159 | | |
| S- | UCAUUCAAGCCUGUGAAUCdTdT | 1493 |
| 3160 | | |
| S- | CAUUCAAGCCUGUGAAUACdTdT | 1494 |
| 3161 | | |
| S- | AAUAAAAACCCUGUAUGGCdTdT | 1495 |
| 3162 | | |
| S- | AUAAAAACCCUGUAUGGCCdTdT | 1496 |
| 3163 | | |
| S- | AACCCUGUAUGGCACUUACdTdT | 1497 |
| 3164 | | |
| S- | ACCCUGUAUGGCACUUAUCdTdT | 1498 |
| 3165 | | |
| S- | GAGGCUAUUAAAAGAAUCCdTdT | 1499 |
| 3166 | | |
| S- | AAAGAAUCCAAAUUCAAACdTdT | 1500 |
| 3167 | | |
| S- | GAAUCCAAAUUCAAACUACdTdT | 1501 |
| 3168 | | |

[0538] In one embodiment, the siRNA molecules of the present invention targeting SOD1 may comprise an antisense sequence from Table 7 and a sense sequence from Table 8, or a fragment or variant thereof. As a non-limiting example, the antisense sequence and the sense sequence have at least 30%, 40%, 50%, 60%, 70%, 80%, 81%, 82%, 83%, 84%, 85%, 86%, 87%, 88%, 89%, 90%, 91%, 92%, 93%, 94%, 95%, 96%, 97%, 98% or 99% or at least 20-30%, 20-40%, 20-50%, 20-60%, 20-70%, 20-80%, 20-90%, 20-95%, 20-99%, 30-40%, 30-50%, 30-60%, 30-70%, 30-80%, 30-90%, 30-95%, 30-99%, 40-50%, 40-60%, 40-70%, 40-80%, 40-90%, 40-95%, 40-99%, 50-60%, 50-70%, 50-80%, 50-90%, 50-95%, 50-99%, 60-70%, 60-80%, 60-90%, 60-95%, 60-99%, 70-80%, 70-90%, 70-95%, 70-99%, 80-90%, 80-95%, 80-99%, 90-95%, 90-99% or 95-99% complementarity.

[0539] In one embodiment, the siRNA molecules of the present invention targeting SOD1 may comprise the sense and antisense siRNA duplex as described in Table 9. As a non-limiting example, these siRNA duplexes may be tested for in vitro inhibitory activity on endogenous SOD1 gene expression. The start site for the sense and antisense sequence is compared to SOD1 gene sequence known as NM_000454.4 (SEQ ID NO: 1502) from NCBI.

TABLE 9
Sense and antisense strand sequences of SOD1 dsRNA

| siRNA | | | | | | AS |
|---|---|---|---|---|---|---|
| Duplex | | Sense Strand | SS SEQ | | Antisense Strand | SEQ |
| ID | SS ID | Sequence (5′-3′) | ID | AS ID | Sequence (5′-3′) | ID |
| D-2741 | S-3000 | CGGAGGUCUGGCCU | 1333 | A-3000 | UUUAUAGGCCAGA | 1164 |
| | | AUAACdTdT | | | CCUCGdTdT | |
| D-2742 | S-3001 | GGAGGUCUGGCCUA | 1334 | A-3001 | UUUUAUAGGCCAG | 1165 |
| | | UAAACdTdT | | | ACCUCCdTdT | |
| D-2743 | S-3002 | GAGGUCUGGCCUAU | 1335 | A-3002 | UCUUUAUAGGCCA | 1166 |
| | | AAAGCdTdT | | | GACCUCdTdT | |
| D-2744 | S-3003 | AGGUCUGGCCUAUA | 1336 | A-3003 | UACUUUAUAGGCC | 1167 |
| | | AAGUCdTdT | | | AGACCUdTdT | |
| D-2745 | S-3004 | GGUCUGGCCUAUAA | 1337 | A-3004 | UUACUUUAUAGGC | 1168 |
| | | AGIACdTdT | | | CAGACCdTdT | |
| D-2746 | S-3005 | UCUGGCCUAUAAAG | 1338 | A-3005 | UACUACUUUAUAG | 1169 |
| | | UAGUCdTdT | | | GCCAGAdTdT | |
| D-2747 | S-3006 | CUGGCCUAUAAAGU | 1339 | A-3006 | UGACUACUUUAUA | 1170 |
| | | AGUCCdTdT | | | GGCCAGdTdT | |
| D-2748 | S-3007 | UGGCCUAUAAAGUA | 1340 | A-3007 | UCGACUACUUUAU | 1171 |
| | | GUCGCdTdT | | | AGGCCAdTdT | |
| D-2749 | S-3008 | GGCCUAUAAAGUAG | 1341 | A-3008 | UGCGACUACUUUA | 1172 |
| | | UCGCCdTdT | | | UAGGCCdTdT | |
| D-2750 | S-3009 | GCCUAUAAAGUAGU | 1342 | A-3009 | UCGCGACUACUUUA | 1173 |
| | | CGCGCdTdT | | | UAGGCdTdT | |
| D-2751 | S-3010 | CCUAUAAAGUACUC | 1343 | A-3010 | UCCGCGACUACUUU | 1174 |
| | | GCGGCdTdT | | | AUAGGdTdT | |
| D-2752 | S-3011 | GUCGUAGUCUCCUG | 1344 | A-3011 | UGCUGCAGGAGAC | 1175 |
| | | CAGCCdTdT | | | UACGACdTdT | |
| D-2753 | S-3012 | CGUAGUCUCCUGCA | 1345 | A-3012 | UACGCUGCAGGAGA | 1176 |
| | | GCGUCdTdT | | | CUACGdTdT | |
| D-2754 | S-3013 | GUAGUCUCCUGCAG | 1346 | A-3013 | UGACGCUGCAGGA | 1177 |
| | | CGUCCdTdT | | | GACUACdTdT | |
| D-2755 | S-3014 | UAGUCUCCUGCAGC | 1347 | A-3014 | UAGACGCUGCAGGA | 1178 |
| | | GUCUCdTdT | | | GACUAdTdT | |
| D-2756 | S-3015 | AUGGCGACGAAGGC | 1348 | A-3015 | UCACGGCCUUCGUC | 1179 |
| | | CGUGCdTdT | | | GCCAUdTdT | |
| D-2757 | S-3016 | CGACGAAGGCCGUG | 1349 | A-3016 | UCGCACACGGCCUU | 1180 |
| | | UGCGCdTdT | | | CGUCGdTdT | |
| D-2758 | S-3017 | GAAGGCCGUGUGCG | 1350 | A-3017 | UAGCACGCACACGG | 1181 |
| | | UGCUCdTdT | | | CCUUCdTdT | |
| D-2759 | S-3018 | GGCCGUGUGCGUGC | 1351 | A-3018 | UUUCAGCACGCACA | 1182 |
| | | UGAACdTdT | | | CGGCCdTdT | |
| D-2760 | S-3019 | AGGGCGACGGCCCA | 1352 | A-3019 | UGCACUGGGCCGUC | 1183 |
| | | GUGCCdTdT | | | GCCCUdTdT | |
| D-2761 | S-3020 | UGCAGGGCAUCAUC | 1353 | A-3020 | UAAUUGAUGAUGC | 1184 |
| | | AAUUCdTdT | | | CCUGCAdTdT | |
| D-2762 | S-3021 | GCAGGGCAUCAUCA | 1354 | A-3021 | UAAAUUGAUGAUG | 1185 |
| | | AUUUCdTdT | | | CCCUGCdTdT | |
| D-2763 | S-3022 | AGGGCAUCAUCAAU | 1355 | A-3022 | UCGAAAUUGAUGA | 1186 |
| | | UUCGCdTdT | | | UGCCCUdTdT | |
| D-2764 | S-3023 | GGGCAUCAUCAAUU | 1356 | A-3023 | UUCGAAAUUGAUG | 1187 |
| | | UCGACdTdT | | | AUGCCCdTdT | |
| D-2765 | S-3024 | GGCAUCAUCAAUUU | 1357 | A-3024 | UCUCGAAAUUGAU | 1188 |
| | | CGAGCdTdT | | | GAUGCCdTdT | |
| D-2766 | S-3025 | GCAUCAUCAAUUUC | 1358 | A-3025 | UGCUCGAAAUUGA | 1189 |
| | | GAGCCdTdT | | | UGAUGCdTdT | |
| D-2767 | S-3026 | CAUCAUCAAUUUCG | 1359 | A-3026 | UUGCUCGAAAUUG | 1190 |
| | | AGCACdTdT | | | AUGAUGdTdT | |
| D-2768 | S-3027 | AAUUUCGAGCAGAA | 1360 | A-3027 | UUUCCUUCUGCUC | 1191 |
| | | GGAACdTdT | | | GAAAUUdTdT | |
| D-2769 | S-3028 | UUCGAGCAGAAGGA | 1361 | A-3028 | UACUUUCCUUCUGC | 1192 |
| | | AAGUCdTdT | | | UCGAAdTdT | |
| D-2770 | S-3029 | UCGAGCAGAAGGAA | 1362 | A-3029 | UUACUUUCCUUCU | 1193 |
| | | AGUACdTdT | | | GCUCGAdTdT | |
| D-2771 | S-3030 | AAGGUGUGGGGAAG | 1363 | A-3030 | UAAUGCUUCCCCAC | 1194 |
| | | CAUUCdTdT | | | ACCUUdTdT | |
| D-2772 | S-3031 | GGUGUGGGGAAGCA | 1364 | A-3031 | UUUAAUGCUUCCCC | 1195 |
| | | UUAACdTdT | | | ACACCdTdT | |
| D-2773 | S-3032 | GACUGACUGAAGGC | 1365 | A-3032 | UGCAGGCCUUCAG | 1196 |
| | | CUGCCdTdT | | | UCAGUCdTdT | |
| D-2774 | S-3033 | CUGACUGAAGGCCU | 1366 | A-3033 | UAUGCAGGCCUUCA | 1197 |
| | | GCAUCdTdt | | | GUCAGdTdT | |
| D-2775 | S-3034 | UGACUGAAGGCCUG | 1367 | A-3034 | UCAUGCAGGCCUUC | 1198 |
| | | CAUGCdTdt | | | AGUCAdTdT | |
| D-2776 | S-3035 | UGAAGGCCUGCAUG | 1368 | A-3035 | UAAUCCAUGCAGGC | 1199 |
| | | GAUUCdTdT | | | CUUCAdTdT | |
| D-2777 | S-3036 | GAAGGCCUGCAUGG | 1369 | A-3036 | UGAAUCCAUGCAGG | 1200 |
| | | AUUCCdTdT | | | CCUUCdTdT | |
| D-2778 | S-3037 | UGCAUGGAUUCCAU | 1370 | A-3037 | UGAACAUGGAAUCC | 1201 |
| | | GUUCCdTdT | | | AUGCAdTdT | |
| D-2779 | S-3038 | CAUGGAUUCCAUGU | 1371 | A-3038 | UAUGAACAUGGAA | 1202 |
| | | UCAUCdTdT | | | UCCAUGdTdT | |
| D-2780 | S-3039 | GGAUUCCAUGUUCA | 1372 | A-3039 | UCUCAUGAACAUG | 1203 |
| | | UGAGCdTdT | | | GAAUCCdTdT | |
| D-2781 | S-3040 | UUCCAUGUUCAUGA | 1373 | A-3040 | UAAACUCAUGAACA | 1204 |
| | | GUUUCdTdT | | | UGGAAdTdT | |
| D-2782 | S-3041 | GUUCAUGAGUUUGG | 1374 | A-3041 | UAUCUCCAAACUCA | 1205 |
| | | AGAUCdTdT | | | UGAACdTdT | |
| D-2783 | S-3042 | UUCAUGAGUUUGGA | 1375 | A-3042 | UUAUCUCCAAACUC | 1206 |
| | | GAUACdTdT | | | AUGAAdTdT | |
| D-2784 | S-3043 | UGAGUUUGGAGAUA | 1376 | A-3043 | UGUAUUAUCUCCA | 1207 |
| | | AUACCdTdT | | | AACUCAdTdT | |
| D-2785 | S-3044 | GAGUUUGGAGAUAA | 1377 | A-3044 | UUGUAUUAUCUCC | 1208 |
| | | UACACdTdT | | | AAACUCdTdT | |
| D-2786 | S-3045 | AGGCUGUACCAGUG | 1378 | A-3045 | UCCUGCACUGGUAC | 1209 |
| | | CAGGCdTdT | | | AGCCUdTdT | |
| D-2787 | S-3046 | GGCUGUACCAGUGC | 1379 | A-3046 | UACCUGCACUGGUA | 1210 |
| | | AGGUCdTdT | | | CAGCCdTdT | |
| D-2788 | S-3047 | GCAGGUCCUCACUU | 1380 | A-3047 | UAUUAAAGUGAGG | 1211 |
| | | UAAUCdTdT | | | ACCUGCdTdT | |
| D-2789 | S-3048 | CAGGUCCUCACUUU | 1381 | A-3048 | UGAUUAAAGUGAG | 1212 |
| | | AAUCCdTdT | | | GACCUGdTdT | |
| D-2790 | S-3049 | UCACUUUAAUCCUC | 1382 | A-3049 | UGAUAGAGGAUUA | 1213 |
| | | UAUCCdTdT | | | AAGUGAdTdT | |
| D-2791 | S-3050 | CUAUCCAGAAAACAC | 1383 | A-3050 | UACCGUGUUUUCU | 1214 |
| | | GGUCdTdT | | | GGAUAGdTdT | |
| D-2792 | S-3051 | UAUCCAGAAAACACG | 1384 | A-3051 | UCACCGUGUUUUC | 1215 |
| | | GUGCdTdT | | | UGGAUAdTdT | |
| D-2793 | S-3052 | AUCCAGAAAACACGG | 1385 | A-3052 | UCCACCGUGUUUUC | 1216 |
| | | UGGCdTdT | | | UGGAUdTdT | |
| D-2794 | S-3053 | CCAGAAAACACGGUG | 1386 | A-3053 | UGCCCACCGUGUUU | 1217 |
| | | GGCCdTdT | | | UCUGGdTdT | |
| D-2795 | S-3054 | GAAAACACGGUGGG | 1387 | A-3054 | UUUGGCCCACCGUG | 1218 |
| | | CCAACdTdT | | | UUUUCdTdT | |
| D-2796 | S-3055 | AAAACACGGUGGGC | 1388 | A-3055 | UUUUGGCCCACCGU | 1219 |
| | | CAAACdTdT | | | GUUUUdTdT | |
| D-2797 | S-3056 | CGGUGGGCCAAAGG | 1389 | A-3056 | UUCAUCCUUUGGCC | 1220 |
| | | AUGACdTdT | | | CACCGdTdT | |
| D-2798 | S-3057 | AGGAUGAAGAGAGG | 1390 | A-3057 | UCAUGCCUCUCUUC | 1221 |
| | | CAUGCdTdT | | | AUCCUdTdT | |
| D-2799 | S-3058 | AUGAAGAGAGGCAU | 1391 | A-3058 | UCAACAUGCCUCUC | 1222 |
| | | GUUGCdTdT | | | UUCAUdTdT | |
| D-2800 | S-3059 | GAGAGGCAUGUUGG | 1392 | A-3059 | UGUCUCCAACAUGC | 1223 |
| | | AGACCdTdT | | | CUCUCdTdT | |
| D-2801 | S-3060 | AGAGGCAUGUUGGA | 1393 | A-3060 | UAGUCUCCAACAUG | 1224 |
| | | GACUCdTdT | | | CCUCUdTdT | |
| D-2802 | S-3061 | AUGUUGGAGACUUG | 1394 | A-3061 | UUGCCCAAGUCUCC | 1225 |
| | | GGCACdTdT | | | AACAUdTdT | |
| D-2803 | S-3062 | GUUGGAGACUUGGG | 1395 | A-3062 | UAUUGCCCAAGUCU | 1226 |
| | | CAAUCdTdT | | | CCAACdTdT | |
| D-2804 | S-3063 | GGAGACUUGGGCAA | 1396 | A-3063 | UCACAUUGCCCAAG | 1227 |
| | | UGUGCdTdT | | | UCUCCdTdT | |
| D-2805 | S-3064 | GGCAAUGUGACUGC | 1397 | A-3064 | UGUCAGCAGUCACA | 1228 |
| | | UGACCdTdT | | | UUGCCdTdT | |
| D-2806 | S-3065 | CAAUGUGACUGCUG | 1398 | A-3065 | UUUGUCAGCAGUC | 1229 |
| | | ACAACdTdT | | | ACAUUGdTdT | |
| D-2807 | S-3066 | CUGACAAAGAUGGU | 1399 | A-3066 | UCCACACCAUCUUU | 1230 |
| | | GUGGCdTdT | | | GUCAGdTdT | |
| D-2808 | S-3067 | UGACAAAGAUGGUG | 1400 | A-3067 | UGCCACACCAUCUU | 1231 |
| | | UGGCCdTdT | | | UGUCAdTdT | |
| D-2809 | S-3068 | CUCAGGAGACCAUU | 1401 | A-3068 | UAUGCAAUGGUCU | 1232 |
| | | GCAUCdTdT | | | CCUGAGdTdT | |
| D-2810 | S-3069 | UCAGGAGACCAUUG | 1402 | A-3069 | UGAUGCAAUGGUC | 1233 |
| | | CAUCCdTdT | | | UCCUGAdTdT | |
| D-2811 | S-3070 | AGACCAUUGCAUCA | 1403 | A-3070 | UCCAAUGAUGCAAU | 1234 |
| | | UUGGCdTdT | | | GGUCUdTdT | |
| D-2812 | S-3071 | GACCAUUGCAUCAU | 1404 | A-3071 | UGCCAAUGAUGCAA | 1235 |
| | | UGGCCdTdT | | | UGGUCdTdT | |
| D-2813 | S-3072 | AUUGCAUCAUUGGC | 1405 | A-3072 | UUGCGGCCAAUGA | 1236 |
| | | CGCACdTdT | | | UGCAAUdTdT | |
| D-2814 | S-3073 | CAUUGGCCGCACACU | 1406 | A-3073 | UACCAGUGUGCGGC | 1237 |
| | | GGUCdTdT | | | CAAUGdTdT | |
| D-2815 | S-3074 | CGCACACUGGUGGU | 1407 | A-3074 | UAUGGACCACCAGU | 1238 |
| | | CCAUCdTdT | | | GUGCGdTdT | |
| D-2816 | S-3075 | CACACUGGUGGUCC | 1408 | A-3075 | UUCAUGGACCACCA | 1239 |
| | | AUGACdTdT | | | GUGUGdTdT | |
| D-2817 | S-3076 | ACACUGGUGGUCCA | 1409 | A-3076 | UUUCAUGGACCACC | 1240 |
| | | UGAACdTdT | | | AGUGUdTdT | |
| D-2818 | S-3077 | UGGUGGUCCAUGAA | 1410 | A-3077 | UCUUUUUCAUGGA | 1241 |
| | | AAAGCdTdT | | | CCACCAdTdT | |
| D-2819 | S-3078 | UGGUCCAUGAAAAA | 1411 | A-3078 | UCUGCUUUUUCAU | 1242 |
| | | GCAGCdTdT | | | GGACCAdTdT | |
| D-2820 | S-3079 | AAAGCAGAUGACUU | 1412 | A-3079 | UGCCCAAGUCAUCU | 1243 |
| | | GGGCCdTdT | | | GCUUUdTdT | |
| D-2821 | S-3080 | GCAGAUGACUUGGG | 1413 | A-3080 | UUUUGCCCAAGUCA | 1244 |
| | | CAAACdTdT | | | UCUGCdTdT | |
| D-2822 | S-3081 | AUGACUUGGGCAAA | 1414 | A-3081 | UCACCUUUGCCCAA | 1245 |
| | | GGUGCdTdT | | | GUCAUdTdT | |
| D-2823 | S-3082 | UGACUUGGGCAAAG | 1415 | A-3082 | UCCACCUUUGCCCA | 1246 |
| | | GUGGCdTdT | | | AGUCAdTdT | |
| D-2824 | S-3083 | GACUUGGGCAAAGG | 1416 | A-3083 | UUCCACCUUUGCCC | 1247 |
| | | UGGACdTdT | | | AAGUCdTdT | |
| D-2825 | S-3084 | GUACAAAGACAGGA | 1417 | A-3084 | UCGUUUCCUGUCU | 1248 |
| | | AACGCdTdT | | | UUGUACdTdT | |
| D-2826 | S-3085 | ACAAAGACAGGAAAC | 1418 | A-3085 | UAGCGUUUCCUGU | 1249 |
| | | GCUCdTdT | | | CUUUGUdTdT | |
| D-2827 | S-3086 | CAAAGACAGGAAACG | 1419 | A-3086 | UCAGCGUUUCCUG | 1250 |
| | | CUGCdTdT | | | UCUUUGdTdT | |
| D-2828 | S-3087 | AGGAAACGCUGGAA | 1420 | A-3087 | UCGACUUCCAGCGU | 1251 |
| | | GUCGCdTdT | | | UUCCUdTdT | |
| D-2829 | S-3088 | GUCGUUUGGCUUGU | 1421 | A-3088 | UCACCACAAGCCAA | 1252 |
| | | GGUGCdTdT | | | ACGACdTdT | |
| D-2830 | S-3089 | UCGUUUGGCUUGUG | 1422 | A-3089 | UACACCACAAGCCA | 1253 |
| | | GUGUCdTdT | | | AACGAdTdT | |
| D-2831 | S-3090 | CGUUUGGCUUGUGG | 1423 | A-3090 | UUACACCACAAGCC | 1254 |
| | | UGUACdTdT | | | AAACGdTdT | |
| D-2832 | S-3091 | GUUUGGCUUGUGG | 1424 | A-3091 | UUUACACCACAAGC | 1255 |
| | | UGUAACdTdT | | | CAAACdTdT | |
| D-2833 | S-3092 | UUGGCUUGUGGUG | 1425 | A-3092 | UAAUUACACCACAA | 1256 |
| | | UAAUUCdTdT | | | GCCAAdTdT | |
| D-2834 | S-3093 | GGCUUGUGGUGUAA | 1426 | A-3093 | UCCAAUUACACCAC | 1257 |
| | | UUGGCdTdT | | | AAGCCdTdT | |
| D-2835 | S-3094 | GCUUGUGGUGUAAU | 1427 | A-3094 | UCCCAAUUACACCA | 1258 |
| | | UGGGCdTdT | | | CAAGCdTdT | |
| D-2836 | S-3095 | CUUGUGGUGUAAUU | 1428 | A-3095 | UUCCCAAUUACACC | 1259 |
| | | GGGACdTdT | | | ACAAGdTadT | |
| D-2837 | S-3096 | UGUGGUGUAAUUGG | 1429 | A-3096 | UGAUCCCAAUUACA | 1260 |
| | | GAUCCdTdT | | | CCACAdTdT | |
| D-2838 | S-3097 | GUGGUGUAAUUGGG | 1430 | A-3097 | UCGAUCCCAAUUAC | 1261 |
| | | AUCGCdTdT | | | ACCACdTdT | |
| D-2839 | S-3098 | UGGUGUAAUUGGGA | 1431 | A-3098 | UGCGAUCCCAAUUA | 1262 |
| | | UCGCCdTdT | | | CACCAdTdT | |
| D-2840 | S-3099 | GUAAUUGGGAUCGC | 1432 | A-3099 | UUUGGGCGAUCCC | 1263 |
| | | CCAACdTdT | | | AAUUACdTdT | |
| D-2841 | S-3100 | UAAUUGGGAUCGCC | 1433 | A-3100 | UAUUGGGCGAUCC | 1264 |
| | | CAAUCdTdT | | | CAAUUAdTdT | |
| D-2842 | S-3101 | AAUUGGGAUCGCCC | 1434 | A-3101 | UUAUUGGGCGAUC | 1265 |
| | | AAUACdTdT | | | CCAAUUdTdT | |
| D-2843 | S-3102 | AUUGGGAUCGCCCA | 1435 | A-3102 | UUUAUUGGGCGAU | 1266 |
| | | AUAACdTdT | | | CCCAAUdTdT | |
| D-2844 | S-3103 | UUGGGAUCGCCCAA | 1436 | A-3103 | UUUUAUUGGGCGA | 1267 |
| | | UAAACdTdT | | | UCCCAAdTdT | |
| D-2845 | S-3104 | UGGGAUCGCCCAAU | 1437 | A-3104 | UGUUUAUUGGGCG | 1268 |
| | | AAACCdTdT | | | AUCCCAdTdT | |
| D-2846 | S-3105 | GGGAUCGCCCAAUA | 1438 | A-3105 | UUGUUUAUUGGGC | 1269 |
| | | AACACdTdT | | | GAUCCCdTdT | |
| D-2847 | S-3106 | AUCGCCCAAUAAACA | 1439 | A-3106 | UGAAUGUUUAUUG | 1270 |
| | | UUCCdTdT | | | GGCGAUdTdT | |
| D-2848 | S-3107 | CCAAUAAACAUUCCC | 1440 | A-3107 | UCAAGGGAAUGUU | 1271 |
| | | UUGCdTdT | | | UAUUGGdTdT | |
| D-2849 | S-3108 | CAAUAAACAUUCCCU | 1441 | A-3108 | UCCAAGGGAAUGU | 1272 |
| | | UGGCdTdT | | | UUAUUGdTdT | |
| D-2850 | S-3109 | AAUAAACAUUCCCU | 1442 | A-3109 | UUCCAAGGGAAUG | 1273 |
| | | UGGACdTdT | | | UUUAUUdTdT | |
| D-2851 | S-3110 | AUAAACAUUCCCUU | 1443 | A-3110 | UAUCCAAGGGAAU | 1274 |
| | | GGAUCdTdT | | | GUUUAUdTdT | |
| D-2852 | S-3111 | UAAACAUUCCCUUG | 1444 | A-3111 | UCAUCCAAGGGAAU | 1275 |
| | | GAUGCdTdT | | | GUUUAdTdT | |
| D-2853 | S-3112 | AAACAUUCCCUUGG | 1445 | A-3112 | UACAUCCAAGGGAA | 1276 |
| | | AUGUCdTdT | | | UGUUUdTdT | |
| D-2854 | S-3113 | AACAUUCCCUUGGA | 1446 | A-3113 | UUACAUCCAAGGGA | 1277 |
| | | UGUACdTdT | | | AUGUUdTdT | |
| D-2855 | S-3114 | AUUCCCUUGGAUGU | 1447 | A-3114 | UGACUACAUCCAAG | 1278 |
| | | AGUCCdTdT | | | GGAAUdTdT | |
| D-2856 | S-3115 | CUUGGAUGUAGUCU | 1448 | A-3115 | UCCUCAGACUACAU | 1279 |
| | | GAGGCdTdT | | | CCAAGdTdT | |
| D-2857 | S-3116 | CUGAGGCCCCUUAAC | 1449 | A-3116 | UUGAGUUAAGGGG | 1280 |
| | | UCACdTdT | | | CCUCAGdTdT | |
| D-2858 | S-3117 | GAGGCCCCUUAACUC | 1450 | A-3117 | UGAUGAGUUAAGG | 1281 |
| | | AUCCdTdT | | | GGCCUCdTdT | |
| D-2859 | S-3118 | AGGCCCCUUAACUCA | 1451 | A-3118 | UAGAUGAGUUAAG | 1282 |
| | | UCUCdTdT | | | GGGCCUdTdT | |
| D-2860 | S-3119 | CCCCUUAACUCAUCU | 1452 | A-3119 | UAACAGAUGAGUU | 1283 |
| | | GUUCdTdT | | | AAGGGGdTdT | |
| D-2861 | S-3120 | CCCUUAACUCAUCUG | 1453 | A-3120 | UUAACAGAUGAGU | 1284 |
| | | UUACdTdT | | | UAAGGGdTdT | |
| D-2862 | S-3121 | CCUUAACUCAUCUG | 1454 | A-3121 | UAUAACAGAUGAG | 1285 |
| | | UUAUCdTdT | | | UUAAGGdTdT | |
| D-2863 | S-3122 | CUUAACUCAUCUGU | 1455 | A-3122 | UGAUAACAGAUGA | 1286 |
| | | UAUCCdTdT | | | GUUAAGdTdT | |
| D-2864 | S-3123 | UUAACUCAUCUGUU | 1456 | A-3123 | UGGAUAACAGAUG | 1287 |
| | | AUCCCdTdT | | | AGUUAAdTdT | |
| D-2865 | S-3124 | UAACUCAUCUGUUA | 1457 | A-3124 | UAGGAUAACAGAU | 1288 |
| | | UCCUCdTdT | | | GAGUUAdTdT | |
| D-2866 | S-3125 | AACUCAUCUGUUAU | 1458 | A-3125 | UCAGGAUAACAGAU | 1289 |
| | | CCUGCdTdT | | | GAGUUdTdT | |
| D-2867 | S-3126 | GUUAUCCUGCUAGC | 1459 | A-3126 | UUACAGCUAGCAGG | 1290 |
| | | UGUACdTdT | | | AUAACdTdT | |
| D-2868 | S-3127 | CUGCUAGCUGUAGA | 1460 | A-3127 | UCAUUUCUACAGCU | 1291 |
| | | AAUGCdTdT | | | AGCAGdTdT | |
| D-2869 | S-3128 | UGCUAGCUGUAGAA | 1461 | A-3128 | UACAUUUCUACAGC | 1292 |
| | | AUGUCdTdT | | | UAGCAdTdT | |
| D-2870 | S-3129 | GCUGUAGAAAUGUA | 1462 | A-3129 | UAGGAUACAUUUC | 1293 |
| | | UCCUCdTdT | | | UACAGCdTdT | |
| D-2871 | S-3130 | CUGUAGAAAUGUAU | 1463 | A-3130 | UCAGGAUACAUUU | 1294 |
| | | CCUGCdTdT | | | CUACAGdTdT | |
| D-2872 | S-3131 | UGUAGAAAUGUAUC | 1464 | A-3131 | UUCAGGAUACAUU | 1295 |
| | | CUGACdTdT | | | UCUACAdTdT | |
| D-2873 | S-3132 | GUAGAAAUGUAUCC | 1465 | A-3132 | UAUCAGGAUACAU | 1296 |
| | | UGAUCdTdT | | | UUCUACdTdT | |
| D-2874 | S-3133 | AAAUGUAUCCUGAU | 1466 | A-3133 | UGUUUAUCAGGAU | 1297 |
| | | AAACCdTdT | | | ACAUUUdTdT | |
| D-2875 | S-3134 | GUAUCCUGAUAAAC | 1467 | A-3134 | UUAAUGUUUAUCA | 1298 |
| | | AUUACdTdT | | | GGAUACdTdT | |
| D-2876 | S-3135 | UUAAACACUGUAAU | 1468 | A-3135 | UUAAGAUUACAGU | 1299 |
| | | CUUACdTdT | | | GUUUAAdTdT | |
| D-2877 | S-3136 | ACUGUAAUCUUAAA | 1469 | A-3136 | UCACUUUUAAGAU | 1300 |
| | | AGUGCdTdT | | | UACAGUdTdT | |
| D-2878 | S-3137 | CUGUAAUCUUAAAA | 1470 | A-3137 | UACACUUUUAAGA | 1301 |
| | | GUGUCdTdT | | | UUACAGdTdT | |
| D-2879 | S-3138 | UGUAAUCUUAAAAG | 1471 | A-3138 | UUACACUUUUAAG | 1302 |
| | | UGUACdTdT | | | AUUACAdTdT | |
| D-2880 | S-3139 | GUAAUCUUAAAAGU | 1472 | A-3139 | UUUACACUUUUAA | 1303 |
| | | GUAACdTdT | | | GAUUACdTdT | |
| D-2881 | S-3140 | CUUAAAAGUGUAAU | 1473 | A-3140 | UCACAAUUACACUU | 1304 |
| | | UGUGCdTdT | | | UUAAGdTdT | |
| D-2882 | S-3141 | UACCUGUAGUGAGA | 1474 | A-3141 | UAGUUUCUCACUAC | 1305 |
| | | AACUCdTdT | | | AGGUAdTdT | |
| D-2883 | S-3142 | UUAUGAUCACUUGG | 1475 | A-3142 | UUCUUCCAAGUGA | 1306 |
| | | AAGACdTdT | | | UCAUAAdTdT | |
| D-2884 | S-3143 | AUGAUCACUUGGAA | 1476 | A-3143 | UAAUCUUCCAAGU | 1307 |
| | | GAUUCdTdT | | | GAUCAUdTdT | |
| D-2885 | S-3144 | AUCACUUGGAAGAU | 1477 | A-3144 | UACAAAUCUUCCAA | 1308 |
| | | UUGUCdTdT | | | GUGAUdTdT | |
| D-2886 | S-3145 | UGGAAGAUUUGUAU | 1478 | A-3145 | UAACUAUACAAAUC | 1309 |
| | | AGUUCdTdT | | | UUCCAdTdT | |
| D-2887 | S-3146 | UAUAAAACUCAGUU | 1479 | A-3146 | UUUUUAACUGAGU | 1310 |
| | | AAAACdTdT | | | UUUAUAdTdT | |
| D-2888 | S-3147 | AAACUCAGUUAAAA | 1480 | A-3147 | UGACAUUUUAACU | 1311 |
| | | UGUCCdTdT | | | GAGUUUdTdT | |
| D-2889 | S-3148 | GUCUGUUUCAAUGA | 1481 | A-3148 | UCAGGUCAUUGAA | 1312 |
| | | CCUGCdTdT | | | ACAGACdTdT | |
| D-2890 | S-3149 | AUGACCUGUAUUUU | 1482 | A-3149 | UUGGCAAAAUACAG | 1313 |
| | | GCCACdTdT | | | GUCAUdTdT | |
| D-2891 | S-3150 | ACCUGUAUUUUGCC | 1483 | A-3150 | UGUCUGGCAAAAU | 1314 |
| | | AGACCdTdT | | | ACAGGUdTdT | |
| D-2892 | S-3151 | CCUGUAUUUUGCCA | 1484 | A-3151 | UAGUCUGGCAAAA | 1315 |
| | | GACUCdTdT | | | UACAGGdTdT | |
| D-2893 | S-3152 | UAAAUCACAGAUGG | 1485 | A-3152 | UAUACCCAUCUGUG | 1316 |
| | | GUAUCdTdT | | | AUUUAdTdT | |
| D-2894 | S-3153 | AUCACAGAUGGGUA | 1486 | A-3153 | UUUAAUACCCAUCU | 1317 |
| | | UUAACdTdT | | | GUGAUdTdT | |
| D-2895 | S-3154 | UCACAGAUGGGUAU | 1487 | A-3154 | UUUUAAUACCCAUC | 1318 |
| | | UAAACdTdT | | | UGUGAdTdT | |
| D-2896 | S-3155 | ACAGAUGGGUAUUA | 1488 | A-3155 | UAGUUUAAUACCCA | 1319 |
| | | AACUCdTdT | | | UCUGUdTdT | |
| D-2897 | S-3156 | CAGAUGGGUAUUAA | 1489 | A-3156 | UAAGUUUAAUACCC | 1320 |
| | | ACUUCdTdT | | | AUCUGdTdT | |
| D-2898 | S-3157 | AGAUGGGUAUUAAA | 1490 | A-3157 | UCAAGUUUAAUACC | 1321 |
| | | CUUGCdTdT | | | CAUCUdTdT | |
| D-2899 | S-3158 | AUGGGUAUUAAACU | 1491 | A-3158 | UGACAAGUUUAAU | 1322 |
| | | UGUCCdTdT | | | ACCCAUdTdT | |
| D-2900 | S-3159 | UAAACUUGUCAGAA | 1492 | A-3159 | UGAAAUUCUGACAA | 1323 |
| | | UUUCCdTdT | | | GUUUAdTdT | |
| D-2901 | S-3160 | UCAUUCAAGCCUGU | 1493 | A-3160 | UAUUCACAGGCUU | 1324 |
| | | GAAUCdTdT | | | GAAUGAdTdT | |
| D-2902 | S-3161 | CAUUCAAGCCUGUG | 1494 | A-3161 | UUAUUCACAGGCU | 1325 |
| | | AAUACdTdT | | | UGAAUGdTdT | |
| D-2903 | S-3162 | AAUAAAAACCCUGUA | 1495 | A-3162 | UCCAUACAGGGUU | 1326 |
| | | UGGCdTdT | | | UUUAUUdTdT | |
| D-2904 | S-3163 | AUAAAAACCCUGUA | 1496 | A-3163 | UGCCAUACAGGGU | 1327 |
| | | UGGCCdTdT | | | UUUUAUdTdT | |
| D-2905 | S-3164 | AACCCUGUAUGGCA | 1497 | A-3164 | UUAAGUGCCAUACA | 1328 |
| | | CUUACdTdT | | | GGGUUdTdT | |
| D-2906 | S-3165 | ACCCUGUAUGGCAC | 1498 | A-3165 | UAUAAGUGCCAUAC | 1329 |
| | | UUAUCdTdT | | | AGGGUdTdT | |
| D-2907 | S-3166 | GAGGCUAUUAAAAG | 1499 | A-3166 | UGAUUCUUUUAAU | 1330 |
| | | AAUCCdTdT | | | AGCCUCdTdT | |
| D-2908 | S-3167 | AAAGAAUCCAAAUUC | 1500 | A-3167 | UUUUGAAUUUGGA | 1331 |
| | | AAACdTdT | | | UUCUUUdTdT | |
| D-2909 | S-3168 | GAAUCCAAAUUCAAA | 1501 | A-3168 | UUAGUUUGAAUUU | 1332 |
| | | CUACdTdT | | | GGAUUCdTdT | |

[0540] In other embodiments, the siRNA molecules of the present invention targeting SOD1 can be encoded in plasmid vectors, AAV particles, viral genome or other nucleic acid expression vectors for delivery to a cell.

[0541] DNA expression plasmids can be used to stably express the siRNA duplexes or dsRNA of the present invention targeting SOD1 in cells and achieve long-term inhibition of the target gene expression. In one aspect, the sense and antisense strands of a siRNA duplex are typically linked by a short spacer sequence leading to the expression of a stem-loop structure termed short hairpin RNA (shRNA). The hairpin is recognized and cleaved by Dicer, thus generating mature siRNA molecules.

[0542] According to the present invention, AAV particles comprising the nucleic acids encoding the siRNA molecules targeting SOD1 mRNA are produced, the AAV serotypes may be any of the serotypes listed in Table 1. Non-limiting examples of the AAV serotypes include, AAV1, AAV2, AAV3, AAV4, AAV5, AAV6, AAV7, AAV8, AAV9, AAV9.47, AAV9(hu14), AAV10, AAV1I, AAV12, AAVrh8, AAVrh10, AAV-DJ8, AAV-DJ, AAV-PHP.A, AAV-PHP.B, AAVPHP.B2, AAVPHP.B3, AAVPHP.N/PHP.B-DGT, AAVPHP.B-EST, AAVPHP.B-GGT, AAVPHP.B-ATP, AAVPHP.B-ATT-T, AAVPHP.B-DGT-T, AAVPHP.B-GGT-T, AAVPHP.B-SGS, AAVPHP.B-AQP, AAVPHP.B-QQP, AAVPHP.B-SNP(3), AAVPHP.B-SNP, AAVPHP.B-QGT, AAVPHP.B-NQT, AAVPHP.B-EGS, AAVPHP.B-SGN, AAVPHP.B-EGT, AAVPHP.B-DST, AAVPHP.B-DST, AAVPHP.B-STP, AAVPHP.B-PQP, AAVPHP.B-SQP, AAVPHP.B-QLP, AAVPHP.B-TMP, AAVPHP.B-TTP, AAVPHP.S/G2A12, AAVG2A15/G2A3, AAVG2B4, AAVG2B5 and variants thereof.

[0543] In some embodiments, the siRNA duplexes or encoded dsRNA of the present invention suppress (or degrade) SOD1 mRNA. Accordingly, the siRNA duplexes or encoded dsRNA can be used to substantially inhibit SOD1 gene expression in a cell. In some aspects, the inhibition of SOD1 gene expression refers to an inhibition by at least about 20%, preferably by at least about 30%, 40%, 50%, 60%, 70%, 80%, 85%, 90%, 95% and 100%, or at least 20-30%, 20-40%, 20-50%, 20-60%, 20-70%, 20-80%, 20-90%, 20-95%, 20-100%, 30-40%, 30-50%, 30-60%, 30-70%, 30-80%, 30-90%, 30-95%, 30-100%, 40-50%, 40-60%, 40-70%, 40-80%, 40-90%, 40-95%, 40-100%, 50-60%, 50-70%, 50-80%, 50-90%, 50-95%, 50-100%, 60-70%, 60-80%, 60-90%, 60-95%, 60-100%, 70-80%, 70-90%, 70-95%, 70-100%, 80-90%, 80-95%, 80-100%, 90-95%, 90-100% or 95-100%. Accordingly, the protein product of the targeted gene may be inhibited by at least about 20%, preferably by at least about 30%, 40%, 50%, 60%, 70%, 80%, 85%, 90%, 95% and 100%, or at least 20-30%, 20-40%, 20-50%, 20-60%, 20-70%, 20-80%, 20-90%, 20-95%, 20-100%, 30-40%, 30-50%, 30-60%, 30-70%, 30-80%, 30-90%, 30-95%, 30-100%, 40-50%, 40-60%, 40-70%, 40-80%, 40-90%, 40-95%, 40-100%, 50-60%, 50-70%, 50-80%, 50-90%, 50-95%, 50-100%, 60-70%, 60-80%, 60-90%, 60-95%, 60-100%, 70-80%, 70-90%, 70-95%, 70-100%, 80-90%, 80-95%, 80-100%, 90-95%, 90-100% or 95-100%.

[0544] According to the present invention, the siRNA molecules are designed and tested for their ability in reducing SOD1 mRNA levels in cultured cells. Such siRNA molecules may form a duplex such as, but not limited to, include those listed in Table 9. As a non-limiting example, the siRNA duplexes may be siRNA duplex IDs: D-2741 to D-2909.

[0545] In one embodiment, the siRNA molecules comprise a miRNA seed match for SOD1 located in the guide strand. In another embodiment, the siRNA molecules comprise a miRNA seed match for SOD1 located in the passenger strand. In yet another embodiment, the siRNA duplexes or encoded dsRNA targeting SOD1 gene do not comprise a seed match for SOD1 located in the guide or passenger strand.

[0546] In one embodiment, the siRNA duplexes or encoded dsRNA targeting SOD1 gene may have almost no significant full-length off target effects for the guide strand. In another embodiment, the siRNA duplexes or encoded dsRNA targeting SOD1 gene may have almost no significant full-length off target effects for the passenger strand. The siRNA duplexes or encoded dsRNA targeting SOD1 gene may have less than 1%, 2%, 3%, 4%, 5%, 6%, 7%, 8%, 9%, 10%, 1%, 12%, 13%, 14%, 15%, 20%, 25%, 30%, 35%, 40%, 45%, 50%, 1-5%, 2-6%, 3-7%, 4-8%, 5-9%, 5-10%, 6-10%, 5-15%, 5-20%, 5-25% 5-30%, 10-20%, 10-30%, 10-40%, 10-50%, 15-30%, 15-40%, 15-45%, 20-40%, 20-50%, 25-50%, 30-40%, 30-50%, 35-50%, 40-50%, 45-50% full-length off target effects for the passenger strand. In yet another embodiment, the siRNA duplexes or encoded dsRNA targeting SOD1 gene may have almost no significant full-length off target effects for the guide strand or the passenger strand. The siRNA duplexes or encoded dsRNA targeting SOD1 gene may have less than 1%, 2%, 3%, 4%, 5%, 6%, 7%, 8%, 9%, 10%,11%, 12&% 13%, 14%, 15%, 20%, 25%, 30&% 35%, 40%, 45%, 50%, 1-5%, 2-6%, 3-7%, 4-8%, 5-9%, 5-10%, 6-10%, 5-15%, 5-20%, 5-25% 5-30%, 10-20%, 10-30%, 10-40%, 10-50%, 15-30%, 15-40%, 15-45%, 20-40%, 20-50%, 25-50%, 30-40%, 30-50%, 35-50%, 40-50%, 45-50% full-length off target effects for the guide or passenger strand.

[0547] In one embodiment, the siRNA duplexes or encoded dsRNA targeting SOD1 gene may have high activity in vitro. In another embodiment, the siRNA molecules may have low activity in vitro. In yet another embodiment, the siRNA duplexes or dsRNA targeting the SOD1 gene may have high guide strand activity and low passenger strand activity in vitro.

[0548] In one embodiment, the siRNA molecules targeting SOD1 have a high guide strand activity and low passenger strand activity in vitro. The target knock-down (KD) by the guide strand may be at least 40%, 50%, 60%, 65%, 70%, 75%, 80%, 85%, 90%, 95%, 99%, 99.5% or 100%. The target knock-down by the guide strand may be 40-50%, 45-50%, 50-55%, 50-60%, 60-65%, 60-70%, 60-75%, 60-80%, 60-85%, 60-90%, 60-95%, 60-99%, 60-99.5%, 60-100%, 65-70%, 65-75%, 65-80%, 65-85%, 65-90%, 65-95%, 65-99%, 65-99.5%, 65-100%, 70-75%, 70-80%, 70-85%, 70-90%, 70-95%, 70-99%, 70-99.5%, 70-100%, 75-80%, 75-85%, 75-90%, 75-95%, 75-99%, 75-99.5%, 75-100&% 80-85%, 80-90%, 80-95%, 80-99%, 80-99.5&% 80-100%, 85-90%, 85-95%, 85-99%, 85-99.5%, 85-100%, 90-95%, 90-99%, 90-99.5%, 90-100%, 95-99%, 95-99.5%, 95-100%, 99-99.5%, 99-100% or 99.5-100%. As a non-limiting example, the target knock-down (KD) by the guide strand is greater than 70%. As a non-limiting example, the target knock-down (KD) by the guide strand is greater than 60%.

[0549] In one embodiment, the siRNA duplex target SOD1 is designed so there is no miRNA seed match for the sense or antisense sequence to the non-SOD1 sequence.

[0550] In one embodiment, the IC₅₀ of the guide strand in the siRNA duplex targeting SOD1 for the nearest off target is greater than 100 multiplied by the IC₅₀ of the guide strand for the on-target gene, SOD1. As a non-limiting example, if the IC₅₀ of the guide strand for the nearest off target is greater than 100 multiplied by the IC₅₀ of the guide strand for the target then the siRNA molecule is said to have high guide strand selectivity for inhibiting SOD1 in vitro.

[0551] In one embodiment, the 5′ processing of the guide strand of the siRNA duplex targeting SOD1 has a correct start (n) at the 5′ end at least 75%, 80%, 85%, 90%, 95%, 99% or 100% of the time in vitro or in vivo. As a non-limiting example, the 5′ processing of the guide strand is precise and has a correct start (n) at the 5′ end at least 99% of the time in vitro. As a non-limiting example, the 5′ processing of the guide strand is precise and has a correct start (n) at the 5′ end at least 99% of the time in vivo. As a non-limiting example, the 5′ processing of the guide strand is precise and has a correct start (n) at the 5′ end at least 90% of the time in vitro. As a non-limiting example, the 5′ processing of the guide strand is precise and has a correct start (n) at the 5′ end at least 90% of the time in vivo. As a non-limiting example, the 5′ processing of the guide strand is precise and has a correct start (n) at the 5′ end at least 85% of the time in vitro. As a non-limiting example, the 5′ processing of the guide strand is precise and has a correct start (n) at the 5′ end at least 85% of the time in vivo.

[0552] In one embodiment, a passenger-guide strand duplex for SOD1 is considered effective when the pri- or pre-microRNAs demonstrate, by methods known in the art and described herein, greater than 2-fold guide to passenger strand ratio when processing is measured. As a non-limiting examples, the pri- or pre-microRNAs demonstrate great than 2-fold, 3-fold, 4-fold, 5-fold, 6-fold, 7-fold, 8-fold, 9-fold, 10-fold, 11l-fold, 12-fold, 13-fold, 14-fold, 15-fold, or 2 to 5-fold, 2 to 10-fold, 2 to 15-fold, 3 to 5-fold, 3 to 10-fold, 3 to 15-fold, 4 to 5-fold, 4 to 10-fold, 4 to 15-fold, 5 to 10-fold, 5 to 15-fold, 6 to 10-fold, 6 to 15-fold, 7 to 10-fold, 7 to 15-fold, 8 to 10-fold 8 to 15-fold, 9 to 10-fold, 9 to 15-fold, 10 to 15-fold, 11 to 15-fold, 12 to 15-fold, 13 to 15-fold, or 14 to 15-fold guide to passenger strand ratio when processing is measured.

[0553] In one embodiment, the siRNA molecules may be used to silence wild type or mutant SOD1 by targeting at least one exon on the SOD1 sequence. The exon may be exon 1, exon 2, exon 3, exon 4, exon 5, exon 6, exon 7, exon 8, exon 9, exon 10, exon 11, exon 12, exon 13, exon 14, exon 15, exon 16, exon 17, exon 18, exon 19, exon 20, exon 21, exon 22, exon 23, exon 24, exon 25, exon 26, exon 27, exon 28, exon 29, exon 30, exon 31, exon 32, exon 33, exon 34, exon 35, exon 36, exon 37, exon 38, exon 39, exon 40, exon 41, exon 42, exon 43, exon 44, exon 45, exon 46, exon 47, exon 48, exon 49, exon 50, exon 51, exon 52, exon 53, exon 54, exon 55, exon 56, exon 57, exon 58, exon 59, exon 60, exon 61, exon 62, exon 63, exon 64, exon 65, exon 66, and/or exon 67.

siRNA Modification

[0554] In some embodiments, the siRNA molecules of the present invention, when not delivered as a precursor or DNA, may be chemically modified to modulate some features of RNA molecules, such as, but not limited to, increasing the stability of siRNAs in vivo. The chemically modified siRNA molecules can be used in human therapeutic applications, and are improved without compromising the RNAi activity of the siRNA molecules. As a non-limiting example, the siRNA molecules modified at both the 3′ and the 5′ end of both the sense strand and the antisense strand.

[0555] In some aspects, the siRNA duplexes of the present invention may contain one or more modified nucleotides such as, but not limited to, sugar modified nucleotides, nucleobase modifications and/or backbone modifications. In some aspects, the siRNA molecule may contain combined modifications, for example, combined nucleobase and backbone modifications.

[0556] In one embodiment, the modified nucleotide may be a sugar-modified nucleotide. Sugar modified nucleotides include, but are not limited to 2′-fluoro, 2′-amino and 2′-thio modified ribonucleotides, e.g. 2′-fluoro modified ribonucleotides. Modified nucleotides may be modified on the sugar moiety, as well as nucleotides having sugars or analogs thereof that are not ribosyl. For example, the sugar moieties may be, or be based on, mannoses, arabinoses, glucopyranoses, galactopyranoses, 4′-thioribose, and other sugars, heterocycles, or carbocycles.

[0557] In one embodiment, the modified nucleotide may be a nucleobase-modified nucleotide.

[0558] In one embodiment, the modified nucleotide may be a backbone-modified nucleotide. In some embodiments, the siRNA duplexes of the present invention may further comprise other modifications on the backbone. A normal “backbone”, as used herein, refers to the repeating alternating sugar-phosphate sequences in a DNA or RNA molecule. The deoxyribose/ribose sugars are joined at both the 3′-hydroxyl and 5′-hydroxyl groups to phosphate groups in ester links, also known as “phosphodiester” bonds/linker (PO linkage). The PO backbones may be modified as “phosphorothioate backbone (PS linkage). In some cases, the natural phosphodiester bonds may be replaced by amide bonds but the four atoms between two sugar units are kept. Such amide modifications can facilitate the solid phase synthesis of oligonucleotides and increase the thermodynamic stability of a duplex formed with siRNA complement. See e.g. Mesmaeker et al., Pure & Appl. Chem., 1997, 3, 437-440; the content of which is incorporated herein by reference in its entirety.

[0559] Modified bases refer to nucleotide bases such as, for example, adenine, guanine, cytosine, thymine, uracil, xanthine, inosine, and queuosine that have been modified by the replacement or addition of one or more atoms or groups. Some examples of modifications on the nucleobase moieties include, but are not limited to, alkylated, halogenated, thiolated, aminated, amidated, or acetylated bases, individually or in combination. More specific examples include, for example, 5-propynyluridine, 5-propynylcytidine, 6-methyladenine, 6-methylguanine, N,N,-dimethyladenine, 2-propyladenine, 2-propylguanine, 2-aminoadenine, 1-methylinosine, 3-methyluridine, 5-methylcytidine, 5-methyluridine and other nucleotides having a modification at the 5 position, 5-(2-amino)propyl uridine, 5-halocytidine, 5-halouridine, 4-acetylcytidine, 1-methyladenosine, 2-methyladenosine, 3-methylcytidine, 6-methyluridine, 2-methylguanosine, 7-methylguanosine, 2,2-dimethylguanosine, 5-methylaminoethyluridine, 5-methyloxyuridine, deazanucleotides such as 7-deaza-adenosine, 6-azouridine, 6-azocytidine, 6-azothymidine, 5-methyl-2-thiouridine, other thio bases such as 2-thiouridine and 4-thiouridine and 2-thiocytidine, dihydrouridine, pseudouridine, queuosine, archaeosine, naphthyl and substituted naphthyl groups, any 0- and N-alkylated purines and pyrimidines such as N6-methyladenosine, 5-methylcarbonylmethyluridine, uridine 5-oxyacetic acid, pyridine-4-one, pyridine-2-one, phenyl and modified phenyl groups such as aminophenol or 2,4,6-trimethoxy benzene, modified cytosines that act as G-clamp nucleotides, 8-substituted adenines and guanines, 5-substituted uracils and thymines, azapyrimidines, carboxyhydroxyalkyl nucleotides, carboxyalkylaminoalkyl nucleotides, and alkylcarbonylalkylated nucleotides.

[0560] In one embodiment, the modified nucleotides may be on just the sense strand.

[0561] In another embodiment, the modified nucleotides may be on just the antisense strand.

[0562] In some embodiments, the modified nucleotides may be in both the sense and antisense strands.

[0563] In some embodiments, the chemically modified nucleotide does not affect the ability of the antisense strand to pair with the target mRNA sequence.

[0564] In one embodiment, the AAV particle comprising a nucleic acid sequence encoding the siRNA molecules of the present invention may encode siRNA molecules which are polycistronic molecules. The siRNA molecules may additionally comprise one or more linkers between regions of the siRNA molecules.

### Molecular Scaffold

[0565] In one embodiment, the siRNA molecules may be encoded in a modulatory polynucleotide which also comprises a molecular scaffold. As used herein a “molecular scaffold” is a framework or starting molecule that forms the sequence or structural basis against which to design or make a subsequent molecule.

[0566] In one embodiment, the molecular scaffold comprises at least one 5′ flanking region. As a non-limiting example, the 5′ flanking region may comprise a 5′ flanking sequence which may be of any length and may be derived in whole or in part from wild type microRNA sequence or be a completely artificial sequence.

[0567] In one embodiment, the molecular scaffold comprises at least one 3′ flanking region. As a non-limiting example, the 3′ flanking region may comprise a 3′ flanking sequence which may be of any length and may be derived in whole or in part from wild type microRNA sequence or be a completely artificial sequence.

[0568] In one embodiment, the molecular scaffold comprises at least one loop motif region. As a non-limiting example, the loop motif region may comprise a sequence which may be of any length.

[0569] In one embodiment, the molecular scaffold comprises a 5′ flanking region, a loop motif region and/or a 3′ flanking region.

[0570] In one embodiment, at least one siRNA, miRNA or other RNAi agent described herein, may be encoded by a modulatory polynucleotide which may also comprise at least one molecular scaffold. The molecular scaffold may comprise a 5′ flanking sequence which may be of any length and may be derived in whole or in part from wild type microRNA sequence or be completely artificial. The 3′ flanking sequence may mirror the 5′ flanking sequence and/or a 3′ flanking sequence in size and origin. Either flanking sequence may be absent. The 3′ flanking sequence may optionally contain one or more CNNC motifs, where “N” represents any nucleotide.

[0571] Forming the stem of a stem loop structure is a minimum of the modulatory polynucleotide encoding at least one siRNA, miRNA or other RNAi agent described herein. In some embodiments, the siRNA, miRNA or other RNAi agent described herein comprises at least one nucleic acid sequence which is in part complementary or will hybridize to a target sequence. In some embodiments the payload is an siRNA molecule or fragment of an siRNA molecule.

[0572] In some embodiments, the 5′ arm of the stem loop structure of the modulatory polynucleotide comprises a nucleic acid sequence encoding a sense sequence. Non-limiting examples of sense sequences, or fragments or variants thereof, which may be encoded by the modulatory polynucleotide are described in Table 3 and Table 8.

[0573] In some embodiments, the 3′ arm of the stem loop of the modulatory polynucleotide comprises a nucleic acid sequence encoding an antisense sequence. The antisense sequence, in some instances, comprises a “G” nucleotide at the 5′ most end. Non-limiting examples of antisense sequences, or fragments or variants thereof, which may be encoded by the modulatory polynucleotide are described in Table 2 and Table 7.

[0574] In other embodiments, the sense sequence may reside on the 3′ arm while the antisense sequence resides on the 5′ arm of the stem of the stem loop structure of the modulatory polynucleotide. Non-limiting examples of sense and antisense sequences which may be encoded by the modulatory polynucleotide are described in Tables 2, 3, 7, and 8.

[0575] In one embodiment, the sense and antisense sequences may be completely complementary across a substantial portion of their length. In other embodiments the sense sequence and antisense sequence may be at least 70, 80, 90, 95 or 99% complementarity across independently at least 50, 60, 70, 80, 85, 90, 95, or 99% of the length of the strands.

[0576] Neither the identity of the sense sequence nor the homology of the antisense sequence need to be 100% complementarity to the target sequence.

[0577] In one embodiment, separating the sense and antisense sequence of the stem loop structure of the modulatory polynucleotide is a loop sequence (also known as a loop motif, linker or linker motif). The loop sequence may be of any length, between 4-30 nucleotides, between 4-20 nucleotides, between 4-15 nucleotides, between 5-15 nucleotides, between 6-12 nucleotides, 6 nucleotides, 7 nucleotides, 8 nucleotides, 9 nucleotides, 10 nucleotides, 11 nucleotides, 12 nucleotides, 13 nucleotides, 14 nucleotides, and/or 15 nucleotides.

[0578] In some embodiments, the loop sequence comprises a nucleic acid sequence encoding at least one UGUG motif. In some embodiments, the nucleic acid sequence encoding the UGUG motif is located at the 5′ terminus of the loop sequence.

[0579] In one embodiment, spacer regions may be present in the modulatory polynucleotide to separate one or more modules (e.g., 5′ flanking region, loop motif region, 3′ flanking region, sense sequence, antisense sequence) from one another. There may be one or more such spacer regions present.

[0580] In one embodiment, a spacer region of between 8-20, i.e., 8, 9, 10, 11, 12, 13, 14, 15, 16, 17, 18, 19, or 20 nucleotides may be present between the sense sequence and a flanking region sequence.

[0581] In one embodiment, the length of the spacer region is 13 nucleotides and is located between the 5′ terminus of the sense sequence and the 3′ terminus of the flanking sequence. In one embodiment, a spacer is of sufficient length to form approximately one helical turn of the sequence.

[0582] In one embodiment, a spacer region of between 8-20, i.e., 8, 9, 10, 11, 12, 13, 14, 15, 16, 17, 18, 19, or 20 nucleotides may be present between the antisense sequence and a flanking sequence.

[0583] In one embodiment, the spacer sequence is between 10-13, i.e., 10, 11, 12 or 13 nucleotides and is located between the 3′ terminus of the antisense sequence and the 5′ terminus of a flanking sequence. In one embodiment, a spacer is of sufficient length to form approximately one helical turn of the sequence.

[0584] In one embodiment, the molecular scaffold of the modulatory polynucleotide comprises in the 5′ to 3′ direction, a 5′ flanking sequence, a 5′ arm, a loop motif, a 3′ arm and a 3′ flanking sequence. As a non-limiting example, the 5′ arm may comprise a nucleic acid sequence encoding a sense sequence and the 3′ arm comprises a nucleic acid sequence encoding the antisense sequence. In another non-limiting example, the 5′ arm comprises a nucleic acid sequence encoding the antisense sequence and the 3′ arm comprises a nucleic acid sequence encoding the sense sequence.

[0585] In one embodiment, the 5′ arm, sense and/or antisense sequence, loop motif and/or 3′ arm sequence may be altered (e.g., substituting 1 or more nucleotides, adding nucleotides and/or deleting nucleotides). The alteration may cause a beneficial change in the function of the construct (e.g., increase knock-down of the target sequence, reduce degradation of the construct, reduce off target effect, increase efficiency of the payload, and reduce degradation of the payload).

[0586] In one embodiment, the molecular scaffold of the modulatory polynucleotides is aligned in order to have the rate of excision of the guide strand (also referred to herein as the antisense strand) be greater than the rate of excision of the passenger strand (also referred to herein as the sense strand). The rate of excision of the guide or passenger strand may be, independently, 1%, 2%, 3%, 4%, 5%, 10%, 15%, 20%, 25%, 30%, 35%, 40%, 45%, 50%, 55%, 60%, 65%, 70%, 75%, 80%, 85%, 90%, 95%, 99% or more than 99%. As a non-limiting example, the rate of excision of the guide strand is at least 80%. As another non-limiting example, the rate of excision of the guide strand is at least 90%.

[0587] In one embodiment, the rate of excision of the guide strand is greater than the rate of excision of the passenger strand. In one aspect, the rate of excision of the guide strand may be at least 1%, 2%, 3%, 4%, 5%, 10%, 15%, 20%, 25%, 30%, 35%, 40%, 45%, 50%, 55%, 60%, 65%, 70%, 75%, 80%, 85%, 90%, 95%, 99% or more than 99% greater than the passenger strand.

[0588] In one embodiment, the efficiency of excision of the guide strand is at least 60%, 65%, 70%, 75%, 80%, 85%, 90%, 95%, 99% or more than 99%. As a non-limiting example, the efficiency of the excision of the guide strand is greater than 80%.

[0589] In one embodiment, the efficiency of the excision of the guide strand is greater than the excision of the passenger strand from the molecular scaffold. The excision of the guide strand may be 2, 3, 4, 5, 6, 7, 8, 9, 10 or more than 10 times more efficient than the excision of the passenger strand from the molecular scaffold.

[0590] In one embodiment, the molecular scaffold comprises a dual-function targeting modulators' polynucleotide. As used herein, a “dual-function targeting” modulatory polynucleotide is a polynucleotide where both the guide and passenger strands knock down the same target or the guide and passenger strands knock down different targets.

[0591] In one embodiment, the molecular scaffold of the modulatory polynucleotides described herein may comprise a 5′ flanking region, a loop motif region and a 3′ flanking region. Non-limiting examples of the sequences for the 5′ flanking region, loop motif region (may also be referred to as a linker region) and the 3′ flanking region which may be used, or fragments thereof used, in the modulatory polynucleotides described herein are shown in Tables 10-12.

TABLE 10
5′ Flanking Regions for Molecular Scaffold

| 5′ | | |
|---|---|---|
| Flanking | | 5′ Flanking |
| Region | | Region SEQ |
| Name | 5′ Flanking Region Sequence | ID |
| 5E3 | GTGCTGGGCGGGGGGCGGCGGGCCCT | 1503 |
| | CCCGCAGAACACCATGCGCTCCACGG | |
| | AA | |
| 5F1 | GTGCTGGGCGGGGGGCGGCGGGCCCT | 1504 |
| | CCCGCAGAACACCATGCGCTCTTCGG | |
| | AA | |
| 5F2 | GAAGCAAAGAAGGGGCAGAGGGAGC | 1505 |
| | CCGTGAGCTGAGTGGGCCAGGGACTG | |
| | GGAGAAGGAGTGAGGAGGCAGGGCC | |
| | GGCATGCCTCTGCTGCTGGCCAGA | |
| 5F4 | GGGCCCTCCCGCAGAACACCATGCGC | 1506 |
| | TCCACGGAA | |
| 5F5 | CTCCCGCAGAACACCATGCGCTCCAC | 1507 |
| | GGAA | |
| 5F6 | GTGCTGGGCGGGGGGCGGCGGGCCCT | 1508 |
| | CCCGCAGAACACCATGCGCTCCACGG | |
| | AAG | |
| 5F7 | GTGCTGGGCGGGGGGCGGCGGGCCCT | 1509 |
| | CCCGCAGAACACCATGCGCTCCTCGG | |
| | AA | |
| 5F8 | TTTATGCCTCATCCTCTGAGTGCTGAA | 1692 |
| | GGCTTGCTGTAGGCTGTATGCTG | |
| 5F9 | GTGCTGGGCGGGGGGCGGCGGGCCCT | 1782 |
| | CCCGCAGAACACCATGCGCTCTTCGG | |
| | GA | |

TABLE 11
Loop Motif Regions for Molecular Scaffold

| | | Loop Motif |
|---|---|---|
| Loop Motif | | Region SEQ |
| Region Name | Loop Motif Region Sequence | ID |
| L5 | GTGGCCACTGAGAAG | 1510 |
| L1 | TGTGACCTGG | 1511 |
| L2 | TGTGATTTGG | 1512 |
| L3 | GTCTGCACCTGTCACTAG | 1513 |
| L4 | GTGACCCAAG | 1514 |
| L6 | GTGACCCAAT | 1515 |
| L7 | GTGACCCAAC | 1516 |
| L8 | GTGGCCACTGAGAAA | 1517 |
| L9 | TATAATTTGG | 1693 |
| L10 | CCTGACCCAGT | 1694 |

TABLE 12
3′ Flanking Regions for Molecular Scaffold

| 3′ | | |
|---|---|---|
| Flanking | | 3′ Flanking |
| Region | | Region SEQ |
| Name | 3′ Flanking Region Sequence | ID |
| 3F1 | CTGAGGAGCGCCTTGACAGCAGCCAT | 1518 |
| | GGGAGGGCCGCCCCCTACCTCAGTGA | |
| 3F2 | CTGTGGAGCGCCTTGACAGCAGCCAT | 1519 |
| | GGGAGGGCCGCCCCCTACCTCAGTGA | |
| 3F3 | TGGCCGTGTAGTGCTACCCAGCGCTG | 1520 |
| | GCTGCCTCCTCAGCATTGCAATTCCTC | |
| | TCCCATCTGGGCACCAGTCAGCTACC | |
| | CTGGTGGGAATCTGGGTAGCC | |
| 3F4 | CTGAGGAGCGCCTTGACAGCAGCCAT | 1521 |
| | GGGAGGGCC | |
| 3F5 | CTGCGGAGCGCCTTGACAGCAGCCAT | 1522 |
| | GGGAGGGCCGCCCCCTACCTCAGTGA | |
| 3F6 | AGTGTATGATGCCTGTTACTAGCATTC | 1695 |
| | ACATGGAACAAATTGCTGCCGTG | |
| 3F7 | TCCTGAGGAGCGCCTTGACAGCAGCC | 1783 |
| | ATGGGAGGGCCGCCCCCTACCTCAGT | |
| | GA | |

[0592] In one embodiment, the molecular scaffold may comprise at least one 5′ flanking region, fragment or variant thereof listed in Table 10. As a non-limiting example, the 5′ flanking region may be 5F1, 5F2, 5F3, 5F4, 5F5, 5F6, 5F7, 5F8, or 5F9.

[0593] In one embodiment, the molecular scaffold may comprise at least one 5F1 flanking region.

[0594] In one embodiment, the molecular scaffold may comprise at least one 5F2 flanking region.

[0595] In one embodiment, the molecular scaffold may comprise at least one 5F3 flanking region.

[0596] In one embodiment, the molecular scaffold may comprise at least one 5F4 flanking region.

[0597] In one embodiment, the molecular scaffold may comprise at least one 5F5 flanking region.

[0598] In one embodiment, the molecular scaffold may comprise at least one 5F6 flanking region.

[0599] In one embodiment, the molecular scaffold may comprise at least one 5F7 flanking region.

[0600] In one embodiment, the molecular scaffold may comprise at least one 5F8 flanking region.

[0601] In one embodiment, the molecular scaffold may comprise at least one 5F9 flanking region.

[0602] In one embodiment, the molecular scaffold may comprise at least one loop motif region, fragment or variant thereof listed in Table 11. As a non-limiting example, the loop motif region may be L1, L2, L3, L4, L5, L6, L7, L8, L9, or L10.

[0603] In one embodiment, the molecular scaffold may comprise at least one L1 loop motif region.

[0604] In one embodiment, the molecular scaffold may comprise at least one L2 loop motif region.

[0605] In one embodiment, the molecular scaffold may comprise at least one L3 loop motif region.

[0606] In one embodiment, the molecular scaffold may comprise at least one L4 loop motif region.

[0607] In one embodiment, the molecular scaffold may comprise at least one L5 loop motif region.

[0608] In one embodiment, the molecular scaffold may comprise at least one L6 loop motif region.

[0609] In one embodiment, the molecular scaffold may comprise at least one L7 loop motif region.

[0610] In one embodiment, the molecular scaffold may comprise at least one L8 loop motif region.

[0611] In one embodiment, the molecular scaffold may comprise at least one L9 loop motif region.

[0612] In one embodiment, the molecular scaffold may comprise at least one L10 loop motif region.

[0613] In one embodiment, the molecular scaffold may comprise at least one 3′ flanking region, fragment or variant thereof listed in Table 12. As a non-limiting example, the 3′ flanking region may be 3F1, 3F2, 3F3, 3F4, 3F5, 3F6, or 3F7.

[0614] In one embodiment, the molecular scaffold may comprise at least one 3F1 flanking region.

[0615] In one embodiment, the molecular scaffold may comprise at least one 3F2 flanking region.

[0616] In one embodiment, the molecular scaffold may comprise at least one 3F3 flanking region.

[0617] In one embodiment, the molecular scaffold may comprise at least one 3F4 flanking region.

[0618] In one embodiment, the molecular scaffold may comprise at least one 3F5 flanking region.

[0619] In one embodiment, the molecular scaffold may comprise at least one 3F6 flanking region.

[0620] In one embodiment, the molecular scaffold may comprise at least one 3F7 flanking region.

[0621] In one embodiment, the molecular scaffold may comprise at least one 5′ flanking region, fragment or variant thereof, and at least one loop motif region, fragment or variant thereof, as described in Tables 10 and 11. As a non-limiting example, the 5′ flanking region and the loop motif region may be 5F1 and L1, 5F1 and L2, 5F1 and L3, 5F1 and L4, 5F1 and L5, 5F1 and L6, 5F1 and L7, 5F1 and L8, 5F1 and L9, 5F1 and L10, 5F2 and L1, 5F2 and L2, 5F2 and L3, 5F2 and L4, 5F2 and L5, 5F2 and L6, 5F2 and L7, 5F2 and L8, 5F2 and L9, 5F2 and L10, 5F3 and L1, 5F3 and L2, 5F3 and L3, 5F3 and L4, 5F3 and L5, 5F3 and L6, 5F3 and L7, 5F3 and L8, 5F3 and L9, 5F3 and L0, 5F4 and L1, 5F4 and L2, 5F4 and L3, 5F4 and L4, 5F4 and L5, 5F4 and L6, 5F4 and L7, 5F4 and L8, 5F4 and L9, 5F4 and L10, 5F5 and L1, 5F5 and L2, 5F5 and L3, 5F5 and L4, 5F5 and L5, 5F5 and L6, 5F5 and L7, 5F5 and L8, 5F5 and L9, 5F5 and L0, 5F6 and L1, 5F6 and L2, 5F6 and L3, 5F6 and L4, 5F6 and L5, 5F6 and L6, 5F6 and L7, 5F6 and L8, 5F6 and L9, 5F6 and L10, 5F7 and L1, 5F7 and L2, 5F7 and L3, 5F7 and L4, 5F7 and L5, 5F7 and L6, 5F7 and L7, 5F7 and L8, 5F7 and L9, 5F7 and L0, 5F8 and L1, 5F8 and L2, 5F8 and L3, 5F8 and L4, 5F8 and L5, 5F8 and L6, 5F8 and L7, 5F8 and L8, 5F8 and L9, 5F8 and L0, 5F9 and L1, 5F9 and L2, 5F9 and L3, 5F9 and L4, 5F9 and L5, 5F9 and L6, 5F9 and L7, 5F9 and L8, 5F9 and L9, and 5F9 and L10.

[0622] In one embodiment, the molecular scaffold may comprise at least one 5F2 flanking region and at least one L1 loop motif region.

[0623] In one embodiment, the molecular scaffold may comprise at least one 5F1 flanking region and at least one L4 loop motif region.

[0624] In one embodiment, the molecular scaffold may comprise at least one 5F7 flanking region and at least one L8 loop motif region.

[0625] In one embodiment, the molecular scaffold may comprise at least one 5F3 flanking region and at least one L4 loop motif region.

[0626] In one embodiment, the molecular scaffold may comprise at least one 5F3 flanking region and at least one L5 loop motif region.

[0627] In one embodiment, the molecular scaffold may comprise at least one 5F4 flanking region and at least one L4 loop motif region.

[0628] In one embodiment, the molecular scaffold may comprise at least one 5F3 flanking region and at least one L7 loop motif region.

[0629] In one embodiment, the molecular scaffold may comprise at least one 5F5 flanking region and at least one L4 loop motif region.

[0630] In one embodiment, the molecular scaffold may comprise at least one 5F6 flanking region and at least one L4 loop motif region.

[0631] In one embodiment, the molecular scaffold may comprise at least one 5F3 flanking region and at least one L6 loop motif region.

[0632] In one embodiment, the molecular scaffold may comprise at least one 5F7 flanking region and at least one L4 loop motif region.

[0633] In one embodiment, the molecular scaffold may comprise at least one 5F2 flanking region and at least one L2 loop motif region.

[0634] In one embodiment, the molecular scaffold may comprise at least one 5F1 flanking region and at least one L loop motif region.

[0635] In one embodiment, the molecular scaffold may comprise at least one 5F1 flanking region and at least one L2 loop motif region.

[0636] In one embodiment, the molecular scaffold may comprise at least one 3′ flanking region, fragment or variant thereof, and at least one motif region, fragment or variant thereof, as described in Tables 11 and 12. As a non-limiting example, the 3′ flanking region and the loop motif region may be 3F1 and L1, 3F1 and L2, 3F1 and L3, 3F1 and L4, 3F1 and L5, 3F1 and L6, 3F1 and L7, 3F1 and L8, 3F1 and L9, 3F1 and L10, 3F2 and L1, 3F2 and L2, 3F2 and L3, 3F2 and L4, 3F2 and L5, 3F2 and L6, 3F2 and L7, 3F2 and L8, 3F2 and L9, 3F2 and L10, 3F3 and L1, 3F3 and L2, 3F3 and L3, 3F3 and L4, 3F3 and L5, 3F3 and L6, 3F3 and L7, 3F3 and L8, 3F3 and L9, 3F3 and L10, 3F4 and L1, 3F4 and L2, 3F4 and L3, 3F4 and L4, 3F4 and L5, 3F4 and L6, 3F4 and L7, 3F4 and L8, 3F4 and L9, 3F4 and L10, 3F5 and L1, 3F5 and L2, 3F5 and L3, 3F5 and L4, 3F5 and L5, 3F5 and L6, 3F5 and L7, 3F5 and L8, 3F5 and L9, 3F5 and L10, 3F6 and L1, 3F6 and L2, 3F6 and L3, 3F6 and L4, 3F6 and L5, 3F6 and L6, 3F6 and L7, 3F6 and L8, 3F6 and L9, 3F6 and L10, 3F7 and L1, 3F7 and L2, 3F7 and L3, 3F7 and L4, 3F7 and L5, 3F7 and L6, 3F7 and L7, 3F7 and L8, 3F7 and L9, and 3F7 and L10.

[0637] In one embodiment, the molecular scaffold may comprise at least one L1 loop motif region and at least one 3F2 flanking region.

[0638] In one embodiment, the molecular scaffold may comprise at least one L4 loop motif region and at least one 3F1 flanking region.

[0639] In one embodiment, the molecular scaffold may comprise at least one L8 loop motif region and at least one 3F5 flanking region.

[0640] In one embodiment, the molecular scaffold may comprise at least one L5 loop motif region and at least 3F1 flanking region.

[0641] In one embodiment, the molecular scaffold may comprise at least one L4 loop motif region and at least one 3F4 flanking region.

[0642] In one embodiment, the molecular scaffold may comprise at least one L7 loop motif region and at least one 3F1 flanking region.

[0643] In one embodiment, the molecular scaffold may comprise at least one L6 loop motif region and at least one 3F1 flanking region.

[0644] In one embodiment, the molecular scaffold may comprise at least one L4 loop motif region and at least one 3F5 flanking region.

[0645] In one embodiment, the molecular scaffold may comprise at least one L2 loop motif region and at least one 3F2 flanking region.

[0646] In one embodiment, the molecular scaffold may comprise at least one L1 loop motif region and at least one 3F3 flanking region.

[0647] In one embodiment, the molecular scaffold may comprise at least one L5 loop motif region and at least one 3F4 flanking region.

[0648] In one embodiment, the molecular scaffold may comprise at least one L1 loop motif region and at least one 3F1 flanking region.

[0649] In one embodiment, the molecular scaffold may comprise at least one L2 loop motif region and at least one 3F1 flanking region.

[0650] In one embodiment, the molecular scaffold may comprise at least one 5′ flanking region, fragment or variant thereof, and at least one 3′ flanking region, fragment or variant thereof, as described in Tables 10 and 12. As a non-limiting example, the flanking regions may be 5F1 and 3F1, 5F1 and 3F2, 5F1 and 3F3, 5F1 and 3F4, 5F1 and 3F5, 5F1 and 3F6, 5F1 and 3F7, 5F2 and 3F1, 5F2 and 3F2, 5F2 and 3F3, 5F2 and 3F4, 5F2 and 3F5, 5F2 and 3F6, 5F2 and 3F7, 5F3 and 3F1, 5F3 and 3F2, 5F3 and 3F3, 5F3 and 3F4, 5F3 and 3F5, 5F3 and 3F6, 5F3 and 3F7, 5F4 and 3F1, 5F4 and 3F2, 5F4 and 3F3, 5F4 and 3F4, 5F4 and 3F5, 5F4 and 3F6, 5F4 and 3F7, 5F5 and 3F1, 5F5 and 3F2, 5F5 and 3F3, 5F5 and 3F4, 5F5 and 3F5, 5F5 and 3F6, 5F5 and 3F7, 5F6 and 3F1, 5F6 and 3F2, 5F6 and 3F3, 5F6 and 3F4, 5F6 and 3F5, 5F6 and 3F6, 5F6 and 3F7, 5F7 and 3F1, 5F7 and 3F2, 5F7 and 3F3, 5F7 and 3F4, 5F7 and 3F5, 5F7 and 3F6, 5F7 and 3F7, 5F8 and 3F1, 5F8 and 3F2, 5F8 and 3F3, 5F8 and 3F4, 5F8 and 3F5, 5F8 and 3F6, and 5F8 and 3F7, 5F9 and 3F1, 5F9 and 3F2, 5F9 and 3F3, 5F9 and 3F4, 5F9 and 3F5, 5F9 and 3F6, and 5F9 and 3F7

[0651] In one embodiment, the molecular scaffold may comprise at least one 5F2 5′ flanking region and at least one 3F2 3′ flanking region.

[0652] In one embodiment, the molecular scaffold may comprise at least one 5F1 5′ flanking region and at least one 3F1 3′ flanking region.

[0653] In one embodiment, the molecular scaffold may comprise at least one 5F7 5′ flanking region and at least one 3F5 3′ flanking region.

[0654] In one embodiment, the molecular scaffold may comprise at least one 5F3 5′ flanking region and at least one 3F1 3′ flanking region.

[0655] In one embodiment, the molecular scaffold may comprise at least one 5F4 5′ flanking region and at least one 3F4 3′ flanking region.

[0656] In one embodiment, the molecular scaffold may comprise at least one 5F5 5′ flanking region and at least one 3F4 3′ flanking region.

[0657] In one embodiment, the molecular scaffold may comprise at least one 5F6 5′ flanking region and at least one 3F1 3′ flanking region.

[0658] In one embodiment, the molecular scaffold may comprise at least one 5F2 5′ flanking region and at least one 3F3 3′ flanking region.

[0659] In one embodiment, the molecular scaffold may comprise at least one 5F3 5′ flanking region and at least one 3F4 3′ flanking region.

[0660] In one embodiment, the molecular scaffold may comprise at least one 5F1 5′ flanking region and at least one 3F2 3′ flanking region.

[0661] In one embodiment, the molecular scaffold may comprise at least one 5′ flanking region, fragment or variant thereof, at least one loop motif region, fragment or variant thereof, and at least one 3′ flanking region as described in Tables 10-12. As a non-limiting example, the flanking and loop motif regions may be 5F1, L1 and 3F1; 5F1, L1 and 3F2; 5F1, L1 and 3F3; 5F1, L1 and 3F4; 5F1, L1 and 3F5; 5F1, L1 and 3F6; 5F1, L1 and 3F7; 5F2, L1 and 3F; 5F2, L1 and 3F2; 5F2, L1 and 3F3; 5F2, L1 and 3F4; 5F2, L1 and 3F5; 5F2, L1 and 3F6; 5F2, L1 and 3F7; 5F3, L1 and 3F1; 5F3, L1 and 3F2; 5F3, L1 and 3F3; 5F3, L1 and 3F4; 5F3, L1 and 3F5; 5F3, L1 and 3F6; 5F3, L1 and 3F7; 5F4, L1 and 3F1; 5F4, L1 and 3F2; 5F4, L1 and 3F3; 5F4, L1 and 3F4; 5F4, L1 and 3F5; 5F4, L1 and 3F6; 5F4, L1 and 3F7; 5F5, L1 and 3F1; 5F5, L1 and 3F2; 5F5, L1 and 3F3; 5F5, L1 and 3F4; 5F5, L1 and 3F5; 5F5, L1 and 3F6; 5F5, L1 and 3F7; 5F6, L1 and 3F1; 5F6, L1 and 3F2; 5F6, L1 and 3F3; 5F6, L1 and 3F4; 5F6, L1 and 3F5; 5F6, L1 and 3F6; 5F6, L1 and 3F7; 5F7, L1 and 3F1; 5F7, L1 and 3F2; 5F7, L1 and 3F3; 5F7, L1 and 3F4; 5F7, L1 and 3F5; 5F7, L1 and 3F6; 5F7, L1 and 3F7; 5F8, L1 and 3F1; 5F8, L1 and 3F2; 5F8, L1 and 3F3; 5F8, L1 and 3F4; 5F8, L1 and 3F5; 5F8, L1 and 3F6; 5F8, L1 and 3F7; 5F9, L1 and 3F1; 5F9, L1 and 3F2; 5F9, L1 and 3F3; 5F9, L1 and 3F4; 5F9, L1 and 3F5; 5F9, L1 and 3F6; 5F9, L1 and 3F7; 5F1, L2 and 3F1; 5F1, L2 and 3F2; 5F1, L2 and 3F3; 5F1, L2 and 3F4; 5F1, L2 and 3F5; 5F1, L2 and 3F6; 5F1, L2 and 3F7; 5F2, L2 and 3F1; 5F2, L2 and 3F2; 5F2, L2 and 3F3; 5F2, L2 and 3F4; 5F2, L2 and 3F5; 5F2, L2 and 3F6; 5F2, L2 and 3F7; 5F3, L2 and 3F1; 5F3, L2 and 3F2; 5F3, L2 and 3F3; 5F3, L2 and 3F4; 5F3, L2 and 3F5; 5F3, L2 and 3F6; 5F3, L2 and 3F7; 5F4, L2 and 3F1; 5F4, L2 and 3F2; 5F4, L2 and 3F3; 5F4, L2 and 3F4; 5F4, L2 and 3F5; 5F4, L2 and 3F6; 5F4, L2 and 3F7; 5F5, L2 and 3F1; 5F5, L2 and 3F2; 5F5, L2 and 3F3; 5F5, L2 and 3F4; 5F5, L2 and 3F5; 5F5, L2 and 3F6; 5F5, L2 and 3F7; 5F6, L2 and 3F1; 5F6, L2 and 3F2; 5F6, L2 and 3F3; 5F6, L2 and 3F4; 5F6, L2 and 3F5; 5F6, L2 and 3F6; 5F6, L2 and 3F7; 5F7, L2 and 3F1; 5F7, L2 and 3F2; 5F7, L2 and 3F3; 5F7, L2 and 3F4; 5F7, L2 and 3F5; 5F7, L2 and 3F6; 5F7, L2 and 3F7; 5F8, L2 and 3F1; 5F8, L2 and 3F2; 5F8, L2 and 3F3; 5F8, L2 and 3F4; 5F8, L2 and 3F5; 5F8, L2 and 3F6; 5F8, L2 and 3F7; 5F9, L2 and 3F1; 5F9, L2 and 3F2; 5F9, L2 and 3F3; 5F9, L2 and 3F4; 5F9, L2 and 3F5; 5F9, L2 and 3F6; 5F9, L2 and 3F7; 5F1, L3 and 3F1, 5F1, L3 and 3F2; 5F1, L3 and 3F3; 5F1, L3 and 3F4; 5F1, L3 and 3F5; 5F1, L3 and 3F6; 5F1, L3 and 3F7; 5F2, L3 and 3F1; 5F2, L3 and 3F2; 5F2, L3 and 3F3; 5F2, L3 and 3F4; 5F2, L3 and 3F5; 5F2, L3 and 3F6; 5F2, L3 and 3F7; 5F3, L3 and 3F1; 5F3, L3 and 3F2; 5F3, L3 and 3F3; 5F3, L3 and 3F4; 5F3, L3 and 3F5; 5F3, L3 and 3F6; 5F3, L3 and 3F7; 5F4, L3 and 3F1; 5F4, L3 and 3F2; 5F4, L3 and 3F3; 5F4, L3 and 3F4; 5F4, L3 and 3F5; 5F4, L3 and 3F6; 5F4, L3 and 3F7; 5F5, L3 and 3F1; 5F5, L3 and 3F2; 5F5, L3 and 3F3; 5F5, L3 and 3F4; 5F5, L3 and 3F5; 5F5, L3 and 3F6; 5F5, L3 and 3F7; 5F6, L3 and 3F1; 5F6, L3 and 3F2; 5F6, L3 and 3F3; 5F6, L3 and 3F4; 5F6, L3 and 3F5; 5F6, L3 and 3F6; 5F6, L3 and 3F7; 5F7, L3 and 3FL; 5F7, L3 and 3F2; 5F7, L3 and 3F3; 5F7, L3 and 3F4; 5F7, L3 and 3F5; 5F7, L3 and 3F6; 5F7, L3 and 3F7; 5F8, L3 and 3F1; 5F8, L3 and 3F2; 5F8, L3 and 3F3; 5F8, L3 and 3F4; 5F8, L3 and 3F5; 5F8, L3 and 3F6; 5F8, L3 and 3F7; 5F9, L3 and 3F1; 5F9, L3 and 3F2; 5F9, L3 and 3F3; 5F9, L3 and 3F4; 5F9, L3 and 3F5; 5F9, L3 and 3F6; 5F9, L3 and 3F7; 5F1, L4 and 3F1; 5F1, L4 and 3F2; 5F1, L4 and 3F3; 5F1, L4 and 3F4; 5F1, L4 and 3F5; 5F1, L4 and 3F6; 5F1, L4 and 3F7; 5F2, L4 and 3F1; 5F2, L4 and 3F2; 5F2, L4 and 3F3; 5F2, L4 and 3F4; 5F2, L4 and 3F5; 5F2, L4 and 3F6; 5F2, LA and 3F7; 5F3, L4 and 3F1; 5F3, LA and 3F2; 5F3, LA and 3F3; 5F3, L4 and 3F4; 5F3, LA and 3F5; 5F3, L4 and 3F6; 5F3, L4 and 3F7; 5F4, L4 and 3F1; 5F4, LA and 3F2; 5F4, L4 and 3F3; 5F4, L4 and 3F4; 5F4, LA and 3F5; 5F4, L4 and 3F6; 5F4, L4 and 3F7; 5F5, LA and 3F1; 5F5, L4 and 3F2; 5F5, L4 and 3F3; 5F5, L4 and 3F4; 5F5, L4 and 3F5; 5F5, L4 and 3F6; 5F5, L4 and 3F7; 5F6, L4 and 3F1; 5F6, L4 and 3F2; 5F6, L4 and 3F3; 5F6, L4 and 3F4; 5F6, L4 and 3F5; 5F6, L4 and 3F6; 5F6, L4 and 3F7; 5F7, LA and 3F1; 5F7, L4 and 3F2; 5F7, L4 and 3F3; 5F7, LA and 3F4; 5F7, LA and 3F5; 5F7, LA and 3F6; 5F7, LA and 3F7; 5F8, L4 and 3F1; 5F8, L4 and 3F2; 5F8, L4 and 3F3; 5F8, L4 and 3F4; 5F8, L4 and 3F5; 5F8, L4 and 3F6; 5F8, L4 and 3F7; 5F9, L4 and 3F1; 5F9, L4 and 3F2; 5F9, L4 and 3F3; 5F9, L4 and 3F4; 5F9, L4 and 3F5; 5F9, L4 and 3F6; 5F9, L4 and 3F7; 5F1, L5 and 3F1; 5F1, L5 and 3F2; 5F1, L5 and 3F3; 5F1, L5 and 3F4; 5F1, L5 and 3F5; 5F1, L5 and 3F6; 5F1, L5 and 3F7; 5F2, L5 and 3F1; 5F2, L5 and 3F2; 5F2, L5 and 3F3; 5F2, L5 and 3F4; 5F2, L5 and 3F5; 5F2, L5 and 3F6; 5F2, L5 and 3F7; 5F3, L5 and 3F1; 5F3, L5 and 3F2; 5F3, L5 and 3F3; F3, L5 and 3F4; 5F3, L5 and 3F5; 5F3, L5 and 3F6; 5F3, L5 and 3F7; 5F4, L5 and 3F1; 5F4, L5 and 3F2; 5F4, L5 and 3F3; 5F4, L5 and 3F4; 5F4, L5 and 3F5; 5F4, L5 and 3F6; 5F4, L5 and 3F7; 5F5, L5 and 3F1; 5F5, L5 and 3F2; 5F5, L5 and 3F3; 5F5, L5 and 3F4; 5F5, L5 and 3F5; 5F5, L5 and 3F6; 5F5, L5 and 3F7; 5F6, L5 and 3F1; 5F6, L5 and 3F2; 5F6, L5 and 3F3; 5F6, L5 and 3F4; 5F6, L5 and 3F5; 5F6, L5 and 3F6; 5F6, L5 and 3F7; 5F7, L5 and 3F1; 5F7, L5 and 3F2; 5F7, L5 and 3F3; 5F7, L5 and 3F4; 5F7, L5 and 3F5; 5F7, L5 and 3F6; 5F7, L5 and 3F7; 5F8, L5 and 3F1; 5F8, L5 and 3F2; 5F8, L5 and 3F3; 5F8, L5 and 3F4; 5F8, L5 and 3F5; 5F8, L5 and 3F6; 5F8, L5 and 3F7; 5F9, L5 and 3F1; 5F9, L5 and 3F2; 5F9, L5 and 3F3; 5F9, L5 and 3F4; 5F9, L5 and 3F5; 5F9, L5 and 3F6; 5F9, L5 and 3F7; 5F1, L6 and 3F1; 5F1, L6 and 3F2; 5F1, L6 and 3F3; 5F1, L6 and 3F4; 5F1, L6 and 3F5; 5F1, L6 and 3F6; 5F1, L6 and 3F7; 5F2, L6 and 3F1; 5F2, L6 and 3F2; 5F2, L6 and 3F3; 5F2, L6 and 3F4; 5F2, L6 and 3F5; 5F2, L6 and 3F6; 5F2, L6 and 3F7; 5F3, L6 and 3F1; 5F3, L6 and 3F2; 5F3, L6 and 3F3; 5F3, L6 and 3F4; 5F3, L6 and 3F5; 5F3, L6 and 3F6; 5F3, L6 and 3F7; 5F4, L6 and 3F1; 5F4, L6 and 3F2; 5F4, L6 and 3F3; 5F4, L6 and 3F4; 5F4, L6 and 3F5; 5F4, L6 and 3F6; 5F4, L6 and 3F7; 5F5, L6 and 3F1; 5F5, L6 and 3F2; 5F5, L6 and 3F3; 5F5, L6 and 3F4; 5F5, L6 and 3F5; 5F5, L6 and 3F6; 5F5, L6 and 3F7; 5F6, L6 and 3F1; 5F6, L6 and 3F2; 5F6, L6 and 3F3; 5F6, L6 and 3F4; 5F6, L6 and 3F5; 5F6, L6 and 3F6; 5F6, L6 and 3F7; 5F7, L6 and 3F1; 5F7, L6 and 3F2; 5F7, L6 and 3F3; 5F7, L6 and 3F4; 5F7, L6 and 3F5; 5F7, L6 and 3F6; 5F7, L6 and 3F7; 5F8, L6 and 3F1; 5F8, L6 and 3F2; 5F8, L6 and 3F3; 5F8, L6 and 3F4; 5F8, L6 and 3F5; 5F8, L6 and 3F6; 5F8, L6 and 3F7; 5F9, L6 and 3F1; 5F9, L6 and 3F2; 5F9, L6 and 3F3; 5F9, L6 and 3F4; 5F9, L6 and 3F5; 5F9, L6 and 3F6; 5F9, L6 and 3F7; 5F1, L7 and 3F1; 5F1, L7 and 3F2; 5F1, L7 and 3F3; 5F1, L7 and 3F4; 5F1, L7 and 3F5; 5F1, L7 and 3F6; 5F1, L7 and 3F7; 5F2, L7 and 3F1; 5F2, L7 and 3F2; 5F2, L7 and 3F3; 5F2, L7 and 3F4; 5F2, L7 and 3F5; 5F2, L7 and 3F6; 5F2, L7 and 3F7; 5F3, L7 and 3F1; 5F3, L7 and 3F2; 5F3, L7 and 3F3; 5F3, L7 and 3F4; 5F3, L7 and 3F5; 5F3, L7 and 3F6; 5F3, L7 and 3F7; 5F4, L7 and 3F1; 5F4, L7 and 3F2; 5F4, L7 and 3F3; 5F4, L7 and 3F4, 5F4, L7 and 3F5; 5F4, L7 and 3F6; 5F4, L7 and 3F7; 5F5, L7 and 3F1; 5F5, L7 and 3F2; 5F5, L7 and 3F3; 5F5, L7 and 3F4; 5F5, L7 and 3F5; 5F5, L7 and 3F6; 5F5, L7 and 3F7; 5F6, L7 and 3F1; 5F6, L7 and 3F2; 5F6, L7 and 3F3; 5F6, L7 and 3F4; 5F6, L7 and 3F5; 5F6, L7 and 3F6; 5F6, L7 and 3F7; 5F7, L7 and 3F1; 5 F7, L7 and 3F2; 5F7, L7 and 3F3; 5F7, L7 and 3F4; 5F7, L7 and 3F5, 5F7, L7 and 3F6; 5F7, L7 and 3F7; 5F8, L7 and 3F1; 5F8, L7 and 3F2; 5F8, L7 and 3F3; 5F8, L7 and 3F4; 5F8, L7 and 3F5; 5F8, L7 and 3F6; 5F8, L7 and 3F7; 5F9, L7 and 3F1; 5F9, L7 and 3F2; 5F9, L7 and 3F3; 5F9, L7 and 3F4; 5F9, L7 and 3F5; 5F9, L7 and 3F6; 5F9, L7 and 3F7; 5F1, L8 and 3F1; 5F1, L8 and 3F2; 5F1, L8 and 3F3; 5F1, L8 and 3F4; 5F1, L8 and 3F5; 5F1, L8 and 3F6; 5F1, L8 and 3F7; 5F2, L8 and 3F1; 5F2, L8 and 3F2; 5F2, L8 and 3F3; 5F2, L8 and 3F4; 5F2, L8 and 3F5; 5F2, L8 and 3F6; 5F2, L8 and 3F7; 5F3, L8 and 3F1; 5F3, L8 and 3F2; 5F3, L8 and 3F3; 5F3, L8 and 3F4; 5F3, L8 and 3F5; 5F3, L8 and 3F6; 5F3, L8 and 3F7; 5F4, L8 and 3F1; 5F4, L8 and 3F2; 5F4, L8 and 3F3; 5F4, L8 and 3F4; 5F4, L8 and 3F5; 5F4, L8 and 3F6; 5F4, L8 and 3F7; 5F5, L8 and 3F1; F5, L8 and 3F2; 5F5, L8 and 3F3; 5F5, L8 and 3F4; 5F5, L8 and 3F5; 5F5, L8 and 3F6; 5F5, L8 and 3F7; 5F6, L8 and 3F1; 5F6, L8 and 3F2, 5F6, L8 and 3F3, 5F6, L8 and 3F4; 5F6, L8 and 3F5; 5F6, L8 and 3F6; 5F6, L8 and 3F7; 5F7, U8 and 3F1; 5F7, L8 and 3F2; 5F7, L8 and 3F3; 5F7, L8 and 3F4; 5F7, L8 and 3F5; 5F7, L8 and 3F6; 5F7, L8 and 3F7; 5F8, L8 and 3F1; 5F8, L8 and 3F2; 5F8, L8 and 3F3; 5F8, L8 and 3F4; 5F8, L8 and 3F5; 5F8, L8 and 3F6; 5F8, L8 and 3F7; 5F9, L8 and 3F1; 5F9, L8 and 3F2; 5F9, L8 and 3F3; 5F9, L8 and 3F4; 5F9, L8 and 3F5; 5F9, L8 and 3F6; 5F9, L8 and 3F7; 5F1, L9 and 3F1; 5F1, L9 and 3F2; 5F1, L9 and 3F3; 5F1, L9 and 3F4; 5F1, L9 and 3F5; 5F1, L9 and 3F6; 5F1, L9 and 3F7; 5F2, L9 and 3F1; 5F2, L9 and 3F2; 5F2, L9 and 3F3; 5F2, L9 and 3F4; 5F2, L9 and 3F5; 5F2, L9 and 3F6; 5F2, L9 and 3F7; 5F3, L9 and 3F1; 5F3, L9 and 3F2; 5F3, L9 and 3F3; 5F3, L9 and 3F4; 5F3, L9 and 3F5; 5F3, L9 and 3F6; 5F3, L9 and 3F7; 5F4, L9 and 3F1; 5F4, L9 and 3F2; 5F4, L9 and 3F3; 5F4, L9 and 3F4; 5F4, L9 and 3F5; 5F4, L9 and 3F6; 5F4, L9 and 3F7; 5F5, L9 and 3F1; 5F5, L9 and 3F2; 5F5, L9 and 3F3; 5F5, L9 and 3F4; 5F5, L9 and 3F5; 5F5, L9 and 3F6; 5F5, L9 and 3F7; 5F6, L9 and 3F1; 5F6, L9 and 3F2; 5F6, L9 and 3F3; 5F6, L9 and 3F4; 5F6, L9 and 3F5; 5F6, L9 and 3F6; 5F6, L9 and 3F7; 5F7, L9 and 3F1; 5F7, L9 and 3F2; 5F7, L9 and 3F3; 5F7, L9 and 3F4; 5F7, L9 and 3F5; 5F7, L9 and 3F6; 5F7, L9 and 3F7; 5F8, L9 and 3F1; 5F8, L9 and 3F2; 5F8, L9 and 3F3; 5F8, L9 and 3F4; 5F8, L9 and 3F5; 5F8, L9 and 3F6; 5F8, L9 and 3F7; 5F9, L9 and 3F1; 5F9, L9 and 3F2; 5F9, L9 and 3F3; 5F9, L9 and 3F4; 5F9, L9 and 3F5; 5F9, L9 and 3F6; 5F9, L9 and 3F7; 5F1, L10 and 3F1; 5F1, L10 and 3F2; 5F1, L10 and 3F3; 5F1, L10 and 3F4; 5F1, L10 and 3F5; 5F1, L10 and 3F6; 5F1, L10 and 3F7; 5F2, L10 and 3F1; 5F2, L10 and 3F2; 5F2, L10 and 3F3; 5F2, L10 and 3F4; 5F2, L10 and 3F5; 5F2, L10 and 3F6; 5F2, L10 and 3F7; 5F3, L10 and 3F1; 5F3, L10 and 3F2; 5F3, L10 and 3F3; 5F3, L10 and 3F4; F3, L10 and 3F5; 5F3, L10 and 3F6; F3, L10 and 3F7; 5F4, L10 and 3F1; 5F4, L10 and 3F2; 5F4, L10 and 3F3; 5F4, L10 and 3F4; 5F4, L10 and 3F5; 5F4, L10 and 3F6; 5F4, L0 and 3F7; 5F5, L0 and 3F1; 5F5, L0 and 3F2; 5F5, L0 and 3F3; 5F5, L10 and 3F4; 5F5, L10 and 3F5; 5F5, L10 and 3F6; 5F5, L10 and 3F7; 5F6, L10 and 3F1; 5F6, L10 and 3F2; 5F6, L10 and 3F3; 5F6, L10 and 3F4; 5F6, L10 and 3F5; 5F6, L10 and 3F6; 5F6, L10 and 3F7; 5F7, L10 and 3F1; 5F7, L10 and 3F2; 5F7, L10 and 3F3; 5F7, L10 and 3F4; 5F7, L10 and 3F5; 5F7, L10 and 3F6; 5F7, L10 and 3F7; 5F8, L10 and 3F1; 5F8, L10 and 3F2; 5F8, L10 and 3F3; 5F8, L10 and 3F4; 5F8, L10 and 3F5; 5F8, L10 and 3F6; 5F8, L10 and 3F7; 5F9, L10 and 3F1; 5F9, L10 and 3F2; 5F9, L10 and 3F3; 5F9, L10 and 3F4; 5F9, L10 and 3F5; 5F9, L10 and 3F6; and 5F9, L10 and 3F7.

[0662] In one embodiment, the molecular scaffold may comprise at least one 5F2 5′ flanking region, at least one L1 loop motif region, and at least one 3F2 3′ flanking region.

[0663] In one embodiment, the molecular scaffold may comprise at least one 5F1 5′ flanking region, at least one L4 loop motif region, and at least one 3F1 3′ flanking region.

[0664] In one embodiment, the molecular scaffold may comprise at least one 5F7 5′ flanking region, at least one L8 loop motif region, and at least one 3F5 3′ flanking region.

[0665] In one embodiment, the molecular scaffold may comprise at least one 5F3 5′ flanking region, at least one L4 loop motif region, and at least one 3F1 3′ flanking region.

[0666] In one embodiment, the molecular scaffold may comprise at least one 5F3 5′ flanking region, at least one L5 loop motif region, and at least one 3F1 3′ flanking region.

[0667] In one embodiment, the molecular scaffold may comprise at least one 5F4 5′ flanking region, at least one L4 loop motif region, and at least one 3F4 3′ flanking region.

[0668] In one embodiment, the molecular scaffold may comprise at least one 5F3 5′ flanking region, at least one L7 loop motif region, and at least one 3F1 3′ flanking region.

[0669] In one embodiment, the molecular scaffold may comprise at least one 5F5 5′ flanking region, at least one L4 loop motif region, and at least one 3F4 3′ flanking region.

[0670] In one embodiment, the molecular scaffold may comprise at least one 5F6 5′ flanking region, at least one L4 loop motif region, and at least one 3F1 3′ flanking region.

[0671] In one embodiment, the molecular scaffold may comprise at least one 5F3 5′ flanking region, at least one L6 loop motif region, and at least one 3F1 3′ flanking region.

[0672] In one embodiment, the molecular scaffold may comprise at least one 5F7 5′ flanking region, at least one L4 loop motif region, and at least one 3F5 3′ flanking region.

[0673] In one embodiment, the molecular scaffold may comprise at least one 5F2 5′ flanking region, at least one L2 loop motif region, and at least one 3F2 3′ flanking region.

[0674] In one embodiment, the molecular scaffold may comprise at least one 5F2 5′ flanking region, at least one L1 loop motif region, and at least one 3F3 3′ flanking region.

[0675] In one embodiment, the molecular scaffold may comprise at least one 5F3 5′ flanking region, at least one L5 loop motif region, and at least one 3F4 3′ flanking region.

[0676] In one embodiment, the molecular scaffold may comprise at least one 5F1 5′ flanking region, at least one L1 loop motif region, and at least one 3F1 3′ flanking region.

[0677] In one embodiment, the molecular scaffold may comprise at least one 5F1 5′ flanking region, at least one L2 loop motif region, and at least one 3F1 3′ flanking region.

[0678] In one embodiment, the molecular scaffold may comprise at least one 5F1 5′ flanking region, at least one L1 loop motif region, and at least one 3F2 3′ flanking region.

[0679] In one embodiment, the molecular scaffold may comprise at least one 5F2 5′ flanking region, at least one L3 loop motif region, and at least one 3F3 3′ flanking region.

[0680] In one embodiment, the molecular scaffold may be a natural pri-miRNA scaffold. As a non-limiting example, the molecular scaffold may be a scaffold derived from the human miR155 scaffold.

[0681] In one embodiment, the molecular scaffold may comprise one or more linkers known in the art. The linkers may separate regions or one molecular scaffold from another. As a non-limiting example, the molecular scaffold may be polycistronic.

Modulatory Polynucleotide Comprising Molecular Scaffold and siRNA Molecules Targeting HTT

[0682] In one embodiment, the modulatory polynucleotide may comprise 5′ and 3′ flanking regions, loop motif region, and nucleic acid sequences encoding sense sequence and antisense sequence as described in Tables 13 and 14. In Tables 13 and 14, the DNA sequence identifier for the passenger and guide strands are described as well as the 5′ and 3′ Flanking Regions and the Loop region (also referred to as the linker region). In Tables 13 and 14, the “miR” component of the name of the sequence does not necessarily correspond to the sequence numbering of miRNA genes (e.g., VOYHTmiR-102 is the name of the sequence and does not necessarily mean that miR-102 is part of the sequence),

TABLE 13
HTT Modulatory Polynucleotide Sequence Regions (5’ to 3’)

| Modulatory | 5’ Flanking to | 5’ | | | | 3’ |
|---|---|---|---|---|---|---|
| Polynucleotide | 3’ Flanking | Flanking | Passenger | Loop | uide | Flanking |
| Construct Name | SEQ ID NO | SEQ ID NO | SEQ ID NO | SEQ ID NO | SEQ ID NO | SEQ ID NO |
| VOYHTmiR- | 1523 | 1504 | 1636 | 1511 | 677 | 1518 |
| 102.214 | | | | | | |
| VOYHTmiR- | 1524 | 1504 | 1643 | 1511 | 677 | 1518 |
| 104.214 | | | | | | |
| VOYHTmiR- | 1525 | 1504 | 1650 | 1512 | 677 | 1518 |
| 109.214 | | | | | | |
| VOYHTmiR- | 1526 | 1504 | 1657 | 1511 | 677 | 1519 |
| 114.214 | | | | | | |
| VOYHTmiR- | 1527 | 1504 | 1650 | 1511 | 677 | 1519 |
| 116.214 | | | | | | |
| VOYHTmiR- | 1528 | 1505 | 1650 | 1513 | 634 | 1520 |
| 127.214 | | | | | | |
| VOYHTmiR- | 1529 | 1504 | 1637 | 1511 | 678 | 1518 |
| 102.218 | | | | | | |
| VOYHTmiR- | 1530 | 1504 | 1644 | 1511 | 678 | 1518 |
| 104.218 | | | | | | |
| VOYHTmiR- | 1531 | 1504 | 1651 | 1512 | 678 | 1518 |
| 109.218 | | | | | | |
| VOYHTmiR- | 1539 | 1504 | 1658 | 1511 | 678 | 1519 |
| 114.218 | | | | | | |
| VOYHTmiR- | 1533 | 1504 | 1651 | 1511 | 678 | 1519 |
| 116.218 | | | | | | |
| VOYHTmiR- | 1534 | 1505 | 1651 | 1513 | 678 | 1520 |
| 127.218 | | | | | | |
| VOYHTmiR- | 1533 | 1504 | 1620 | 1511 | 673 | 1518 |
| 102.219.o | | | | | | |
| VOYHTmiR- | 1535 | 1504 | 1623 | 1511 | 673 | 1518 |
| 104.219.o | | | | | | |
| VOYHTmiR- | 1537 | 1504 | 1620 | 1512 | 633 | 1518 |
| 109.219.o | | | | | | |
| VOYHTmiR- | 1538 | 1504 | 1626 | 1511 | 673 | 1519 |
| 114.219 | | | | | | |
| VOYHTmiR- | 1539 | 1504 | 1629 | 1511 | 673 | 1519 |
| 116.219.o | | | | | | |
| VOYHTmiR- | 1540 | 1505 | 1620 | 1513 | 633 | 1520 |
| 127.219.o | | | | | | |
| VOYHTmiR- | 1541 | 1504 | 1632 | 1511 | 673 | 1518 |
| 102.219.n | | | | | | |
| VOYHTmiR- | 1542 | 1504 | 1633 | 1511 | 673 | 1518 |
| 104.219.n | | | | | | |
| VOYHTmiR- | 1543 | 1504 | 1632 | 1512 | 673 | 1518 |
| 109.219.n | | | | | | |
| VOYHTmiR- | 1544 | 1504 | 1634 | 1511 | 673 | 1519 |
| 116.219.n | | | | | | |
| VOYHTmiR- | 1545 | 1505 | 1632 | 1513 | 673 | 1520 |
| 127.219.n | | | | | | |
| VOYHTmiR- | 1546 | 1504 | 1638 | 1511 | 679 | 1518 |
| 102.257 | | | | | | |
| VOYHTmiR- | 1547 | 1504 | 1645 | 1511 | 679 | 1518 |
| 104.257 | | | | | | |
| VOYHTmiR- | 1548 | 1504 | 1652 | 1517 | 679 | 1518 |
| 109.257 | | | | | | |
| VOYHTmiR- | 1549 | 1504 | 1659 | 1511 | 679 | 1519 |
| 114.257 | | | | | | |
| VOYHTmiR- | 1550 | 1504 | 1652 | 1511 | 679 | 1519 |
| 116.257 | | | | | | |
| VOYHTmiR- | 1551 | 1505 | 1652 | 1513 | 679 | 1520 |
| 127.257 | | | | | | |
| VOYHTmiR- | 1552 | 1504 | 1621 | 1511 | 674 | 1518 |
| 102.894 | | | | | | |
| VOYHTmiR- | 1553 | 1504 | 1624 | 1511 | 674 | 1518 |
| 104.894 | | | | | | |
| VOYHTmiR- | 1554 | 1504 | 1621 | 1512 | 674 | 1518 |
| 109.894 | | | | | | |
| VOYHTmiR- | 1555 | 1504 | 1627 | 1511 | 674 | 1519 |
| 114.894 | | | | | | |
| VOYHTmiR- | 1556 | 1504 | 1630 | 1511 | 674 | 1519 |
| 116.894 | | | | | | |
| VOYHTmiR- | 1557 | 1505 | 1621 | 1513 | 674 | 1520 |
| 127.894 | | | | | | |
| VOYHTmiR- | 1558 | 1504 | 1641 | 1511 | 682 | 1518 |
| 102.907 | | | | | | |
| VOYHTmiR- | 1559 | 1504 | 1648 | 1511 | 682 | 1518 |
| 104.907 | | | | | | |
| VOYHTmiR- | 1560 | 1504 | 1655 | 1512 | 682 | 1518 |
| 109.907 | | | | | | |
| VOYHTmiR- | 1561 | 1504 | 1662 | 1511 | 682 | 1519 |
| 114.907 | | | | | | |
| VOYHTmiR- | 1562 | 1504 | 1655 | 1511 | 682 | 1519 |
| 116.907 | | | | | | |
| VOYHTmiR- | 1563 | 1505 | 1655 | 1513 | 682 | 1520 |
| 127.907 | | | | | | |
| VOYHTmiR- | 1564 | 1504 | 1639 | 1511 | 680 | 1518 |
| 102.372 | | | | | | |
| VOYHTmiR- | 1565 | 1504 | 1646 | 1511 | 680 | 1518 |
| 104.372 | | | | | | |
| VOYHTmiR- | 1566 | 1504 | 1653 | 1512 | 680 | 1518 |
| 109.372 | | | | | | |
| VOYHTmiR- | 1567 | 1504 | 1660 | 1511 | 680 | 1519 |
| 11.4.372 | | | | | | |
| VOYHTmiR- | 1568 | 1504 | 1653 | 1511 | 680 | 1519 |
| 116.372 | | | | | | |
| VOYHTmiR- | 1569 | 1505 | 1653 | 1513 | 680 | 1520 |
| 127.377 | | | | | | |
| VOYHTmiR- | 1570 | 1504 | 1640 | 1511 | 681 | 1518 |
| 102.425 | | | | | | |
| VOYHTmiR- | 1571 | 1504 | 1647 | 1511 | 681 | 1518 |
| 104.425 | | | | | | |
| VOYHTmiR- | 1572 | 1504 | 1654 | 1512 | 681 | 1518 |
| 109.425 | | | | | | |
| VOYHTmiR- | 1573 | 1504 | 1661 | 1511 | 681 | 1519 |
| 114.425 | | | | | | |
| VOYHTmiR- | 1574 | 1504 | 1654 | 1511 | 681 | 1519 |
| 116.425 | | | | | | |
| VOYHTmiR- | 1575 | 1505 | 1654 | 1513 | 681 | 1520 |
| 127.425 | | | | | | |
| VOYHTmiR- | 1576 | 1504 | 1664 | 1511 | 684 | 1518 |
| 102.032 | | | | | | |
| VOYHTmiR- | 1577 | 1504 | 1666 | 1511 | 684 | 1518 |
| 104.032 | | | | | | |
| VOYHTmiR- | 1578 | 1504 | 1668 | 1512 | 684 | 1518 |
| 109.032 | | | | | | |
| VOYHTmiR- | 1579 | 1504 | 1670 | 1511 | 684 | 1519 |
| 114.032 | | | | | | |
| VOYHTmiR- | 1580 | 1504 | 1668 | 1511 | 684 | 1519 |
| 116.032 | | | | | | |
| VOYHTmiR- | 1581 | 1505 | 1668 | 1513 | 684 | 1520 |
| 127.032 | | | | | | |
| VOYHTmiR- | 1587 | 1504 | 1663 | 1511 | 683 | 1518 |
| 102.020 | | | | | | |
| VOYHTmiR- | 1583 | 1504 | 1665 | 1511 | 683 | 1518 |
| 104.020 | | | | | | |
| VOYHTmiR- | 1584 | 1504 | 1667 | 1512 | 683 | 1518 |
| 109.020 | | | | | | |
| VOYHTmiR- | 1585 | 1504 | 1669 | 1511 | 683 | 1519 |
| 114.020 | | | | | | |
| VOYHTmiR- | 1586 | 1504 | 1667 | 1511 | 683 | 1519 |
| 116.020 | | | | | | |
| VOYHTmiR- | 1587 | 1505 | 1667 | 1513 | 683 | 1520 |
| 127.020 | | | | | | |
| VOYHTmiR- | 1588 | 1504 | 1635 | 1511 | 676 | 1518 |
| 102.016 | | | | | | |
| VOYHTmiR- | 1589 | 1504 | 1642 | 1511 | 676 | 1518 |
| 104.016 | | | | | | |
| VOYHTmiR- | 1590 | 1504 | 1649 | 1512 | 676 | 1518 |
| 109.016 | | | | | | |
| VOYHTmiR- | 1591 | 1504 | 1656 | 1511 | 676 | 1519 |
| 114.016 | | | | | | |
| VOYHTmiR- | 1597 | 1504 | 1649 | 1511 | 676 | 1519 |
| 116.016 | | | | | | |
| VOYHTmiR- | 1593 | 1505 | 1649 | 1513 | 676 | 1520 |
| 127.016 | | | | | | |
| VOYHTmiR- | 1594 | 1504 | 1622 | 1511 | 675 | 1518 |
| 102.579 | | | | | | |
| VOYHTmiR- | 1595 | 1504 | 1625 | 1511 | 675 | 1518 |
| 104.579 | | | | | | |
| VOYHTmiR- | 1596 | 1504 | 1622 | 1512 | 675 | 1518 |
| 109.579 | | | | | | |
| VOYHTmiR- | 1597 | 1504 | 1628 | 1511 | 675 | 1519 |
| 114.579 | | | | | | |
| VOYHTmiR- | 1598 | 1504 | 1631 | 1511 | 675 | 1519 |
| 116.579 | | | | | | |
| VOYHTmiR- | 1599 | 1505 | 1622 | 1513 | 675 | 1520 |
| 127.579 | | | | | | |
| VOYHTmiR- | 1600 | 1504 | 1671 | 1514 | 675 | 1518 |
| 104.579.1 | | | | | | |
| VOYHTmiR- | 1601 | 1503 | 1671 | 1514 | 675 | 1518 |
| 104.579.2 | | | | | | |
| VOYHTmiR- | 1602 | 1503 | 1671 | 1510 | 675 | 1518 |
| 104.579.3 | | | | | | |
| VOYHTmiR- | 1603 | 1506 | 1671 | 1514 | 675 | 1521 |
| 104.579.4 | | | | | | |
| VOYHTmiR- | 1604 | 1507 | 1671 | 1514 | 635 | 1521 |
| 104.579.6 | | | | | | |
| VOYHTmiR- | 1605 | 1508 | 1671 | 1514 | 685 | 1518 |
| 104.579.7 | | | | | | |
| VOYHTmiR- | 1606 | 1503 | 1672 | 1515 | 675 | 1518 |
| 104.579.8 | | | | | | |
| VOYHTmiR- | 1607 | 1509 | 1671 | 1514 | 675 | 1522 |
| 104.579.9 | | | | | | |
| VOYHTmiR- | 1608 | 1504 | 1663 | 1511 | 683 | 1518 |
| 102.020 | | | | | | |
| VOYHTmiR- | 1609 | 1504 | 1664 | 1511 | 684 | 1518 |
| 102.032 | | | | | | |
| VOYHTmiR- | 1610 | 1504 | 1665 | 1511 | 683 | 1518 |
| 104.020 | | | | | | |
| VOYHTmiR- | 1611 | 1504 | 1666 | 1511 | 684 | 1518 |
| 104.032 | | | | | | |
| VOYHTmiR- | 1612 | 1504 | 1667 | 1512 | 683 | 1518 |
| 109.020 | | | | | | |
| VOYHTmiR- | 1613 | 1504 | 1668 | 1512 | 684 | 1518 |
| 109.032 | | | | | | |
| VOYHTmiR- | 1614 | 1504 | 1669 | 1511 | 683 | 1519 |
| 114.020 | | | | | | |
| VOYHTmiR- | 1615 | 1504 | 1670 | 1511 | 684 | 1519 |
| 114.032 | | | | | | |
| VOYHTmiR- | 1616 | 1504 | 1667 | 1511 | 683 | 1519 |
| 116.020 | | | | | | |
| VOYHTmiR- | 1617 | 1504 | 1668 | 1511 | 684 | 1519 |
| 116.032 | | | | | | |
| VOYHTmiR- | 1618 | 1505 | 1667 | 1513 | 683 | 1520 |
| 127.020 | | | | | | |
| VOYHTmiR- | 1619 | 1505 | 1668 | 1513 | 684 | 1520 |
| 127.032 | | | | | | |

TABLE 14
HTT Modulatory Polynucleotide Sequence Region (5’ to 3’)

| | 5’ Flanking to | 5’ | | | | 3’ |
|---|---|---|---|---|---|---|
| | 3’ Flanking | Flanking | Passenger | Loop | Guide | Flanking |
| Name | SEQ ID NO | SEQ ID NO | SEQ ID NO | SEQ ID NO | SEQ ID NO | SEQ ID NO |
| VOYHTmiR- | 1686 | 1503 | 1688 | 1516 | 1690 | 1518 |
| 104.579.5 | | | | | | |
| VOYHTmiR- | 1687 | 1509 | 1689 | 1517 | 1691 | 1532 |
| 104.579.10 | | | | | | |

Modulatory Polynucleotide Comprising Molecular Scaffold and siRNA Molecules Targeting SOD1

[0683] In one embodiment, the modulatory polynucleotide may comprise 5′ and 3′ flanking regions, loop motif region, and nucleic acid sequences encoding sense sequence and antisense sequence as described in Tables 15 and 16. In Tables 15 and 16, the DNA sequence identifier for the passenger and guide strands are described as well as the 5′ and 3′ Flanking Regions and the Loop region (also referred to as the linker region). In Tables 15 and 16, the “miR” component of the name of the sequence does not necessarily correspond to the sequence numbering of miRNA genes (e.g., VOYSOD1miR-102 is the name of the sequence and does not necessarily mean that miR-102 is part of the sequence),

TABLE 15
SOD1 Modulatory Polynucleotide Sequence Regions 5′ to 3′ )

| Modulatory | 5′ | 5′ | | | | |
|---|---|---|---|---|---|---|
| Polynucleotide | Flanking to | Flanking | Passenger | Loop | uide | 3′ Flanking |
| Construct | 3′ Flanking | SEQ ID | SEQ ID | SEQ ID | SEQ ID | SEQ ID |
| Name | SEQ ID NO | NO | NO | NO | NO | NO |
| VOYSOD1miR- | 1696 | 1692 | 1746 | 1510 | 747 | 1695 |
| 101 | | | | | | |
| VOYSOD1miR- | 1697 | 1503 | 1746 | 1510 | 747 | 1518 |
| 102 | | | | | | |
| VOYSOD1miR- | 1698 | 1503 | 1748 | 1510 | 747 | 1518 |
| 103 | | | | | | |
| VOYSOD1miR- | 1699 | 1503 | 1749 | 1510 | 747 | 1518 |
| 104 | | | | | | |
| VOYSOD1miR- | 1700 | 1503 | 1750 | 1510 | 747 | 1518 |
| 105 | | | | | | |
| VOYSOD1miR- | 1701 | 1503 | 1751 | 1510 | 747 | 1518 |
| 106 | | | | | | |
| VOYSOD1miR- | 1702 | 1503 | 1752 | 1510 | 747 | 1518 |
| 107 | | | | | | |
| VOYSOD1miR- | 1703 | 1503 | 1754 | 1510 | 747 | 1518 |
| 108 | | | | | | |
| VOYSOD1miR- | 1704 | 1503 | 1746 | 1511 | 747 | 1518 |
| 109 | | | | | | |
| VOYSOD1miR- | 1705 | 1503 | 1746 | 1693 | 747 | 1518 |
| 110 | | | | | | |
| VOYSOD1miR- | 1706 | 1503 | 1753 | 1694 | 747 | 1518 |
| 111 | | | | | | |
| VOYSOD1miR- | 1707 | 1503 | 1746 | 1510 | 747 | 1519 |
| 112 | | | | | | |
| VOYSOD1miR- | 1708 | 1503 | 1748 | 1510 | 747 | 1519 |
| 113 | | | | | | |
| VOYSOD1miR- | 1709 | 1503 | 1751 | 1510 | 747 | 1519 |
| 114 | | | | | | |
| VOYSOD1miR- | 1710 | 1503 | 1753 | 1694 | 747 | 1519 |
| 115 | | | | | | |
| VOYSOD1miR- | 1711 | 1503 | 1749 | 1510 | 747 | 1519 |
| 116 | | | | | | |
| VOYSOD1miR- | 1712 | 1503 | 1755 | 1510 | 756 | 1518 |
| 117 | | | | | | |
| VOYSOD1miR- | 1713 | 1503 | 1757 | 1510 | 758 | 1518 |
| 118 | | | | | | |
| VOYSOD1miR- | 1714 | 1503 | 1759 | 1510 | 760 | 1518 |
| 119 | | | | | | |
| VOYSOD1miR- | 1715 | 1504 | 1746 | 1512 | 747 | 1520 |
| 127 | | | | | | |
| VOYSOD1miR- | 1716 | 1503 | 1761 | 1510 | 762 | 1518 |
| 102.860 | | | | | | |
| VOYSOD1miR- | 1717 | 1503 | 1763 | 1510 | 764 | 1518 |
| 102.861 | | | | | | |
| VOYSOD1miR- | 1718 | 1503 | 1765 | 1510 | 760 | 1518 |
| 102.866 | | | | | | |
| VOYSOD1miR- | 1719 | 1503 | 1766 | 1510 | 767 | 1518 |
| 102.870 | | | | | | |
| VOYSOD1miR- | 1720 | 1503 | 1768 | 1510 | 758 | 1518 |
| 102.823 | | | | | | |
| VOYSOD1miR- | 1721 | 1503 | 1769 | 1510 | 762 | 1518 |
| 104.860 | | | | | | |
| VOYSOD1miR- | 1722 | 1503 | 1770 | 1510 | 764 | 1518 |
| 104.861 | | | | | | |
| VOYSOD1miR- | 1723 | 1503 | 1771 | 1510 | 760 | 1518 |
| 404.866 | | | | | | |
| VOYSOD1miR- | 1724 | 1503 | 1772 | 1510 | 767 | 1518 |
| 104.870 | | | | | | |
| VOYSOD1miR- | 1725 | 1503 | 1773 | 1510 | 758 | 1518 |
| 104.823 | | | | | | |
| VOYSOD1miR- | 1726 | 1503 | 1761 | 1511 | 762 | 1518 |
| 109.860 | | | | | | |
| VOYSOD1miR- | 1727 | 1503 | 1763 | 1511 | 764 | 1518 |
| 104.861 | | | | | | |
| VOYSOD1miR- | 1728 | 1503 | 1765 | 1511 | 760 | 1518 |
| 104.866 | | | | | | |
| VOYSOD1miR- | 1729 | 1503 | 1766 | 1511 | 767 | 1518 |
| 109.870 | | | | | | |
| VOYSOD1miR- | 1730 | 1503 | 1768 | 1511 | 758 | 1518 |
| 109.823 | | | | | | |
| VOYSOD1miR- | 1731 | 1503 | 1774 | 1510 | 762 | 1519 |
| 114.860 | | | | | | |
| VOYSOD1miR- | 1737 | 1503 | 1775 | 1510 | 764 | 1519 |
| 114.861 | | | | | | |
| VOYSOD1miR- | 1733 | 1503 | 1776 | 1510 | 760 | 1519 |
| 114.866 | | | | | | |
| VOYSOD1miR- | 1734 | 1503 | 1777 | 1510 | 767 | 1519 |
| 114.870 | | | | | | |
| VOYSOD1miR- | 1735 | 1503 | 1778 | 1510 | 758 | 1519 |
| 114.823 | | | | | | |
| VOYSOD1miR- | 1736 | 1503 | 1769 | 1510 | 762 | 1519 |
| 116.860 | | | | | | |
| VOYSOD1miR- | 1737 | 1503 | 1770 | 1510 | 764 | 1519 |
| 116.861 | | | | | | |
| VOYSOD1miR- | 1738 | 1503 | 1779 | 1510 | 760 | 1519 |
| 116.866 | | | | | | |
| VOYSOD1miR- | 1739 | 1503 | 1772 | 1510 | 767 | 1519 |
| 116.870 | | | | | | |
| VOYSOD1miR- | 1740 | 1503 | 1773 | 1510 | 758 | 1519 |
| 116.823 | | | | | | |
| VOYSOD1miR- | 1741 | 1504 | 1780 | 1512 | 762 | 1520 |
| 127.860 | | | | | | |
| VOYSOD1miR- | 1749 | 1504 | 1763 | 1512 | 764 | 1520 |
| 127.861 | | | | | | |
| VOYSOD1miR- | 1743 | 1504 | 1765 | 1512 | 760 | 1520 |
| 127.866 | | | | | | |
| VOYSOD1miR- | 1744 | 1504 | 1766 | 1512 | 767 | 1520 |
| 127.870 | | | | | | |
| VOYSOD1miR- | 1745 | 1504 | 1781 | 1512 | 758 | 1520 |
| 127.823 | | | | | | |

TABLE 16
SODI Modulatory Polynucleotide Sequence Region (5′ to 3′)

| | 5′ | 5′ | | | | |
|---|---|---|---|---|---|---|
| | Flanking to | Flanking | Passenger | Loop | Guide | 3′ Flanking |
| | 3′ flanking | SEQ ID | SEQ ID | SEQ ID | SEQ ID | SEQ ID |
| Name | SEQ ID NO | NO | NO | NO | NO | NO |
| VOYSOD1miR- | 1784 | 1782 | 1785 | 1511 | 1786 | 1783 |
| 120 | | | | | | |

### AAV Particles Comprising Modulatory Polynucleotides

[0684] In one embodiment, the AAV particle comprises a viral genome with a payload region comprising a modulatory polynucleotide sequences. In such an embodiment, a viral genome encoding more than one polypeptide may be replicated and packaged into a viral particle. A target cell transduced with a viral particle comprising a modulatory polynucleotide may express the encoded sense and/or antisense sequences in a single cell.

[0685] In some embodiments, the AAV particles are useful in the field of medicine for the treatment, prophylaxis, palliation or amelioration of neurological diseases and/or disorders.

[0686] In one embodiment, the AAV particles comprising modulatory polynucleotide sequence which comprises a nucleic acid sequence encoding at least one siRNA molecule may be introduced into mammalian cells.

[0687] Where the AAV particle payload region comprises a modulatory polynucleotide, the modulatory polynucleotide may comprise sense and/or antisense sequences to knock down a target gene. The AAV viral genomes encoding modulatory polynucleotides described herein may be useful in the fields of human disease, viruses, infections veterinary applications and a variety of in vivo and in vitro settings.

[0688] In one embodiment, the AAV particle viral genome may comprise at least one inverted terminal repeat (ITR) region. The ITR region(s) may, independently, have a length such as, but not limited to, 75, 76, 77, 78, 79, 80, 81, 82, 83, 84, 85, 86, 87, 88, 89, 90, 91, 92, 93, 94, 95, 96, 97, 98, 99, 100, 101, 102, 103, 104, 105, 106, 107, 108, 109, 110, 111, 112, 113, 114, 115, 116, 117, 118, 119, 120, 121, 122, 123, 124, 125, 126, 127, 128, 129, 130, 131, 132, 133, 134, 135, 136, 137, 138, 139, 140, 141, 142, 143, 144, 145, 146, 147, 148, 149, 150, 151, 152, 153, 154, 155, 156, 157, 158, 159, 160, 161, 162, 163, 164, 165, 166, 167, 168, 169, 170, 171, 172, 173, 174, and 175 nucleotides. The length of the ITR region for the viral genome may be 75-80, 75-85, 75-100, 80-85, 80-90, 80-105, 85-90, 85-95, 85-110, 90-95, 90-100, 90-115, 95-100, 95-105, 95-120, 100-105, 100-110, 100-125, 105-110, 105-115, 105-130, 110-115, 110-120, 110-135, 115-120, 115-125, 115-140, 120-125, 120-130, 120-145, 125-130, 125-135, 125-150, 130-135, 130-140, 130-155, 135-140, 135-145, 135-160, 140-145, 140-150, 140-165, 145-150, 145-155, 145-170, 150-155, 150-160, 150-175, 155-160, 155-165, 160-165, 160-170, 165-170, 165-175, and 170-175 nucleotides. As a non-limiting example, the viral genome comprises an ITR that is about 105 nucleotides in length. As a non-limiting example, the viral genome comprises an ITR that is about 141 nucleotides in length. As a non-limiting example, the viral genome comprises an ITR that is about 130 nucleotides in length.

[0689] In one embodiment, the AAV particle viral genome may comprises two inverted terminal repeat (ITR) regions. Each of the ITR regions may independently have a length such as, but not limited to, 75, 76, 77, 78, 79, 80, 81, 82, 83, 84, 85, 86, 87, 88, 89, 90, 91, 92, 93, 94, 95, 96, 97, 98, 99, 100, 101, 102, 103, 104, 105, 106, 107, 108, 109, 110, 111, 112, 113, 114, 115, 116, 117, 118, 119, 120, 121, 122, 123, 124, 125, 126, 127, 128, 129, 130, 131, 132, 133, 134, 135, 136, 137, 138, 139, 140, 141, 142, 143, 144, 145, 146, 147, 148, 149, 150, 151, 152, 153, 154, 155, 156, 157, 158, 159, 160, 161, 162, 163, 164, 165, 166, 167, 168, 169, 170, 171, 172, 173, 174, and 175 nucleotides. The length of the ITR regions for the viral genome may be 75-80, 75-85, 75-100, 80-85, 80-90, 80-105, 85-90, 85-95, 85-110, 90-95, 90-100, 90-115, 95-100, 95-105, 95-120, 100-105, 100-110, 100-125, 105-110, 105-115, 105-130, 110-115, 110-120, 110-135, 115-120, 115-125, 115-140, 120-125, 120-130, 120-145, 125-130, 125-135, 125-150, 130-135, 130-140, 130-155, 135-140, 135-145, 135-160, 140-145, 140-150, 140-165, 145-150, 145-155, 145-170, 150-155, 150-160, 150-175, 155-160, 155-165, 160-165, 160-170, 165-170, 165-175, and 170-175 nucleotides. As a non-limiting example, the viral genome comprises an ITR that is about 105 nucleotides in length and 141 nucleotides in length. As a non-limiting example, the viral genome comprises an ITR that is about 105 nucleotides in length and 130 nucleotides in length. As a non-limiting example, the viral genome comprises an ITR that is about 130 nucleotides in length and 141 nucleotides in length.

[0690] In one embodiment, the AAV particle viral genome may comprise at least one sequence region as described in Tables 17-24. The regions may be located before or after any of the other sequence regions described herein.

[0691] In one embodiment, the AAV particle viral genome comprises at least one inverted terminal repeat (ITR) sequence region. Non-limiting examples of ITR sequence regions are described in Table 17.

TABLE 17
Inverted Terminal Repeat (ITR) Sequence Regions

| Sequence Region Name | SEQ ID NO |
|---|---|
| ITR1 | 1787 |
| ITR2 | 1788 |
| ITR3 | 1789 |
| ITR4 | 1790 |

[0692] In one embodiment, the AAV particle viral genome comprises two ITR sequence regions. In one embodiment, the ITR sequence regions are the ITR1 sequence region and the ITR3 sequence region. In one embodiment, the ITR sequence regions are the ITR1 sequence region and the ITR4 sequence region. In one embodiment, the ITR sequence regions are the ITR2 sequence region and the ITR3 sequence region. In one embodiment, the ITR sequence regions are the ITR2 sequence region and the ITR4 sequence region.

[0693] In one embodiment, the AAV particle viral genome may comprise at least one multiple cloning site (MCS) sequence region. The MCS region(s) may, independently, have a length such as, but not limited to, 2, 3, 4, 5, 6, 7, 8, 9, 10, 11, 12, 13, 14, 15, 16, 17, 18, 19, 20, 21, 22, 23, 24, 25, 26, 27, 28, 29, 30, 31, 32, 33, 34, 35, 36, 37, 38, 39, 40, 41, 42, 43, 44, 45, 46, 47, 48, 49, 50, 51, 52, 53, 54, 55, 56, 57, 58, 59, 60, 61, 62, 63, 64, 65, 66, 67, 68, 69, 70, 71, 72, 73, 74, 75, 76, 77, 78, 79, 80, 81, 82, 83, 84, 85, 86, 87, 88, 89, 90, 91, 92, 93, 94, 95, 96, 97, 98, 99, 100, 101, 102, 103, 104, 105, 106, 107, 108, 109, 110, 111, 112, 113, 114, 115, 116, 117, 118, 119, 120, 121, 122, 123, 124, 125, 126, 127, 128, 129, 130, 131, 132, 133, 134, 135, 136, 137, 138, 139, 140, 141, 142, 143, 144, 145, 146, 147, 148, 149, and 150 nucleotides. The length of the MCS region for the viral genome may be 2-10, 5-10, 5-15, 10-20, 10-30, 10-40, 15-20, 15-25, 20-30, 20-40, 20-50, 25-30, 25-35, 30-40, 30-50, 30-60, 35-40, 35-45, 40-50, 40-60, 40-70, 45-50, 45-55, 50-60, 50-70, 50-80, 55-60, 55-65, 60-70, 60-80, 60-90, 65-70, 65-75, 70-80, 70-90, 70-100, 75-80, 75-85, 80-90, 80-100, 80-110, 85-90, 85-95, 90-100, 90-110, 90-120, 95-100, 95-105, 100-110, 100-120, 100-130, 105-110, 105-115, 110-120, 110-130, 110-140, 115-120, 115-125, 120-130, 120-140, 120-150, 125-130, 125-135, 130-140, 130-150, 135-140, 135-145, 140-150, and 145-150 nucleotides. As a non-limiting example, the viral genome comprises a MCS region that is about 5 nucleotides in length. As a non-limiting example, the viral genome comprises a MCS region that is about 10 nucleotides in length. As a non-limiting example, the viral genome comprises a MCS region that is about 14 nucleotides in length. As a non-limiting example, the viral genome comprises a MCS region that is about 18 nucleotides in length. As a non-limiting example, the viral genome comprises a MCS region that is about 73 nucleotides in length. As a non-limiting example, the viral genome comprises a MCS region that is about 121 nucleotides in length.

[0694] In one embodiment, the AAV particle viral genome comprises at least one multiple cloning site (MCS) sequence regions. Non-limiting examples of MCS sequence regions are described in Table 18.

TABLE 18
Multiple Cloning Site (MCS) Sequence Regions

| Sequence Region | SEQ ID NO or |
|---|---|
| Name | Sequence |
| MCS1 | 1791 |
| MCS2 | 1792 |
| MCS3 | 1793 |
| MCS4 | 1794 |
| MCS5 | TCGAG |
| MCS6 | 1795 |

[0695] In one embodiment, the AAV particle viral genome comprises one MCS sequence region. In one embodiment, the MCS sequence region is the MCS1 sequence region. In one embodiment, the MCS sequence region is the MCS2 sequence region. In one embodiment, the MCS sequence region is the MCS3 sequence region. In one embodiment, the MCS sequence region is the MCS4 sequence region. In one embodiment, the MCS sequence region is the MCS5 sequence region. In one embodiment, the MCS sequence region is the MCS6 sequence region.

[0696] In one embodiment, the AAV particle viral genome comprises two MCS sequence regions. In one embodiment, the two MCS sequence regions are the MCS1 sequence region and the MCS2 sequence region. In one embodiment, the two MCS sequence regions are the MCS1 sequence region and the MCS3 sequence region. In one embodiment, the two MCS sequence regions are the MCS1 sequence region and the MCS4 sequence region. In one embodiment, the two MCS sequence regions are the MCS1 sequence region and the MCS5 sequence region. In one embodiment, the two MCS sequence regions are the MCS1 sequence region and the MCS6 sequence region. In one embodiment, the two MCS sequence regions are the MCS2 sequence region and the MCS3 sequence region. In one embodiment, the two MCS sequence regions are the MCS2 sequence region and the MCS4 sequence region. In one embodiment, the two MCS sequence regions are the MCS2 sequence region and the MCS5 sequence region. In one embodiment, the two MCS sequence regions are the MCS2 sequence region and the MCS6 sequence region. In one embodiment, the two MCS sequence regions are the MCS3 sequence region and the MCS4 sequence region. In one embodiment, the two MCS sequence regions are the MCS3 sequence region and the MCS5 sequence region. In one embodiment, the two MCS sequence regions are the MCS3 sequence region and the MCS6 sequence region. In one embodiment, the two MCS sequence regions are the MCS4 sequence region and the MCS5 sequence region. In one embodiment, the two MCS sequence regions are the MCS4 sequence region and the MCS6 sequence region. In one embodiment, the two MCS sequence regions are the MCS5 sequence region and the MCS6 sequence region.

[0697] In one embodiment, the AAV particle viral genome comprises two or more MCS sequence regions.

[0698] In one embodiment, the AAV particle viral genome comprises three MCS sequence regions. In one embodiment, the three MCS sequence regions are the MCS1 sequence region, the MCS2 sequence region, and the MCS3 sequence region. In one embodiment, the three MCS sequence regions are the MCS1 sequence region, the MCS2 sequence region, and the MCS4 sequence region. In one embodiment, the three MCS sequence regions are the MCS1 sequence region, the MCS2 sequence region, and the MCS5 sequence region. In one embodiment, the three MCS sequence regions are the MCS1 sequence region, the MCS2 sequence region, and the MCS6 sequence region. In one embodiment, the three MCS sequence regions are the MCS1 sequence region, the MCS3 sequence region, and the MCS4 sequence region. In one embodiment, the three MCS sequence regions are the MCS1 sequence region, the MCS3 sequence region, and the MCS5 sequence region. In one embodiment, the three MCS sequence regions are the MCS1 sequence region, the MCS3 sequence region, and the MCS6 sequence region. In one embodiment, the three MCS sequence regions are the MCS1 sequence region, the MCS4 sequence region, and the MCS5 sequence region. In one embodiment, the three MCS sequence regions are the MCS1 sequence region, the MCS4 sequence region, and the MCS6 sequence region. In one embodiment, the three MCS sequence regions are the MCS1 sequence region, the MCS5 sequence region, and the MCS6 sequence region. In one embodiment, the three MCS sequence regions are the MCS2 sequence region, the MCS3 sequence region, and the MCS4 sequence region. In one embodiment, the three MCS sequence regions are the MCS2 sequence region, the MCS3 sequence region, and the MCS5 sequence region. In one embodiment, the three MCS sequence regions are the MCS2 sequence region, the MCS3 sequence region, and the MCS6 sequence region. In one embodiment, the three MCS sequence regions are the MCS2 sequence region, the MCS4 sequence region, and the MCS5 sequence region. In one embodiment, the three MCS sequence regions are the MCS2 sequence region, the MCS4 sequence region, and the MCS6 sequence region. In one embodiment, the three MCS sequence regions are the MCS2 sequence region, the MCS5 sequence region, and the MCS6 sequence region. In one embodiment, the three MCS sequence regions are the MCS3 sequence region, the MCS4 sequence region, and the MCS5 sequence region. In one embodiment, the three MCS sequence regions are the MCS3 sequence region, the MCS4 sequence region, and the MCS6 sequence region. In one embodiment, the three MCS sequence regions are the MCS3 sequence region, the MCS5 sequence region, and the MCS6 sequence region. In one embodiment, the three MCS sequence regions are the MCS4 sequence region, the MCS5 sequence region, and the MCS6 sequence region.

[0699] In one embodiment, the AAV particle viral genome may comprise at least one multiple filler sequence region. The filler region(s) may, independently, have a length such as, but not limited to, 50, 51, 52, 53, 54, 55, 56, 57, 58, 59, 60, 61, 62, 63, 64, 65, 66, 67, 68, 69, 70, 71, 72, 73, 74, 75, 76, 77, 78, 79, 80, 81, 82, 83, 84, 85, 86, 87, 88, 89, 90, 91, 92, 93, 94, 95, 96, 97, 98, 99, 100, 101, 102, 103, 104, 105, 106, 107, 108, 109, 110, 111, 112, 113, 114, 115, 116, 117, 118, 119, 120, 121, 122, 123, 124, 125, 126, 127, 128, 129, 130, 131, 132, 133, 134, 135, 136, 137, 138, 139, 140, 141, 142, 143, 144, 145, 146, 147, 148, 149, 150, 151, 152, 153, 154, 155, 156, 157, 158, 159, 160, 161, 162, 163, 164, 165, 166, 167, 168, 169, 170, 171, 172, 173, 174, 175, 176, 177, 178, 179, 180, 181, 182, 183, 184, 185, 186, 187, 188, 189, 190, 191, 192, 193, 194, 195, 196, 197, 198, 199, 200, 201, 202, 203, 204, 205, 206, 207, 208, 209, 210, 211, 212, 213, 214, 215, 216, 217, 218, 219, 220, 221, 222, 223, 224, 225, 226, 227, 228, 229, 230, 231, 232, 233, 234, 235, 236, 237, 238, 239, 240, 241, 242, 243, 244, 245, 246, 247, 248, 249, 250, 251, 252, 253, 254, 255, 256, 257, 258, 259, 260, 261, 262, 263, 264, 265, 266, 267, 268, 269, 270, 271, 272, 273, 274, 275, 276, 277, 278, 279, 280, 281, 282, 283, 284, 285, 286, 287, 288, 289, 290, 291, 292, 293, 294, 295, 296, 297, 298, 299, 300, 301, 302, 303, 304, 305, 306, 307, 308, 309, 310, 311, 312, 313, 314, 315, 316, 317, 318, 319, 320, 321, 322, 323, 324, 325, 326, 327, 328, 329, 330, 331, 332, 333, 334, 335, 336, 337, 338, 339, 340, 341, 342, 343, 344, 345, 346, 347, 348, 349, 350, 351, 352, 353, 354, 355, 356, 357, 358, 359, 360, 361, 362, 363, 364, 365, 366, 367, 368, 369, 370, 371, 372, 373, 374, 375, 376, 377, 378, 379, 380, 381, 382, 383, 384, 385, 386, 387, 388, 389, 390, 391, 392, 393, 394, 395, 396, 397, 398, 399, 400, 401, 402, 403, 404, 405, 406, 407, 408, 409, 410, 411, 412, 413, 414, 415, 416, 417, 418, 419, 420, 421, 422, 423, 424, 425, 426, 427, 428, 429, 430, 431, 432, 433, 434, 435, 436, 437, 438, 439, 440, 441, 442, 443, 444, 445, 446, 447, 448, 449, 450, 451, 452, 453, 454, 455, 456, 457, 458, 459, 460, 461, 462, 463, 464, 465, 466, 467, 468, 469, 470, 471, 472, 473, 474, 475, 476, 477, 478, 479, 480, 481, 482, 483, 484, 485, 486, 487, 488, 489, 490, 491, 492, 493, 494, 495, 496, 497, 498, 499, 500, 501, 502, 503, 504, 505, 506, 507, 508, 509, 510, 511, 512, 513, 514, 515, 516, 517, 518, 519, 520, 521, 522, 523, 524, 525, 526, 527, 528, 529, 530, 531, 532, 533, 534, 535, 536, 537, 538, 539, 540, 541, 542, 543, 544, 545, 546, 547, 548, 549, 550, 551, 552, 553, 554, 555, 556, 557, 558, 559, 560, 561, 562, 563, 564, 565, 566, 567, 568, 569, 570, 571, 572, 573, 574, 575, 576, 577, 578, 579, 580, 581, 582, 583, 584, 585, 586, 587, 588, 589, 590, 591, 592, 593, 594, 595, 596, 597, 598, 599, 600, 601, 602, 603, 604, 605, 606, 607, 608, 609, 610, 611, 612, 613, 614, 615, 616, 617, 618, 619, 620, 621, 622, 623, 624, 625, 626, 627, 628, 629, 630, 631, 632, 633, 634, 635, 636, 637, 638, 639, 640, 641, 642, 643, 644, 645, 646, 647, 648, 649, 650, 651, 652, 653, 654, 655, 656, 657, 658, 659, 660, 661, 662, 663, 664, 665, 666, 667, 668, 669, 670, 671, 672, 673, 674, 675, 676, 677, 678, 679, 680, 681, 682, 683, 684, 685, 686, 687, 688, 689, 690, 691, 692, 693, 694, 695, 696, 697, 698, 699, 700, 701, 702, 703, 704, 705, 706, 707, 708, 709, 710, 711, 712, 713, 714, 715, 716, 717, 718, 719, 720, 721, 722, 723, 724, 725, 726, 727, 728, 729, 730, 731, 732, 733, 734, 735, 736, 737, 738, 739, 740, 741, 742, 743, 744, 745, 746, 747, 748, 749, 750, 751, 752, 753, 754, 755, 756, 757, 758, 759, 760, 761, 762, 763, 764, 765, 766, 767, 768, 769, 770, 771, 772, 773, 774, 775, 776, 777, 778, 779, 780, 781, 782, 783, 784, 785, 786, 787, 788, 789, 790, 791, 792, 793, 794, 795, 796, 797, 798, 799, 800, 801, 802, 803, 804, 805, 806, 807, 808, 809, 810, 811, 812, 813, 814, 815, 816, 817, 818, 819, 820, 821, 822, 823, 824, 825, 826, 827, 828, 829, 830, 831, 832, 833, 834, 835, 836, 837, 838, 839, 840, 841, 842, 843, 844, 845, 846, 847, 848, 849, 850, 851, 852, 853, 854, 855, 856, 857, 858, 859, 860, 861, 862, 863, 864, 865, 866, 867, 868, 869, 870, 871, 872, 873, 874, 875, 876, 877, 878, 879, 880, 881, 882, 883, 884, 885, 886, 887, 888, 889, 890, 891, 892, 893, 894, 895, 896, 897, 898, 899, 900, 901, 902, 903, 904, 905, 906, 907, 908, 909, 910, 911, 912, 913, 914, 915, 916, 917, 918, 919, 920, 921, 922, 923, 924, 925, 926, 927, 928, 929, 930, 931, 932, 933, 934, 935, 936, 937, 938, 939, 940, 941, 942, 943944, 945, 946, 947, 948, 949, 950, 951, 952, 953, 954, 955, 956, 957, 958, 959, 960, 961, 962, 963, 964, 965, 966, 967, 968, 969, 970, 971, 972, 973, 974, 975, 976, 977, 978, 979, 980, 981, 982, 983, 984, 985, 986, 987, 988, 989, 990, 991, 992, 993, 994, 995, 996, 997, 998, 999, 1000, 1001, 1002, 1003, 1004, 1005, 1006, 1007, 1008, 1009, 1010, 1011, 1012, 1013, 1014, 1015, 1016, 1017, 1018, 1019, 1020, 1021, 1022, 1023, 1024, 1025, 1026, 1027, 1028, 1029, 1030, 1031, 1032, 1033, 1034, 1035, 1036, 1037, 1038, 1039, 1040, 1041, 1042, 1043, 1044, 1045, 1046, 1047, 1048, 1049, 1050, 1051, 1052, 1053, 1054, 1055, 1056, 1057, 1058, 1059, 1060, 1061, 1062, 1063, 1064, 1065, 1066, 1067, 1068, 1069, 1070, 1071, 1072, 1073, 1074, 1075, 1076, 1077, 1078, 1079, 1080, 1081, 1082, 1083, 1084, 1085, 1086, 1087, 1088, 1089, 1090, 1091, 1092, 1093, 1094, 1095, 1096, 1097, 1098, 1099, 1100, 1101, 1102, 1103, 1104, 1105, 1106, 1107, 1108, 1109, 1110, 1111, 1112, 1113, 1114, 1115, 1116, 1117, 1118, 1119, 1120, 1121, 1122, 1123, 1124, 1125, 1126, 1127, 1128, 1129, 1130, 1131, 1132, 1133, 1134, 1135, 1136, 1137, 1138, 1139, 1140, 1141, 1142, 1143, 1144, 1145, 1146, 1147, 1148, 1149, 1150, 1151, 1152, 1153, 1154, 1155, 1156, 1157, 1158, 1159, 1160, 1161, 1162, 1163, 1164, 1165, 1166, 1167, 1168, 1169, 1170, 1171, 1172, 1173, 1174, 1175, 1176, 1177, 1178, 1179, 1180, 1181, 1182, 1183, 1184, 1185, 1186, 1187, 1188, 1189, 1190, 1191, 1192, 1193, 1194, 1195, 1196, 1197, 1198, 1199, 1200, 1201, 1202, 1203, 1204, 1205, 1206, 1207, 1208, 1209, 1210, 1211, 1212, 1213, 1214, 1215, 1216, 1217, 1218, 1219, 1220, 1221, 1222, 1223, 1224, 1225, 1226, 1227, 1228, 1229, 1230, 1231, 1232, 1233, 1234, 1235, 1236, 1237, 1238, 1239, 1240, 1241, 1242, 1243, 1244, 1245, 1246, 1247, 1248, 1249, 1250, 1251, 1252, 1253, 1254, 1255, 1256, 1257, 1258, 1259, 1260, 1261, 1262, 1263, 1264, 1265, 1266, 1267, 1268, 1269, 1270, 1271, 1272, 1273, 1274, 1275, 1276, 1277, 1278, 1279, 1280, 1281, 1282, 1283, 1284, 1285, 1286, 1287, 1288, 1289, 1290, 1291, 1292, 1293, 1294, 1295, 1296, 1297, 1298, 1299, 1300, 1301, 1302, 1303, 1304, 1305, 1306, 1307, 1308, 1309, 1310, 1311, 1312, 1313, 1314, 1315, 1316, 1317, 1318, 1319, 1320, 1321, 1322, 1323, 1324, 1325, 1326, 1327, 1328, 1329, 1330, 1331, 1332, 1333, 1334, 1335, 1336, 1337, 1338, 1339, 1340, 1341, 1342, 1343, 1344, 1345, 1346, 1347, 1348, 1349, 1350, 1351, 1352, 1353, 1354, 1355, 1356, 1357, 1358, 1359, 1360, 1361, 1362, 1363, 1364, 1365, 1366, 1367, 1368, 1369, 1370, 1371, 1372, 1373, 1374, 1375, 1376, 1377, 1378, 1379, 1380, 1381, 1382, 1383, 1384, 1385, 1386, 1387, 1388, 1389, 1390, 1391, 1392, 1393, 1394, 1395, 1396, 1397, 1398, 1399, 1400, 1401, 1402, 1403, 1404, 1405, 1406, 1407, 1408, 1409, 1410, 1411, 1412, 1413, 1414, 1415, 1416, 1417, 1418, 1419, 1420, 1421, 1422, 1423, 1424, 1425, 1426, 1427, 1428, 1429, 1430, 1431, 1432, 1433, 1434, 1435, 1436, 1437, 1438, 1439, 1440, 1441, 1442, 1443, 1444, 1445, 1446, 1447, 1448, 1449, 1450, 1451, 1452, 1453, 1454, 1455, 1456, 1457, 1458, 1459, 1460, 1461, 1462, 1463, 1464, 1465, 1466, 1467, 1468, 1469, 1470, 1471, 1472, 1473, 1474, 1475, 1476, 1477, 1478, 1479, 1480, 1481, 1482, 1483, 1484, 1485, 1486, 1487, 1488, 1489, 1490, 1491, 1492, 1493, 1494, 1495, 1496, 1497, 1498, 1499, 1500, 1501, 1502, 1503, 1504, 1505, 1506, 1507, 1508, 1509, 1510, 1511, 1512, 1513, 1514, 1515, 1516, 1517, 1518, 1519, 1520, 1521, 1522, 1523, 1524, 1525, 1526, 1527, 1528, 1529, 1530, 1531, 1532, 1533, 1534, 1535, 1536, 1537, 1538, 1539, 1540, 1541, 1542, 1543, 1544, 1545, 1546, 1547, 1548, 1549, 1550, 1551, 1552, 1553, 1554, 1555, 1556, 1557, 1558, 1559, 1560, 1561, 1562, 1563, 1564, 1565, 1566, 1567, 1568, 1569, 1570, 1571, 1572, 1573, 1574, 1575, 1576, 1577, 1578, 1579, 1580, 1581, 1582, 1583, 1584, 1585, 1586, 1587, 1588, 1589, 1590, 1591, 1592, 1593, 1594, 1595, 1596, 1597, 1598, 1599, 1600, 1601, 1602, 1603, 1604, 1605, 1606, 1607, 1608, 1609, 1610, 1611, 1612, 1613, 1614, 1615, 1616, 1617, 1618, 1619, 1620, 1621, 1622, 1623, 1624, 1625, 1626, 1627, 1628, 1629, 1630, 1631, 1632, 1633, 1634, 1635, 1636, 1637, 1638, 1639, 1640, 1641, 1642, 1643, 1644, 1645, 1646, 1647, 1648, 1649, 1650, 1651, 1652, 1653, 1654, 1655, 1656, 1657, 1658, 1659, 1660, 1661, 1662, 1663, 1664, 1665, 1666, 1667, 1668, 1669, 1670, 1671, 1672, 1673, 1674, 1675, 1676, 1677, 1678, 1679, 1680, 1681, 1682, 1683, 1684, 1685, 1686, 1687, 1688, 1689, 1690, 1691, 1692, 1693, 1694, 1695, 1696, 1697, 1698, 1699, 1700, 1701, 1702, 1703, 1704, 1705, 1706, 1707, 1708, 1709, 1710, 1711, 1712, 1713, 1714, 1715, 1716, 1717, 1718, 1719, 1720, 1721, 1722, 1723, 1724, 1725, 1726, 1727, 1728, 1729, 1730, 1731, 1732, 1733, 1734, 1735, 1736, 1737, 1738, 1739, 1740, 1741, 1742, 1743, 1744, 1745, 1746, 1747, 1748, 1749, 1750, 1751, 1752, 1753, 1754, 1755, 1756, 1757, 1758, 1759, 1760, 1761, 1762, 1763, 1764, 1765, 1766, 1767, 1768, 1769, 1770, 1771, 1772, 1773, 1774, 1775, 1776, 1777, 1778, 1779, 1780, 1781, 1782, 1783, 1784, 1785, 1786, 1787, 1788, 1789, 1790, 1791, 1792, 1793, 1794, 1795, 1796, 1797, 1798, 1799, 1800, 1801, 1802, 1803, 1804, 1805, 1806, 1807, 1808, 1809, 1810, 1811, 1812, 1813, 1814, 1815, 1816, 1817, 1818, 1819, 1820, 1821, 1822, 1823, 1824, 1825, 1826, 1827, 1828, 1829, 1830, 1831, 1832, 1833, 1834, 1835, 1836, 1837, 1838, 1839, 1840, 1841, 1842, 1843, 1844, 1845, 1846, 1847, 1848, 1849, 1850, 1851, 1852, 1853, 1854, 1855, 1856, 1857, 1858, 1859, 1860, 1861, 1862, 1863, 1864, 1865, 1866, 1867, 1868, 1869, 1870, 1871, 1872, 1873, 1874, 1875, 1876, 1877, 1878, 1879, 1880, 1881, 1882, 1883, 1884, 1885, 1886, 1887, 1888, 1889, 1890, 1891, 1892, 1893, 1894, 1895, 1896, 1897, 1898, 1899, 1900, 1901, 1902, 1903, 1904, 1905, 1906, 1907, 1908, 1909, 1910, 1911, 1912, 1913, 1914, 1915, 1916, 1917, 1918, 1919, 1920, 1921, 1922, 1923, 1924, 1925, 1926, 1927, 1928, 1929, 1930, 1931, 1932, 1933, 1934, 1935, 1936, 1937, 1938, 1939, 1940, 1941, 1942, 1943, 1944, 1945, 1946, 1947, 1948, 1949, 1950, 1951, 1952, 1953, 1954, 1955, 1956, 1957, 1958, 1959, 1960, 1961, 1962, 1963, 1964, 1965, 1966, 1967, 1968, 1969, 1970, 1971, 1972, 1973, 1974, 1975, 1976, 1977, 1978, 1979, 1980, 1981, 1982, 1983, 1984, 1985, 1986, 1987, 1988, 1989, 1990, 1991, 1992, 1993, 1994, 1995, 1996, 1997, 1998, 1999, 2000, 2001, 2002, 2003, 2004, 2005, 2006, 2007, 2008, 2009, 2010, 2011, 2012, 2013, 2014, 2015, 2016, 2017, 2018, 2019, 2020, 2021, 2022, 2023, 2024, 2025, 2026, 2027, 2028, 2029, 2030, 2031, 2032, 2033, 2034, 2035, 2036, 2037, 2038, 2039, 2040, 2041, 2042, 2043, 2044, 2045, 2046, 2047, 2048, 2049, 2050, 2051, 2052, 2053, 2054, 2055, 2056, 2057, 2058, 2059, 2060, 2061, 2062, 2063, 2064, 2065, 2066, 2067, 2068, 2069, 2070, 2071, 2072, 2073, 2074, 2075, 2076, 2077, 2078, 2079, 2080, 2081, 2082, 2083, 2084, 2085, 2086, 2087, 2088, 2089, 2090, 2091, 2092, 2093, 2094, 2095, 2096, 2097, 2098, 2099, 2100, 2101, 2102, 2103, 2104, 2105, 2106, 2107, 2108, 2109, 2110, 2111, 2112, 2113, 2114, 2115, 2116, 2117, 2118, 2119, 2120, 2121, 2122, 2123, 2124, 2125, 2126, 2127, 2128, 2129, 2130, 2131, 2132, 2133, 2134, 2135, 2136, 2137, 2138, 2139, 2140, 2141, 2142, 2143, 2144, 2145, 2146, 2147, 2148, 2149, 2150, 2151, 2152, 2153, 2154, 2155, 2156, 2157, 2158, 2159, 2160, 2161, 2162, 2163, 2164, 2165, 2166, 2167, 2168, 2169, 2170, 2171, 2172, 2173, 2174, 2175, 2176, 2177, 2178, 2179, 2180, 2181, 2182, 2183, 2184, 2185, 2186, 2187, 2188, 2189, 2190, 2191, 2192, 2193, 2194, 2195, 2196, 2197, 2198, 2199, 2200, 2201, 2202, 2203, 2204, 2205, 2206, 2207, 2208, 2209, 2210, 2211, 2212, 2213, 2214, 2215, 2216, 2217, 2218, 2219, 2220, 2221, 2222, 2223, 2224, 2225, 2226, 2227, 2228, 2229, 2230, 2231, 2232, 2233, 2234, 2235, 2236, 2237, 2238, 2239, 2240, 2241, 2242, 2243, 2244, 2245, 2246, 2247, 2248, 2249, 2250, 2251, 2252, 2253, 2254, 2255, 2256, 2257, 2258, 2259, 2260, 2261, 2262, 2263, 2264, 2265, 2266, 2267, 2268, 2269, 2270, 2271, 2272, 2273, 2274, 2275, 2276, 2277, 2278, 2279, 2280, 2281, 2282, 2283, 2284, 2285, 2286, 2287, 2288, 2289, 2290, 2291, 2292, 2293, 2294, 2295, 2296, 2297, 2298, 2299, 2300, 2301, 2302, 2303, 2304, 2305, 2306, 2307, 2308, 2309, 2310, 2311, 2312, 2313, 2314, 2315, 2316, 2317, 2318, 2319, 2320, 2321, 2322, 2323, 2324, 2325, 2326, 2327, 2328, 2329, 2330, 2331, 2332, 2333, 2334, 2335, 2336, 2337, 2338, 2339, 2340, 2341, 2342, 2343, 2344, 2345, 2346, 2347, 2348, 2349, 2350, 2351, 2352, 2353, 2354, 2355, 2356, 2357, 2358, 2359, 2360, 2361, 2362, 2363, 2364, 2365, 2366, 2367, 2368, 2369, 2370, 2371, 2372, 2373, 2374, 2375, 2376, 2377, 2378, 2379, 2380, 2381, 2382, 2383, 2384, 2385, 2386, 2387, 2388, 2389, 2390, 2391, 2392, 2393, 2394, 2395, 2396, 2397, 2398, 2399, 2400, 2401, 2402, 2403, 2404, 2405, 2406, 2407, 2408, 2409, 2410, 2411, 2412, 2413, 2414, 2415, 2416, 2417, 2418, 2419, 2420, 2421, 2422, 2423, 2424, 2425, 2426, 2427, 2428, 2429, 2430, 2431, 2432, 2433, 2434, 2435, 2436, 2437, 2438, 2439, 2440, 2441, 2442, 2443, 2444, 2445, 2446, 2447, 2448, 2449, 2450, 2451, 2452, 2453, 2454, 2455, 2456, 2457, 2458, 2459, 2460, 2461, 2462, 2463, 2464, 2465, 2466, 2467, 2468, 2469, 2470, 2471, 2472, 2473, 2474, 2475, 2476, 2477, 2478, 2479, 2480, 2481, 2482, 2483, 2484, 2485, 2486, 2487, 2488, 2489, 2490, 2491, 2492, 2493, 2494, 2495, 2496, 2497, 2498, 2499, 2500, 2501, 2502, 2503, 2504, 2505, 2506, 2507, 2508, 2509, 2510, 2511, 2512, 2513, 2514, 2515, 2516, 2517, 2518, 2519, 2520, 2521, 2522, 2523, 2524, 2525, 2526, 2527, 2528, 2529, 2530, 2531, 2532, 2533, 2534, 2535, 2536, 2537, 2538, 2539, 2540, 2541, 2542, 2543, 2544, 2545, 2546, 2547, 2548, 2549, 2550, 2551, 2552, 2553, 2554, 2555, 2556, 2557, 2558, 2559, 2560, 2561, 2562, 2563, 2564, 2565, 2566, 2567, 2568, 2569, 2570, 2571, 2572, 2573, 2574, 2575, 2576, 2577, 2578, 2579, 2580, 2581, 2582, 2583, 2584, 2585, 2586, 2587, 2588, 2589, 2590, 2591, 2592, 2593, 2594, 2595, 2596, 2597, 2598, 2599, 2600, 2601, 2602, 2603, 2604, 2605, 2606, 2607, 2608, 2609, 2610, 2611, 2612, 2613, 2614, 2615, 2616, 2617, 2618, 2619, 2620, 2621, 2622, 2623, 2624, 2625, 2626, 2627, 2628, 2629, 2630, 2631, 2632, 2633, 2634, 2635, 2636, 2637, 2638, 2639, 2640, 2641, 2642, 2643, 2644, 2645, 2646, 2647, 2648, 2649, 2650, 2651, 2652, 2653, 2654, 2655, 2656, 2657, 2658, 2659, 2660, 2661, 2662, 2663, 2664, 2665, 2666, 2667, 2668, 2669, 2670, 2671, 2672, 2673, 2674, 2675, 2676, 2677, 2678, 2679, 2680, 2681, 2682, 2683, 2684, 2685, 2686, 2687, 2688, 2689, 2690, 2691, 2692, 2693, 2694, 2695, 2696, 2697, 2698, 2699, 2700, 2701, 2702, 2703, 2704, 2705, 2706, 2707, 2708, 2709, 2710, 2711, 2712, 2713, 2714, 2715, 2716, 2717, 2718, 2719, 2720, 2721, 2722, 2723, 2724, 2725, 2726, 2727, 2728, 2729, 2730, 2731, 2732, 2733, 2734, 2735, 2736, 2737, 2738, 2739, 2740, 2741, 2742, 2743, 2744, 2745, 2746, 2747, 2748, 2749, 2750, 2751, 2752, 2753, 2754, 2755, 2756, 2757, 2758, 2759, 2760, 2761, 2762, 2763, 2764, 2765, 2766, 2767, 2768, 2769, 2770, 2771, 2772, 2773, 2774, 2775, 2776, 2777, 2778, 2779, 2780, 2781, 2782, 2783, 2784, 2785, 2786, 2787, 2788, 2789, 2790, 2791, 2792, 2793, 2794, 2795, 2796, 2797, 2798, 2799, 2800, 2801, 2802, 2803, 2804, 2805, 2806, 2807, 2808, 2809, 2810, 2811, 2812, 2813, 2814, 2815, 2816, 2817, 2818, 2819, 2820, 2821, 2822, 2823, 2824, 2825, 2826, 2827, 2828, 2829, 2830, 2831, 2832, 2833, 2834, 2835, 2836, 2837, 2838, 2839, 2840, 2841, 2842, 2843, 2844, 2845, 2846, 2847, 2848, 2849, 2850, 2851, 2852, 2853, 2854, 2855, 2856, 2857, 2858, 2859, 2860, 2861, 2862, 2863, 2864, 2865, 2866, 2867, 2868, 2869, 2870, 2871, 2872, 2873, 2874, 2875, 2876, 2877, 2878, 2879, 2880, 2881, 2882, 2883, 2884, 2885, 2886, 2887, 2888, 2889, 2890, 2891, 2892, 2893, 2894, 2895, 2896, 2897, 2898, 2899, 2900, 2901, 2902, 2903, 2904, 2905, 2906, 2907, 2908, 2909, 2910, 2911, 2912, 2913, 2914, 2915, 2916, 2917, 2918, 2919, 2920, 2921, 2922, 2923, 2924, 2925, 2926, 2927, 2928, 2929, 2930, 2931, 2932, 2933, 2934, 2935, 2936, 2937, 2938, 2939, 2940, 2941, 2942, 2943, 2944, 2945, 2946, 2947, 2948, 2949, 2950, 2951, 2952, 2953, 2954, 2955, 2956, 2957, 2958, 2959, 2960, 2961, 2962, 2963, 2964, 2965, 2966, 2967, 2968, 2969, 2970, 2971, 2972, 2973, 2974, 2975, 2976, 2977, 2978, 2979, 2980, 2981, 2982, 2983, 2984, 2985, 2986, 2987, 2988, 2989, 2990, 2991, 2992, 2993, 2994, 2995, 2996, 2997, 2998, 2999, 3000, 3001, 3002, 3003, 3004, 3005, 3006, 3007, 3008, 3009, 3010, 3011, 3012, 3013, 3014, 3015, 3016, 3017, 3018, 3019, 3020, 3021, 3022, 3023, 3024, 3025, 3026, 3027, 3028, 3029, 3030, 3031, 3032, 3033, 3034, 3035, 3036, 3037, 3038, 3039, 3040, 3041, 3042, 3043, 3044, 3045, 3046, 3047, 3048, 3049, 3050, 3051, 3052, 3053, 3054, 3055, 3056, 3057, 3058, 3059, 3060, 3061, 3062, 3063, 3064, 3065, 3066, 3067, 3068, 3069, 3070, 3071, 3072, 3073, 3074, 3075, 3076, 3077, 3078, 3079, 3080, 3081, 3082, 3083, 3084, 3085, 3086, 3087, 3088, 3089, 3090, 3091, 3092, 3093, 3094, 3095, 3096, 3097, 3098, 3099, 3100, 3101, 3102, 3103, 3104, 3105, 3106, 3107, 3108, 3109, 3110, 3111, 3112, 3113, 3114, 3115, 3116, 3117, 3118, 3119, 3120, 3121, 3122, 3123, 3124, 3125, 3126, 3127, 3128, 3129, 3130, 3131, 3132, 3133, 3134, 3135, 3136, 3137, 3138, 3139, 3140, 3141, 3142, 3143, 3144, 3145, 3146, 3147, 3148, 3149, 3150, 3151, 3152, 3153, 3154, 3155, 3156, 3157, 3158, 3159, 3160, 3161, 3162, 3163, 3164, 3165, 3166, 3167, 3168, 3169, 3170, 3171, 3172, 3173, 3174, 3175, 3176, 3177, 3178, 3179, 3180, 3181, 3182, 3183, 3184, 3185, 3186, 3187, 3188, 3189, 3190, 3191, 3192, 3193, 3194, 3195, 3196, 3197, 3198, 3199, 3200, 3201, 3202, 3203, 3204, 3205, 3206, 3207, 3208, 3209, 3210, 3211, 3212, 3213, 3214, 3215, 3216, 3217, 3218, 3219, 3220, 3221, 3222, 3223, 3224, 3225, 3226, 3227, 3228, 3229, 3230, 3231, 3232, 3233, 3234, 3235, 3236, 3237, 3238, 3239, 3240, 3241, 3242, 3243, 3244, 3245, 3246, 3247, 3248, 3249, and 3250 nucleotides. The length of any filler region for the viral genome may be 50-100, 100-150, 150-200, 200-250, 250-300, 300-350, 350-400, 400-450, 450-500, 500-550, 550-600, 600-650, 650-700, 700-750, 750-800, 800-850, 850-900, 900-950, 950-1000, 1000-1050, 1050-1100, 1100-1150, 1150-1200, 1200-1250, 1250-1300, 1300-1350, 1350-1400, 1400-1450, 1450-1500, 1500-1550, 1550-1600, 1600-1650, 1650-1700, 1700-1750, 1750-1800, 1800-1850, 1850-1900, 1900-1950, 1950-2000, 2000-2050, 2050-2100, 2100-2150, 2150-2200, 2200-2250, 2250-2300, 2300-2350, 2350-2400, 2400-2450, 2450-2500, 2500-2550, 2550-2600, 2600-2650, 2650-2700, 2700-2750, 2750-2800, 2800-2850, 2850-2900, 2900-2950, 2950-3000, 3000-3050, 3050-3100, 3100-3150, 3150-3200, and 3200-3250 nucleotides. As a non-limiting example, the viral genome comprises a filler region that is about 55 nucleotides in length. As a non-limiting example, the viral genome comprises a filler region that is about 56 nucleotides in length. As a non-limiting example, the viral genome comprises a filler region that is about 97 nucleotides in length. As a non-limiting example, the viral genome comprises a filler region that is about 103 nucleotides in length. As a non-limiting example, the viral genome comprises a filler region that is about 105 nucleotides in length. As a non-limiting example, the viral genome comprises a filler region that is about 357 nucleotides in length. As a non-limiting example, the viral genome comprises a filler region that is about 363 nucleotides in length. As a non-limiting example, the viral genome comprises a filler region that is about 712 nucleotides in length. As a non-limiting example, the viral genome comprises a filler region that is about 714 nucleotides in length. As a non-limiting example, the viral genome comprises a filler region that is about 1203 nucleotides in length. As a non-limiting example, the viral genome comprises a filler region that is about 1209 nucleotides in length. As a non-limiting example, the viral genome comprises a filler region that is about 1512 nucleotides in length. As a non-limiting example, the viral genome comprises a filler region that is about 1519 nucleotides in length. As a non-limiting example, the viral genome comprises a filler region that is about 2395 nucleotides in length. As a non-limiting example, the viral genome comprises a filler region that is about 2403 nucleotides in length. As a non-limiting example, the viral genome comprises a filler region that is about 2405 nucleotides in length. As a non-limiting example, the viral genome comprises a filler region that is about 3013 nucleotides in length. As a non-limiting example, the viral genome comprises a filler region that is about 3021 nucleotides in length.

[0700] In one embodiment, the AAV particle viral genome may comprise at least one multiple filler sequence region. The filler region(s) may, independently, have a length such as, but not limited to, 50, 51, 52, 53, 54, 55, 56, 57, 58, 59, 60, 61, 62, 63, 64, 65, 66, 67, 68, 69, 70, 71, 72, 73, 74, 75, 76, 77, 78, 79, 80, 81, 82, 83, 84, 85, 86, 87, 88, 89, 90, 91, 92, 93, 94, 95, 96, 97, 98, 99, 100, 101, 102, 103, 104, 105, 106, 107, 108, 109, 110, 111, 112, 113, 114, 115, 116, 117, 118, 119, 120, 121, 122, 123, 124, 125, 126, 127, 128, 129, 130, 131, 132, 133, 134, 135, 136, 137, 138, 139, 140, 141, 142, 143, 144, 145, 146, 147, 148, 149, 150, 151, 152, 153, 154, 155, 156, 157, 158, 159, 160, 161, 162, 163, 164, 165, 166, 167, 168, 169, 170, 171, 172, 173, 174, 175, 176, 177, 178, 179, 180, 181, 182, 183, 184, 185, 186, 187, 188, 189, 190, 191, 192, 193, 194, 195, 196, 197, 198, 199, 200, 201, 202, 203, 204, 205, 206, 207, 208, 209, 210, 211, 212, 213, 214, 215, 216, 217, 218, 219, 220, 221, 222, 223, 224, 225, 226, 227, 228, 229, 230, 231, 232, 233, 234, 235, 236, 237, 238, 239, 240, 241, 242, 243, 244, 245, 246, 247, 248, 249, 250, 251, 252, 253, 254, 255, 256, 257, 258, 259, 260, 261, 262, 263, 264, 265, 266, 267, 268, 269, 270, 271, 272, 273, 274, 275, 276, 277, 278, 279, 280, 281, 282, 283, 284, 285, 286, 287, 288, 289, 290, 291, 292, 293, 294, 295, 296, 297, 298, 299, 300, 301, 302, 303, 304, 305, 306, 307, 308, 309, 310, 311, 312, 313, 314, 315, 316, 317, 318, 319, 320, 321, 322, 323, 324, 325, 326, 327, 328, 329, 330, 331, 332, 333, 334, 335, 336, 337, 338, 339, 340, 341, 342, 343, 344, 345, 346, 347, 348, 349, 350, 351, 352, 353, 354, 355, 356, 357, 358, 359, 360, 361, 362, 363, 364, 365, 366, 367, 368, 369, 370, 371, 372, 373, 374, 375, 376, 377, 378, 379, 380, 381, 382, 383, 384, 385, 386, 387, 388, 389, 390, 391, 392, 393, 394, 395, 396, 397, 398, 399, 400, 401, 402, 403, 404, 405, 406, 407, 408, 409, 410, 411, 412, 413, 414, 415, 416, 417, 418, 419, 420, 421, 422, 423, 424, 425, 426, 427, 428, 429, 430, 431, 432, 433, 434, 435, 436, 437, 438, 439, 440, 441, 442, 443, 444, 445, 446, 447, 448, 449, 450, 451, 452, 453, 454, 455, 456, 457, 458, 459, 460, 461, 462, 463, 464, 465, 466, 467, 468, 469, 470, 471, 472, 473, 474, 475, 476, 477, 478, 479, 480, 481, 482, 483, 484, 485, 486, 487, 488, 489, 490, 491, 492, 493, 494, 495, 496, 497, 498, 499, 500, 501, 502, 503, 504, 505, 506, 507, 508, 509, 510, 511, 512, 513, 514, 515, 516, 517, 518, 519, 520, 521, 522, 523, 524, 525, 526, 527, 528, 529, 530, 531, 532, 533, 534, 535, 536, 537, 538, 539, 540, 541, 542, 543, 544, 545, 546, 547, 548, 549, 550, 551, 552, 553, 554, 555, 556, 557, 558, 559, 560, 561, 562, 563, 564, 565, 566, 567, 568, 569, 570, 571, 572, 573, 574, 575, 576, 577, 578, 579, 580, 581, 582, 583, 584, 585, 586, 587, 588, 589, 590, 591, 592, 593, 594, 595, 596, 597, 598, 599, 600, 601, 602, 603, 604, 605, 606, 607, 608, 609, 610, 611, 612, 613, 614, 615, 616, 617, 618, 619, 620, 621, 622, 623, 624, 625, 626, 627, 628, 629, 630, 631, 632, 633, 634, 635, 636, 637, 638, 639, 640, 641, 642, 643, 644, 645, 646, 647, 648, 649, 650, 651, 652, 653, 654, 655, 656, 657, 658, 659, 660, 661, 662, 663, 664, 665, 666, 667, 668, 669, 670, 671, 672, 673, 674, 675, 676, 677, 678, 679, 680, 681, 682, 683, 684, 685, 686, 687, 688, 689, 690, 691, 692, 693, 694, 695, 696, 697, 698, 699, 700, 701, 702, 703, 704, 705, 706, 707, 708, 709, 710, 711, 712, 713, 714, 715, 716, 717, 718, 719, 720, 721, 722, 723, 724, 725, 726, 727, 728, 729, 730, 731, 732, 733, 734, 735, 736, 737, 738, 739, 740, 741, 742, 743, 744, 745, 746, 747, 748, 749, 750, 751, 752, 753, 754, 755, 756, 757, 758, 759, 760, 761, 762, 763, 764, 765, 766, 767, 768, 769, 770, 771, 772, 773, 774, 775, 776, 777, 778, 779, 780, 781, 782, 783, 784, 785, 786, 787, 788, 789, 790, 791, 792, 793, 794, 795, 796, 797, 798, 799, 800, 801, 802, 803, 804, 805, 806, 807, 808, 809, 810, 811, 812, 813, 814, 815, 816, 817, 818, 819, 820, 821, 822, 823, 824, 825, 826, 827, 828, 829, 830, 831, 832, 833, 834, 835, 836, 837, 838, 839, 840, 841, 842, 843, 844, 845, 846, 847, 848, 849, 850, 851, 852, 853, 854, 855, 856, 857, 858, 859, 860, 861, 862, 863, 864, 865, 866, 867, 868, 869, 870, 871, 872, 873, 874, 875, 876, 877, 878, 879, 880, 881, 882, 883, 884, 885, 886, 887, 888, 889, 890, 891, 892, 893, 894, 895, 896, 897, 898, 899, 900, 901, 902, 903, 904, 905, 906, 907, 908, 909, 910, 911, 912, 913, 914, 915, 916, 917, 918, 919, 920, 921, 922, 923, 924, 925, 926, 927, 928, 929, 930, 931, 932, 933, 934, 935, 936, 937, 938, 939, 940, 941, 942, 943944, 945, 946, 947, 948, 949, 950, 951, 952, 953, 954, 955, 956, 957, 958, 959, 960, 961, 962, 963, 964, 965, 966, 967, 968, 969, 970, 971, 972, 973, 974, 975, 976, 977, 978, 979, 980, 981, 982, 983, 984, 985, 986, 987, 988, 989, 990, 991, 992, 993, 994, 995, 996, 997, 998, 999, 1000, 1001, 1002, 1003, 1004, 1005, 1006, 1007, 1008, 1009, 1010, 1011, 1012, 1013, 1014, 1015, 1016, 1017, 1018, 1019, 1020, 1021, 1022, 1023, 1024, 1025, 1026, 1027, 1028, 1029, 1030, 1031, 1032, 1033, 1034, 1035, 1036, 1037, 1038, 1039, 1040, 1041, 1042, 1043, 1044, 1045, 1046, 1047, 1048, 1049, 1050, 1051, 1052, 1053, 1054, 1055, 1056, 1057, 1058, 1059, 1060, 1061, 1062, 1063, 1064, 1065, 1066, 1067, 1068, 1069, 1070, 1071, 1072, 1073, 1074, 1075, 1076, 1077, 1078, 1079, 1080, 1081, 1082, 1083, 1084, 1085, 1086, 1087, 1088, 1089, 1090, 1091, 1092, 1093, 1094, 1095, 1096, 1097, 1098, 1099, 1100, 1101, 1102, 1103, 1104, 1105, 1106, 1107, 1108, 1109, 1110, 1111, 1112, 1113, 1114, 1115, 1116, 1117, 1118, 1119, 1120, 1121, 1122, 1123, 1124, 1125, 1126, 1127, 1128, 1129, 1130, 1131, 1132, 1133, 1134, 1135, 1136, 1137, 1138, 1139, 1140, 1141, 1142, 1143, 1144, 1145, 1146, 1147, 1148, 1149, 1150, 1151, 1152, 1153, 1154, 1155, 1156, 1157, 1158, 1159, 1160, 1161, 1162, 1163, 1164, 1165, 1166, 1167, 1168, 1169, 1170, 1171, 1172, 1173, 1174, 1175, 1176, 1177, 1178, 1179, 1180, 1181, 1182, 1183, 1184, 1185, 1186, 1187, 1188, 1189, 1190, 1191, 1192, 1193, 1194, 1195, 1196, 1197, 1198, 1199, 1200, 1201, 1202, 1203, 1204, 1205, 1206, 1207, 1208, 1209, 1210, 1211, 1212, 1213, 1214, 1215, 1216, 1217, 1218, 1219, 1220, 1221, 1222, 1223, 1224, 1225, 1226, 1227, 1228, 1229, 1230, 1231, 1232, 1233, 1234, 1235, 1236, 1237, 1238, 1239, 1240, 1241, 1242, 1243, 1244, 1245, 1246, 1247, 1248, 1249, 1250, 1251, 1252, 1253, 1254, 1255, 1256, 1257, 1258, 1259, 1260, 1261, 1262, 1263, 1264, 1265, 1266, 1267, 1268, 1269, 1270, 1271, 1272, 1273, 1274, 1275, 1276, 1277, 1278, 1279, 1280, 1281, 1282, 1283, 1284, 1285, 1286, 1287, 1288, 1289, 1290, 1291, 1292, 1293, 1294, 1295, 1296, 1297, 1298, 1299, 1300, 1301, 1302, 1303, 1304, 1305, 1306, 1307, 1308, 1309, 1310, 1311, 1312, 1313, 1314, 1315, 1316, 1317, 1318, 1319, 1320, 1321, 1322, 1323, 1324, 1325, 1326, 1327, 1328, 1329, 1330, 1331, 1332, 1333, 1334, 1335, 1336, 1337, 1338, 1339, 1340, 1341, 1342, 1343, 1344, 1345, 1346, 1347, 1348, 1349, 1350, 1351, 1352, 1353, 1354, 1355, 1356, 1357, 1358, 1359, 1360, 1361, 1362, 1363, 1364, 1365, 1366, 1367, 1368, 1369, 1370, 1371, 1372, 1373, 1374, 1375, 1376, 1377, 1378, 1379, 1380, 1381, 1382, 1383, 1384, 1385, 1386, 1387, 1388, 1389, 1390, 1391, 1392, 1393, 1394, 1395, 1396, 1397, 1398, 1399, 1400, 1401, 1402, 1403, 1404, 1405, 1406, 1407, 1408, 1409, 1410, 1411, 1412, 1413, 1414, 1415, 1416, 1417, 1418, 1419, 1420, 1421, 1422, 1423, 1424, 1425, 1426, 1427, 1428, 1429, 1430, 1431, 1432, 1433, 1434, 1435, 1436, 1437, 1438, 1439, 1440, 1441, 1442, 1443, 1444, 1445, 1446, 1447, 1448, 1449, 1450, 1451, 1452, 1453, 1454, 1455, 1456, 1457, 1458, 1459, 1460, 1461, 1462, 1463, 1464, 1465, 1466, 1467, 1468, 1469, 1470, 1471, 1472, 1473, 1474, 1475, 1476, 1477, 1478, 1479, 1480, 1481, 1482, 1483, 1484, 1485, 1486, 1487, 1488, 1489, 1490, 1491, 1492, 1493, 1494, 1495, 1496, 1497, 1498, 1499, 1500, 1501, 1502, 1503, 1504, 1505, 1506, 1507, 1508, 1509, 1510, 1511, 1512, 1513, 1514, 1515, 1516, 1517, 1518, 1519, 1520, 1521, 1522, 1523, 1524, 1525, 1526, 1527, 1528, 1529, 1530, 1531, 1532, 1533, 1534, 1535, 1536, 1537, 1538, 1539, 1540, 1541, 1542, 1543, 1544, 1545, 1546, 1547, 1548, 1549, 1550, 1551, 1552, 1553, 1554, 1555, 1556, 1557, 1558, 1559, 1560, 1561, 1562, 1563, 1564, 1565, 1566, 1567, 1568, 1569, 1570, 1571, 1572, 1573, 1574, 1575, 1576, 1577, 1578, 1579, 1580, 1581, 1582, 1583, 1584, 1585, 1586, 1587, 1588, 1589, 1590, 1591, 1592, 1593, 1594, 1595, 1596, 1597, 1598, 1599, 1600, 1601, 1602, 1603, 1604, 1605, 1606, 1607, 1608, 1609, 1610, 1611, 1612, 1613, 1614, 1615, 1616, 1617, 1618, 1619, 1620, 1621, 1622, 1623, 1624, 1625, 1626, 1627, 1628, 1629, 1630, 1631, 1632, 1633, 1634, 1635, 1636, 1637, 1638, 1639, 1640, 1641, 1642, 1643, 1644, 1645, 1646, 1647, 1648, 1649, 1650, 1651, 1652, 1653, 1654, 1655, 1656, 1657, 1658, 1659, 1660, 1661, 1662, 1663, 1664, 1665, 1666, 1667, 1668, 1669, 1670, 1671, 1672, 1673, 1674, 1675, 1676, 1677, 1678, 1679, 1680, 1681, 1682, 1683, 1684, 1685, 1686, 1687, 1688, 1689, 1690, 1691, 1692, 1693, 1694, 1695, 1696, 1697, 1698, 1699, 1700, 1701, 1702, 1703, 1704, 1705, 1706, 1707, 1708, 1709, 1710, 1711, 1712, 1713, 1714, 1715, 1716, 1717, 1718, 1719, 1720, 1721, 1722, 1723, 1724, 1725, 1726, 1727, 1728, 1729, 1730, 1731, 1732, 1733, 1734, 1735, 1736, 1737, 1738, 1739, 1740, 1741, 1742, 1743, 1744, 1745, 1746, 1747, 1748, 1749, 1750, 1751, 1752, 1753, 1754, 1755, 1756, 1757, 1758, 1759, 1760, 1761, 1762, 1763, 1764, 1765, 1766, 1767, 1768, 1769, 1770, 1771, 1772, 1773, 1774, 1775, 1776, 1777, 1778, 1779, 1780, 1781, 1782, 1783, 1784, 1785, 1786, 1787, 1788, 1789, 1790, 1791, 1792, 1793, 1794, 1795, 1796, 1797, 1798, 1799, 1800, 1801, 1802, 1803, 1804, 1805, 1806, 1807, 1808, 1809, 1810, 1811, 1812, 1813, 1814, 1815, 1816, 1817, 1818, 1819, 1820, 1821, 1822, 1823, 1824, 1825, 1826, 1827, 1828, 1829, 1830, 1831, 1832, 1833, 1834, 1835, 1836, 1837, 1838, 1839, 1840, 1841, 1842, 1843, 1844, 1845, 1846, 1847, 1848, 1849, 1850, 1851, 1852, 1853, 1854, 1855, 1856, 1857, 1858, 1859, 1860, 1861, 1862, 1863, 1864, 1865, 1866, 1867, 1868, 1869, 1870, 1871, 1872, 1873, 1874, 1875, 1876, 1877, 1878, 1879, 1880, 1881, 1882, 1883, 1884, 1885, 1886, 1887, 1888, 1889, 1890, 1891, 1892, 1893, 1894, 1895, 1896, 1897, 1898, 1899, 1900, 1901, 1902, 1903, 1904, 1905, 1906, 1907, 1908, 1909, 1910, 1911, 1912, 1913, 1914, 1915, 1916, 1917, 1918, 1919, 1920, 1921, 1922, 1923, 1924, 1925, 1926, 1927, 1928, 1929, 1930, 1931, 1932, 1933, 1934, 1935, 1936, 1937, 1938, 1939, 1940, 1941, 1942, 1943, 1944, 1945, 1946, 1947, 1948, 1949, 1950, 1951, 1952, 1953, 1954, 1955, 1956, 1957, 1958, 1959, 1960, 1961, 1962, 1963, 1964, 1965, 1966, 1967, 1968, 1969, 1970, 1971, 1972, 1973, 1974, 1975, 1976, 1977, 1978, 1979, 1980, 1981, 1982, 1983, 1984, 1985, 1986, 1987, 1988, 1989, 1990, 1991, 1992, 1993, 1994, 1995, 1996, 1997, 1998, 1999, 2000, 2001, 2002, 2003, 2004, 2005, 2006, 2007, 2008, 2009, 2010, 2011, 2012, 2013, 2014, 2015, 2016, 2017, 2018, 2019, 2020, 2021, 2022, 2023, 2024, 2025, 2026, 2027, 2028, 2029, 2030, 2031, 2032, 2033, 2034, 2035, 2036, 2037, 2038, 2039, 2040, 2041, 2042, 2043, 2044, 2045, 2046, 2047, 2048, 2049, 2050, 2051, 2052, 2053, 2054, 2055, 2056, 2057, 2058, 2059, 2060, 2061, 2062, 2063, 2064, 2065, 2066, 2067, 2068, 2069, 2070, 2071, 2072, 2073, 2074, 2075, 2076, 2077, 2078, 2079, 2080, 2081, 2082, 2083, 2084, 2085, 2086, 2087, 2088, 2089, 2090, 2091, 2092, 2093, 2094, 2095, 2096, 2097, 2098, 2099, 2100, 2101, 2102, 2103, 2104, 2105, 2106, 2107, 2108, 2109, 2110, 2111, 2112, 2113, 2114, 2115, 2116, 2117, 2118, 2119, 2120, 2121, 2122, 2123, 2124, 2125, 2126, 2127, 2128, 2129, 2130, 2131, 2132, 2133, 2134, 2135, 2136, 2137, 2138, 2139, 2140, 2141, 2142, 2143, 2144, 2145, 2146, 2147, 2148, 2149, 2150, 2151, 2152, 2153, 2154, 2155, 2156, 2157, 2158, 2159, 2160, 2161, 2162, 2163, 2164, 2165, 2166, 2167, 2168, 2169, 2170, 2171, 2172, 2173, 2174, 2175, 2176, 2177, 2178, 2179, 2180, 2181, 2182, 2183, 2184, 2185, 2186, 2187, 2188, 2189, 2190, 2191, 2192, 2193, 2194, 2195, 2196, 2197, 2198, 2199, 2200, 2201, 2202, 2203, 2204, 2205, 2206, 2207, 2208, 2209, 2210, 2211, 2212, 2213, 2214, 2215, 2216, 2217, 2218, 2219, 2220, 2221, 2222, 2223, 2224, 2225, 2226, 2227, 2228, 2229, 2230, 2231, 2232, 2233, 2234, 2235, 2236, 2237, 2238, 2239, 2240, 2241, 2242, 2243, 2244, 2245, 2246, 2247, 2248, 2249, 2250, 2251, 2252, 2253, 2254, 2255, 2256, 2257, 2258, 2259, 2260, 2261, 2262, 2263, 2264, 2265, 2266, 2267, 2268, 2269, 2270, 2271, 2272, 2273, 2274, 2275, 2276, 2277, 2278, 2279, 2280, 2281, 2282, 2283, 2284, 2285, 2286, 2287, 2288, 2289, 2290, 2291, 2292, 2293, 2294, 2295, 2296, 2297, 2298, 2299, 2300, 2301, 2302, 2303, 2304, 2305, 2306, 2307, 2308, 2309, 2310, 2311, 2312, 2313, 2314, 2315, 2316, 2317, 2318, 2319, 2320, 2321, 2322, 2323, 2324, 2325, 2326, 2327, 2328, 2329, 2330, 2331, 2332, 2333, 2334, 2335, 2336, 2337, 2338, 2339, 2340, 2341, 2342, 2343, 2344, 2345, 2346, 2347, 2348, 2349, 2350, 2351, 2352, 2353, 2354, 2355, 2356, 2357, 2358, 2359, 2360, 2361, 2362, 2363, 2364, 2365, 2366, 2367, 2368, 2369, 2370, 2371, 2372, 2373, 2374, 2375, 2376, 2377, 2378, 2379, 2380, 2381, 2382, 2383, 2384, 2385, 2386, 2387, 2388, 2389, 2390, 2391, 2392, 2393, 2394, 2395, 2396, 2397, 2398, 2399, 2400, 2401, 2402, 2403, 2404, 2405, 2406, 2407, 2408, 2409, 2410, 2411, 2412, 2413, 2414, 2415, 2416, 2417, 2418, 2419, 2420, 2421, 2422, 2423, 2424, 2425, 2426, 2427, 2428, 2429, 2430, 2431, 2432, 2433, 2434, 2435, 2436, 2437, 2438, 2439, 2440, 2441, 2442, 2443, 2444, 2445, 2446, 2447, 2448, 2449, 2450, 2451, 2452, 2453, 2454, 2455, 2456, 2457, 2458, 2459, 2460, 2461, 2462, 2463, 2464, 2465, 2466, 2467, 2468, 2469, 2470, 2471, 2472, 2473, 2474, 2475, 2476, 2477, 2478, 2479, 2480, 2481, 2482, 2483, 2484, 2485, 2486, 2487, 2488, 2489, 2490, 2491, 2492, 2493, 2494, 2495, 2496, 2497, 2498, 2499, 2500, 2501, 2502, 2503, 2504, 2505, 2506, 2507, 2508, 2509, 2510, 2511, 2512, 2513, 2514, 2515, 2516, 2517, 2518, 2519, 2520, 2521, 2522, 2523, 2524, 2525, 2526, 2527, 2528, 2529, 2530, 2531, 2532, 2533, 2534, 2535, 2536, 2537, 2538, 2539, 2540, 2541, 2542, 2543, 2544, 2545, 2546, 2547, 2548, 2549, 2550, 2551, 2552, 2553, 2554, 2555, 2556, 2557, 2558, 2559, 2560, 2561, 2562, 2563, 2564, 2565, 2566, 2567, 2568, 2569, 2570, 2571, 2572, 2573, 2574, 2575, 2576, 2577, 2578, 2579, 2580, 2581, 2582, 2583, 2584, 2585, 2586, 2587, 2588, 2589, 2590, 2591, 2592, 2593, 2594, 2595, 2596, 2597, 2598, 2599, 2600, 2601, 2602, 2603, 2604, 2605, 2606, 2607, 2608, 2609, 2610, 2611, 2612, 2613, 2614, 2615, 2616, 2617, 2618, 2619, 2620, 2621, 2622, 2623, 2624, 2625, 2626, 2627, 2628, 2629, 2630, 2631, 2632, 2633, 2634, 2635, 2636, 2637, 2638, 2639, 2640, 2641, 2642, 2643, 2644, 2645, 2646, 2647, 2648, 2649, 2650, 2651, 2652, 2653, 2654, 2655, 2656, 2657, 2658, 2659, 2660, 2661, 2662, 2663, 2664, 2665, 2666, 2667, 2668, 2669, 2670, 2671, 2672, 2673, 2674, 2675, 2676, 2677, 2678, 2679, 2680, 2681, 2682, 2683, 2684, 2685, 2686, 2687, 2688, 2689, 2690, 2691, 2692, 2693, 2694, 2695, 2696, 2697, 2698, 2699, 2700, 2701, 2702, 2703, 2704, 2705, 2706, 2707, 2708, 2709, 2710, 2711, 2712, 2713, 2714, 2715, 2716, 2717, 2718, 2719, 2720, 2721, 2722, 2723, 2724, 2725, 2726, 2727, 2728, 2729, 2730, 2731, 2732, 2733, 2734, 2735, 2736, 2737, 2738, 2739, 2740, 2741, 2742, 2743, 2744, 2745, 2746, 2747, 2748, 2749, 2750, 2751, 2752, 2753, 2754, 2755, 2756, 2757, 2758, 2759, 2760, 2761, 2762, 2763, 2764, 2765, 2766, 2767, 2768, 2769, 2770, 2771, 2772, 2773, 2774, 2775, 2776, 2777, 2778, 2779, 2780, 2781, 2782, 2783, 2784, 2785, 2786, 2787, 2788, 2789, 2790, 2791, 2792, 2793, 2794, 2795, 2796, 2797, 2798, 2799, 2800, 2801, 2802, 2803, 2804, 2805, 2806, 2807, 2808, 2809, 2810, 2811, 2812, 2813, 2814, 2815, 2816, 2817, 2818, 2819, 2820, 2821, 2822, 2823, 2824, 2825, 2826, 2827, 2828, 2829, 2830, 2831, 2832, 2833, 2834, 2835, 2836, 2837, 2838, 2839, 2840, 2841, 2842, 2843, 2844, 2845, 2846, 2847, 2848, 2849, 2850, 2851, 2852, 2853, 2854, 2855, 2856, 2857, 2858, 2859, 2860, 2861, 2862, 2863, 2864, 2865, 2866, 2867, 2868, 2869, 2870, 2871, 2872, 2873, 2874, 2875, 2876, 2877, 2878, 2879, 2880, 2881, 2882, 2883, 2884, 2885, 2886, 2887, 2888, 2889, 2890, 2891, 2892, 2893, 2894, 2895, 2896, 2897, 2898, 2899, 2900, 2901, 2902, 2903, 2904, 2905, 2906, 2907, 2908, 2909, 2910, 2911, 2912, 2913, 2914, 2915, 2916, 2917, 2918, 2919, 2920, 2921, 2922, 2923, 2924, 2925, 2926, 2927, 2928, 2929, 2930, 2931, 2932, 2933, 2934, 2935, 2936, 2937, 2938, 2939, 2940, 2941, 2942, 2943, 2944, 2945, 2946, 2947, 2948, 2949, 2950, 2951, 2952, 2953, 2954, 2955, 2956, 2957, 2958, 2959, 2960, 2961, 2962, 2963, 2964, 2965, 2966, 2967, 2968, 2969, 2970, 2971, 2972, 2973, 2974, 2975, 2976, 2977, 2978, 2979, 2980, 2981, 2982, 2983, 2984, 2985, 2986, 2987, 2988, 2989, 2990, 2991, 2992, 2993, 2994, 2995, 2996, 2997, 2998, 2999, 3000, 3001, 3002, 3003, 3004, 3005, 3006, 3007, 3008, 3009, 3010, 3011, 3012, 3013, 3014, 3015, 3016, 3017, 3018, 3019, 3020, 3021, 3022, 3023, 3024, 3025, 3026, 3027, 3028, 3029, 3030, 3031, 3032, 3033, 3034, 3035, 3036, 3037, 3038, 3039, 3040, 3041, 3042, 3043, 3044, 3045, 3046, 3047, 3048, 3049, 3050, 3051, 3052, 3053, 3054, 3055, 3056, 3057, 3058, 3059, 3060, 3061, 3062, 3063, 3064, 3065, 3066, 3067, 3068, 3069, 3070, 3071, 3072, 3073, 3074, 3075, 3076, 3077, 3078, 3079, 3080, 3081, 3082, 3083, 3084, 3085, 3086, 3087, 3088, 3089, 3090, 3091, 3092, 3093, 3094, 3095, 3096, 3097, 3098, 3099, 3100, 3101, 3102, 3103, 3104, 3105, 3106, 3107, 3108, 3109, 3110, 3111, 3112, 3113, 3114, 3115, 3116, 3117, 3118, 3119, 3120, 3121, 3122, 3123, 3124, 3125, 3126, 3127, 3128, 3129, 3130, 3131, 3132, 3133, 3134, 3135, 3136, 3137, 3138, 3139, 3140, 3141, 3142, 3143, 3144, 3145, 3146, 3147, 3148, 3149, 3150, 3151, 3152, 3153, 3154, 3155, 3156, 3157, 3158, 3159, 3160, 3161, 3162, 3163, 3164, 3165, 3166, 3167, 3168, 3169, 3170, 3171, 3172, 3173, 3174, 3175, 3176, 3177, 3178, 3179, 3180, 3181, 3182, 3183, 3184, 3185, 3186, 3187, 3188, 3189, 3190, 3191, 3192, 3193, 3194, 3195, 3196, 3197, 3198, 3199, 3200, 3201, 3202, 3203, 3204, 3205, 3206, 3207, 3208, 3209, 3210, 3211, 3212, 3213, 3214, 3215, 3216, 3217, 3218, 3219, 3220, 3221, 3222, 3223, 3224, 3225, 3226, 3227, 3228, 3229, 3230, 3231, 3232, 3233, 3234, 3235, 3236, 3237, 3238, 3239, 3240, 3241, 3242, 3243, 3244, 3245, 3246, 3247, 3248, 3249, and 3250 nucleotides. The length of any filler region for the viral genome may be 50-100, 100-150, 150-200, 200-250, 250-300, 300-350, 350-400, 400-450, 450-500, 500-550, 550-600, 600-650, 650-700, 700-750, 750-800, 800-850, 850-900, 900-950, 950-1000, 1000-1050, 1050-1100, 1100-1150, 1150-1200, 1200-1250, 1250-1300, 1300-1350, 1350-1400, 1400-1450, 1450-1500, 1500-1550, 1550-1600, 1600-1650, 1650-1700, 1700-1750, 1750-1800, 1800-1850, 1850-1900, 1900-1950, 1950-2000, 2000-2050, 2050-2100, 2100-2150, 2150-2200, 2200-2250, 2250-2300, 2300-2350, 2350-2400, 2400-2450, 2450-2500, 2500-2550, 2550-2600, 2600-2650, 2650-2700, 2700-2750, 2750-2800, 2800-2850, 2850-2900, 2900-2950, 2950-3000, 3000-3050, 3050-3100, 3100-3150, 3150-3200, and 3200-3250 nucleotides. As a non-limiting example, the viral genome comprises a filler region that is about 55 nucleotides in length. As a non-limiting example, the viral genome comprises a filler region that is about 56 nucleotides in length. As a non-limiting example, the viral genome comprises a filler region that is about 97 nucleotides in length. As a non-limiting example, the viral genome comprises a filler region that is about 103 nucleotides in length. As a non-limiting example, the viral genome comprises a filler region that is about 105 nucleotides in length. As a non-limiting example, the viral genome comprises a filler region that is about 357 nucleotides in length. As a non-limiting example, the viral genome comprises a filler region that is about 363 nucleotides in length. As a non-limiting example, the viral genome comprises a filler region that is about 712 nucleotides in length. As a non-limiting example, the viral genome comprises a filler region that is about 714 nucleotides in length. As a non-limiting example, the viral genome comprises a filler region that is about 1203 nucleotides in length. As a non-limiting example, the viral genome comprises a filler region that is about 1209 nucleotides in length. As a non-limiting example, the viral genome comprises a filler region that is about 1512 nucleotides in length. As a non-limiting example, the viral genome comprises a filler region that is about 1519 nucleotides in length. As a non-limiting example, the viral genome comprises a filler region that is about 2395 nucleotides in length. As a non-limiting example, the viral genome comprises a filler region that is about 2403 nucleotides in length. As a non-limiting example, the viral genome comprises a filler region that is about 2405 nucleotides in length. As a non-limiting example, the viral genome comprises a filler region that is about 3013 nucleotides in length. As a non-limiting example, the viral genome comprises a filler region that is about 3021 nucleotides in length.

[0701] In one embodiment, the AAV particle viral genome comprises at least one filler sequence regions. Non-limiting examples of filler sequence regions are described in Table 19.

TABLE 19
Filler Sequence Regions

| Sequence Region Name | SEQ ID NO |
|---|---|
| FILL1 | 1796 |
| FILL2 | 1797 |
| FILL3 | 1798 |
| FILL4 | 1799 |
| FILL5 | 1800 |
| FILL6 | 1801 |
| FILL7 | 1802 |
| FILLS | 1803 |
| FILL9 | 1804 |
| FILL10 | 1805 |
| FILL11 | 1806 |
| FILL12 | 1807 |
| FILL13 | 1808 |
| FILL14 | 1809 |
| FILL15 | 1810 |
| FILL16 | 1811 |
| FILL17 | 1812 |
| FILL18 | 1813 |

[0702] In one embodiment, the AAV particle viral genome comprises one filler sequence region. In one embodiment, the filler sequence region is the FILL1 sequence region. In one embodiment, the filler sequence region is the FILL2 sequence region. In one embodiment, the filler sequence region is the FILL3 sequence region. In one embodiment, the filler sequence region is the FILL4 sequence region. In one embodiment, the filler sequence region is the FILL5 sequence region. In one embodiment, the filler sequence region is the FILL6 sequence region. In one embodiment, the filler sequence region is the FILL7 sequence region. In one embodiment, the filler sequence region is the FILL8 sequence region. In one embodiment the filler sequence region is the FILL9 sequence region. In one embodiment, the filler sequence region is the FILL10 sequence region. In one embodiment, the filler sequence region is the FILL11 sequence region. In one embodiment, the filler sequence region is the FILL12 sequence region. In one embodiment, the filler sequence region is the FILL13 sequence region. In one embodiment, the filler sequence region is the FILL14 sequence region. In one embodiment, the filler sequence region is the FILL15 sequence region. In one embodiment, the filler sequence region is the FILL16 sequence region. In one embodiment, the filler sequence region is the FILL17 sequence region. In one embodiment, the filler sequence region is the FILL18 sequence region.

[0703] In one embodiment, the AAV particle viral genome comprises two filler sequence regions. In one embodiment, the two filler sequence regions are the FILL1 sequence region, and the FILL2 sequence region. In one embodiment, the filler sequence region is the FILL1 sequence region, and the FILL3 sequence region. In one embodiment, the filler sequence region is the FILL sequence region, and the FILL4 sequence region. In one embodiment, the filler sequence region is the FILL1 sequence region, and the FILL5 sequence region. In one embodiment, the filler sequence region is the FILL1 sequence region, and the FILL6 sequence region. In one embodiment, the filler sequence region is the FILL sequence region, and the FILL7 sequence region. In one embodiment the filler sequence region is the FILL1 sequence region, and the FILL8 sequence region. In one embodiment, the filler sequence region is the FILL1 sequence region, and the FILL9 sequence region. In one embodiment, the filler sequence region is the FILL1 sequence region, and the FILL10 sequence region. In one embodiment, the filler sequence region is the FILL1 sequence region, and the FILL11 sequence region. In one embodiment, the filler sequence region is the FILL1 sequence region, and the FILL12 sequence region. In one embodiment, the filler sequence region is the FILL sequence region, and the FILL13 sequence region. In one embodiment, the filler sequence region is the FILL1 sequence region, and the FILL14 sequence region. In one embodiment, the filler sequence region is the FILL1 sequence region, and the FILL15 sequence region. In one embodiment, the filler sequence region is the FILL1 sequence region, and the FILL16 sequence region. In one embodiment the filler sequence region is the FILL1 sequence region, and the FILL17 sequence region. In one embodiment, the filler sequence region is the FILL1 sequence region, and the FILL18 sequence region. In one embodiment, the filler sequence region is the FILL2 sequence region, and the FILL3 sequence region. In one embodiment, the filler sequence region is the FILL3 sequence region, and the FILL4 sequence region. In one embodiment, the filler sequence region is the FILL3 sequence region, and the FILL5 sequence region. In one embodiment, the filler sequence region is the FILL3 sequence region, and the FILL6 sequence region. In one embodiment, the filler sequence region is the FILL3 sequence region, and the FILL7 sequence region. In one embodiment, the filler sequence region is the FILL3 sequence region, and the FILL8 sequence region. In one embodiment, the filler sequence region is the FILL3 sequence region, and the FILL9 sequence region. In one embodiment, the filler sequence region is the FILL3 sequence region, and the FILL10 sequence region. In one embodiment, the filler sequence region is the FILL3 sequence region, and the FILL11 sequence region. In one embodiment, the filler sequence region is the FILL3 sequence region, and the FILL12 sequence region. In one embodiment, the filler sequence region is the FILL3 sequence region, and the FILL13 sequence region. In one embodiment, the filler sequence region is the FILL3 sequence region, and the FILL14 sequence region. In one embodiment, the filler sequence region is the FILL3 sequence region, and the FILL15 sequence region. In one embodiment, the filler sequence region is the FILL3 sequence region, and the FILL16 sequence region. In one embodiment, the filler sequence region is the FILL3 sequence region, and the FILL17 sequence region. In one embodiment, the filler sequence region is the FILL3 sequence region, and the FILL18 sequence region. In one embodiment, the filler sequence region is the FILL4 sequence region, and the FILL5 sequence region. In one embodiment, the filler sequence region is the FILL4 sequence region, and the FILL6 sequence region. In one embodiment, the filler sequence region is the FILL4 sequence region, and the FILL7 sequence region. In one embodiment, the filler sequence region is the FILL4 sequence region, and the FILL8 sequence region. In one embodiment, the filler sequence region is the FILL4 sequence region, and the FILL9 sequence region. In one embodiment, the filler sequence region is the FILL4 sequence region, and the FILL10 sequence region. In one embodiment, the filler sequence region is the FILM sequence region, and the FILL11 sequence region. In one embodiment, the filler sequence region is the FILL4 sequence region, and the FILL12 sequence region. In one embodiment, the filler sequence region is the FILM sequence region, and the FILL13 sequence region. In one embodiment, the filler sequence region is the FILL4 sequence region, and the FILL14 sequence region. In one embodiment, the filler sequence region is the FILL4 sequence region, and the FILL15 sequence region. In one embodiment, the filler sequence region is the FILL4 sequence region, and the FILL16 sequence region. In one embodiment, the filler sequence region is the FILL4 sequence region, and the FILL17 sequence region. In one embodiment, the filler sequence region is the FILL4 sequence region, and the FILL18 sequence region. In one embodiment, the filler sequence region is the FILL5 sequence region, and the FILL6 sequence region. In one embodiment, the filler sequence region is the FILL5 sequence region, and the FILL7 sequence region. In one embodiment, the filler sequence region is the FILL5 sequence region, and the FILL8 sequence region. In one embodiment, the filler sequence region is the FILL5 sequence region, and the FILL9 sequence region. In one embodiment, the filler sequence region is the FILL5 sequence region, and the FILL10 sequence region. In one embodiment, the filler sequence region is the FILL5 sequence region, and the FILL11 sequence region. In one embodiment, the filler sequence region is the FILL5 sequence region, and the FILL12 sequence region. In one embodiment, the filler sequence region is the FILL5 sequence region, and the FILL13 sequence region. In one embodiment, the filler sequence region is the FILL5 sequence region, and the FILL14 sequence region. In one embodiment, the filler sequence region is the FILL5 sequence region, and the FILL15 sequence region. In one embodiment, the filler sequence region is the FILL5 sequence region, and the FILL16 sequence region. In one embodiment, the filler sequence region is the FILL5 sequence region, and the FILL17 sequence region. In one embodiment, the filler sequence region is the FILL5 sequence region, and the FILL18 sequence region. In one embodiment, the filler sequence region is the FILL6 sequence region, and the FILL7 sequence region. In one embodiment, the filler sequence region is the FILL6 sequence region, and the FILL8 sequence region. In one embodiment, the filler sequence region is the FILL6 sequence region, and the FILL9 sequence region. In one embodiment, the filler sequence region is the FILL6 sequence region, and the FILL10 sequence region. In one embodiment, the filler sequence region is the FILL6 sequence region, and the FILL11 sequence region. In one embodiment, the filler sequence region is the FILL6 sequence region, and the FILL12 sequence region. In one embodiment, the filler sequence region is the FILL6 sequence region, and the FILL3 sequence region. In one embodiment, the filler sequence region is the FILL6 sequence region, and the FILL14 sequence region. In one embodiment, the filler sequence region is the FILL6 sequence region, and the FILL15 sequence region. In one embodiment, the filler sequence region is the FILL6 sequence region, and the FILL16 sequence region. In one embodiment, the filler sequence region is the FILL6 sequence region, and the FILL17 sequence region. In one embodiment, the filler sequence region is the FILL6 sequence region, and the FILL18 sequence region. In one embodiment, the filler sequence region is the FILL7 sequence region, and the FILL8 sequence region. In one embodiment, the filler sequence region is the FILL7 sequence region, and the FILL9 sequence region. In one embodiment, the filler sequence region is the FILL7 sequence region, and the FILL10 sequence region. In one embodiment, the filler sequence region is the FILL7 sequence region, and the FILL11 sequence region. In one embodiment, the filler sequence region is the FILL7 sequence region, and the FILL12 sequence region. In one embodiment, the filler sequence region is the FILL7 sequence region, and the FILL13 sequence region. In one embodiment, the filler sequence region is the FILL7 sequence region, and the FILL14 sequence region. In one embodiment, the filler sequence region is the FILL7 sequence region, and the FILL15 sequence region. In one embodiment, the filler sequence region is the FILL7 sequence region, and the FILL16 sequence region. In one embodiment, the filler sequence region is the FILL7 sequence region, and the FILL17 sequence region. In one embodiment, the filler sequence region is the FILL7 sequence region, and the FILL18 sequence region. In one embodiment, the filler sequence region is the FILL8 sequence region, and the FILL9 sequence region. In one embodiment, the filler sequence region is the FILL8 sequence region, and the FILL10 sequence region. In one embodiment, the filler sequence region is the FILL8 sequence region, and the FILL11 sequence region. In one embodiment, the filler sequence region is the FILL8 sequence region, and the FILL12 sequence region. In one embodiment, the filler sequence region is the FILL8 sequence region, and the FILL13 sequence region. In one embodiment, the filler sequence region is the FILL8 sequence region, and the FILL14 sequence region. In one embodiment, the filler sequence region is the FILL8 sequence region, and the FILL15 sequence region. In one embodiment, the filler sequence region is the FILL5 sequence region, and the FILL16 sequence region. In one embodiment, the filler sequence region is the FILL8 sequence region, and the FILL17 sequence region. In one embodiment, the filler sequence region is the FILL8 sequence region, and the FILL18 sequence region. In one embodiment, the filler sequence region is the FILL9 sequence region, and the FILL10 sequence region. In one embodiment, the filler sequence region is the FILL9 sequence region, and the FILL11 sequence region. In one embodiment, the filler sequence region is the FILL9 sequence region, and the FILL12 sequence region. In one embodiment, the filler sequence region is the FILL9 sequence region, and the FILL13 sequence region. In one embodiment, the filler sequence region is the FILL9 sequence region, and the FILL14 sequence region. In one embodiment, the filler sequence region is the FILL9 sequence region, and the FILL15 sequence region. In one embodiment, the filler sequence region is the FILL9 sequence region, and the FILL16 sequence region. In one embodiment, the filler sequence region is the FILL9 sequence region, and the FILL17 sequence region. In one embodiment, the filler sequence region is the FILL9 sequence region, and the FILL18 sequence region. In one embodiment, the filler sequence region is the FILL10 sequence region, and the FILL11 sequence region. In one embodiment, the filler sequence region is the FILL10 sequence region, and the FILL12 sequence region. In one embodiment, the filler sequence region is the FILL10 sequence region, and the FILL13 sequence region. In one embodiment, the filler sequence region is the FILL10 sequence region, and the FILL14 sequence region. In one embodiment, the filler sequence region is the FILL10 sequence region, and the FILL15 sequence region. In one embodiment, the filler sequence region is the FILL10 sequence region, and the FILL16 sequence region. In one embodiment, the filler sequence region is the FILL10 sequence region, and the FILL17 sequence region. In one embodiment, the filler sequence region is the FILL10 sequence region, and the FILL18 sequence region. In one embodiment, the filler sequence region is the FILL11 sequence region, and the FILL12 sequence region. In one embodiment, the filler sequence region is the FILL11 sequence region, and the FILL13 sequence region. In one embodiment, the filler sequence region is the FILL11 sequence region, and the FILL14 sequence region. In one embodiment, the filler sequence region is the FILL11 sequence region, and the FILL15 sequence region. In one embodiment, the filler sequence region is the FILL11 sequence region, and the FILL16 sequence region. In one embodiment, the filler sequence region is the FILL11 sequence region, and the FILL17 sequence region. In one embodiment, the filler sequence region is the FILL11 sequence region, and the FILL18 sequence region. In one embodiment, the filler sequence region is the FILL12 sequence region, and the FILL13 sequence region. In one embodiment, the filler sequence region is the FILL12 sequence region, and the FILL14 sequence region. In one embodiment, the filler sequence region is the FILL12 sequence region, and the FILL15 sequence region. In one embodiment, the filler sequence region is the FILL12 sequence region, and the FILL16 sequence region. In one embodiment, the filler sequence region is the FILL12 sequence region, and the FILL17 sequence region. In one embodiment, the filler sequence region is the FILL12 sequence region, and the FILL18 sequence region. In one embodiment, the filler sequence region is the FILL13 sequence region, and the FILL14 sequence region. In one embodiment, the filler sequence region is the FILL13 sequence region, and the FILL15 sequence region. In one embodiment, the filler sequence region is the FILL13 sequence region, and the FILL16 sequence region. In one embodiment, the filler sequence region is the FILL13 sequence region, and the FILL17 sequence region. In one embodiment, the filler sequence region is the FILL13 sequence region, and the FILL18 sequence region. In one embodiment, the filler sequence region is the FILL14 sequence region, and the FILL15 sequence region. In one embodiment, the filler sequence region is the FILL14 sequence region, and the FILL16 sequence region. In one embodiment, the filler sequence region is the FILL14 sequence region, and the FILL17 sequence region. In one embodiment, the filler sequence region is the FILL14 sequence region, and the FILL18 sequence region. In one embodiment, the filler sequence region is the FILL15 sequence region, and the FILL16 sequence region. In one embodiment, the filler sequence region is the FILL15 sequence region, and the FILL17 sequence region. In one embodiment, the filler sequence region is the FILL15 sequence region, and the FILL18 sequence region. In one embodiment, the filler sequence region is the FILL16 sequence region, and the FILL17 sequence region. In one embodiment, the filler sequence region is the FILL16 sequence region, and the FILL18 sequence region. In one embodiment, the filler sequence region is the FILL17 sequence region, and the FILL18 sequence region.

[0704] In one embodiment, the AAV particle viral genome comprises three filler sequence regions. In one embodiment, the two filler sequence regions are the FILL1 sequence region, the FILL2 sequence region, and the FILL3 sequence region. In one embodiment, the filler sequence region is the FILL1 sequence region, the FILL2 sequence region, and the FILL4 sequence region. In one embodiment, the filler sequence region is the FILL1 sequence region, the FILL2 sequence region, and the FILL5 sequence region. In one embodiment, the filler sequence region is the FILL1 sequence region, the FILL2 sequence region, and the FILL6 sequence region. In one embodiment, the filler sequence region is the FILL1 sequence region, the FILL2 sequence region, and the FILL7 sequence region. In one embodiment, the filler sequence region is the FILL1 sequence region, the FILL2 sequence region, and the FILL8 sequence region. In one embodiment, the filler sequence region is the FILL1 sequence region, the FILL2 sequence region, and the FILL9 sequence region. In one embodiment, the filler sequence region is the FILL1 sequence region, the FILL2 sequence region, and the FILL10 sequence region. In one embodiment, the filler sequence region is the FILL1 sequence region, the FILL2 sequence region, and the FILL11 sequence region. In one embodiment, the filler sequence region is the FILL1 sequence region, the FILL2 sequence region, and the FILL12 sequence region. In one embodiment, the filler sequence region is the FILL1 sequence region, the FILL2 sequence region, and the FILL13 sequence region. In one embodiment, the filler sequence region is the FILL1 sequence region, the FILL2 sequence region, and the FILL14 sequence region. In one embodiment, the filler sequence region is the FILL1 sequence region, the FILL2 sequence region, and the FILL15 sequence region. In one embodiment, the filler sequence region is the FILL1 sequence region, the FILL2 sequence region, and the FILL16 sequence region. In one embodiment, the filler sequence region is the FILL1 sequence region, the FILL2 sequence region, and the FILL17 sequence region. In one embodiment, the filler sequence region is the FILL1 sequence region, the FILL2 sequence region, and the FILL18 sequence region. In one embodiment, the filler sequence region is the FILL1 sequence region, the FILL3 sequence region, and the FILL4 sequence region. In one embodiment, the filler sequence region is the FILL1 sequence region, the FILL3 sequence region, and the FILL5 sequence region. In one embodiment, the filler sequence region is the FILL1 sequence region, the FILL3 sequence region, and the FILL6 sequence region. In one embodiment, the filler sequence region is the FILL1 sequence region, the FILL3 sequence region, and the FILL7 sequence region. In one embodiment, the filler sequence region is the FILL1 sequence region, the FILL3 sequence region, and the FILL8 sequence region. In one embodiment, the filler sequence region is the FILL1 sequence region, the FILL3 sequence region, and the FILL9 sequence region. In one embodiment, the filler sequence region is the FILL1 sequence region, the FILL3 sequence region, and the FILL10 sequence region. In one embodiment, the filler sequence region is the FILL1 sequence region, the FILL3 sequence region, and the FILL11 sequence region. In one embodiment, the filler sequence region is the FILL1 sequence region, the FILL3 sequence region, and the FILL12 sequence region. In one embodiment, the filler sequence region is the FILL1 sequence region, the FILL3 sequence region, and the FILL13 sequence region. In one embodiment, the filler sequence region is the FILL1 sequence region, the FILL3 sequence region, and the FILL14 sequence region. In one embodiment, the filler sequence region is the FILL1 sequence region, the FILL3 sequence region, and the FILL15 sequence region. In one embodiment, the filler sequence region is the FILL1 sequence region, the FILL3 sequence region, and the FILL16 sequence region. In one embodiment, the filler sequence region is the FILL1 sequence region, the FILL3 sequence region, and the FILL17 sequence region. In one embodiment, the filler sequence region is the FILL1 sequence region, the FILL3 sequence region, and the FILL18 sequence region. In one embodiment, the filler sequence region is the FILL1 sequence region, the FILL4 sequence region, and the FILL5 sequence region. In one embodiment, the filler sequence region is the FILL1 sequence region, the FILL4 sequence region, and the FILL6 sequence region. In one embodiment, the filler sequence region is the FILL1 sequence region, the FILL4 sequence region, and the FILL7 sequence region. In one embodiment, the filler sequence region is the FILL1 sequence region, the FILL4 sequence region, and the FILL8 sequence region. In one embodiment, the filler sequence region is the FILL1 sequence region, the FILL4 sequence region, and the FILL9 sequence region. In one embodiment, the filler sequence region is the FILL1 sequence region, the FILL4 sequence region, and the FILL10 sequence region. In one embodiment, the filler sequence region is the FILL1 sequence region, the FILL4 sequence region, and the FILL11 sequence region. In one embodiment, the filler sequence region is the FILL1 sequence region, the FILL4 sequence region, and the FILL12 sequence region. In one embodiment, the filler sequence region is the FILL1 sequence region, the FILL4 sequence region, and the FILL13 sequence region. In one embodiment, the filler sequence region is the FILL1 sequence region, the FILL4 sequence region, and the FILL14 sequence region. In one embodiment, the filler sequence region is the FILL1 sequence region, the FILL4 sequence region, and the FILL15 sequence region. In one embodiment, the filler sequence region is the FILL1 sequence region, the FILL4 sequence region, and the FILL16 sequence region. In one embodiment, the filler sequence region is the FILL1 sequence region, the FILL4 sequence region, and the FILL17 sequence region. In one embodiment, the filler sequence region is the FILL1 sequence region, the FILL4 sequence region, and the FILL18 sequence region. In one embodiment, the filler sequence region is the FILL1 sequence region, the FILL5 sequence region, and the FILL6 sequence region. In one embodiment, the filler sequence region is the FILL1 sequence region, the FILL5 sequence region, and the FILL7 sequence region. In one embodiment, the filler sequence region is the FILL1 sequence region, the FILL5 sequence region, and the FILL8 sequence region. In one embodiment, the filler sequence region is the FILL1 sequence region, the FILL5 sequence region, and the FILL9 sequence region. In one embodiment, the filler sequence region is the FILL1 sequence region, the FILL5 sequence region, and the FILL10 sequence region. In one embodiment, the filler sequence region is the FILL1 sequence region, the FILL5 sequence region, and the FILL11 sequence region. In one embodiment, the filler sequence region is the FILL1 sequence region, the FILL5 sequence region, and the FILL12 sequence region. In one embodiment, the filler sequence region is the FILL1 sequence region, the FILL5 sequence region, and the FILL13 sequence region. In one embodiment, the filler sequence region is the FILL1 sequence region, the FILL5 sequence region, and the FILL14 sequence region. In one embodiment, the filler sequence region is the FILL1 sequence region, the FILL5 sequence region, and the FILL15 sequence region. In one embodiment, the filler sequence region is the FILL1 sequence region, the FILL5 sequence region, and the FILL16 sequence region. In one embodiment, the filler sequence region is the FILL1 sequence region, the FILL5 sequence region, and the FILL17 sequence region. In one embodiment, the filler sequence region is the FILL1 sequence region, the FILL5 sequence region, and the FILL18 sequence region. In one embodiment, the filler sequence region is the FILL1 sequence region, the FILL6 sequence region, and the FILL7 sequence region. In one embodiment, the filler sequence region is the FILL1 sequence region, the FILL6 sequence region, and the FILL8 sequence region. In one embodiment, the filler sequence region is the FILL1 sequence region, the FILL6 sequence region, and the FILL9 sequence region. In one embodiment, the filler sequence region is the FILL1 sequence region, the FILL6 sequence region, and the FILL10 sequence region. In one embodiment, the filler sequence region is the FILL1 sequence region, the FILL6 sequence region, and the FILL11 sequence region. In one embodiment, the filler sequence region is the FILL1 sequence region, the FILL6 sequence region, and the FILL12 sequence region. In one embodiment, the filler sequence region is the FILL1 sequence region, the FILL6 sequence region, and the FILL13 sequence region. In one embodiment, the filler sequence region is the FILL1 sequence region, the FILL6 sequence region, and the FILL14 sequence region. In one embodiment, the filler sequence region is the FILL1 sequence region, the FILL6 sequence region, and the FILL15 sequence region. In one embodiment, the filler sequence region is the FILL1 sequence region, the FILL6 sequence region, and the FILL16 sequence region. In one embodiment, the filler sequence region is the FILL1 sequence region, the FILL6 sequence region, and the FILL17 sequence region. In one embodiment, the filler sequence region is the FILL1 sequence region, the FILL6 sequence region, and the FILL18 sequence region. In one embodiment, the filler sequence region is the FILL1 sequence region, the FILL7 sequence region, and the FILL8 sequence region. In one embodiment, the filler sequence region is the FILL1 sequence region, the FILL7 sequence region, and the FILL9 sequence region. In one embodiment, the filler sequence region is the FILL1 sequence region, the FILL7 sequence region, and the FILL10 sequence region. In one embodiment, the filler sequence region is the FILL1 sequence region, the FILL7 sequence region, and the FILL11 sequence region. In one embodiment, the filler sequence region is the FILL1 sequence region, the FILL7 sequence region, and the FILL12 sequence region. In one embodiment, the filler sequence region is the FILL1 sequence region, the FILL7 sequence region, and the FILL13 sequence region. In one embodiment, the filler sequence region is the FILL1 sequence region, the FILL7 sequence region, and the FILL14 sequence region. In one embodiment, the filler sequence region is the FILL1 sequence region, the FILL7 sequence region, and the FILL15 sequence region. In one embodiment, the filler sequence region is the FILL1 sequence region, the FILL7 sequence region, and the FILL16 sequence region. In one embodiment, the filler sequence region is the FILL1 sequence region, the FILL7 sequence region, and the FILL17 sequence region. In one embodiment, the filler sequence region is the FILL1 sequence region, the FILL7 sequence region, and the FILL18 sequence region. In one embodiment, the filler sequence region is the FILL1 sequence region, the FILL8 sequence region, and the FILL9 sequence region. In one embodiment, the filler sequence region is the FILL1 sequence region, the FILL8 sequence region, and the FILL10 sequence region. In one embodiment, the filler sequence region is the FILL1 sequence region, the FILL8 sequence region, and the FILL11 sequence region. In one embodiment, the filler sequence region is the FILL1 sequence region, the FILL8 sequence region, and the FILL12 sequence region. In one embodiment, the filler sequence region is the FILL1 sequence region, the FILL8 sequence region, and the FILL13 sequence region. In one embodiment, the filler sequence region is the FILL1 sequence region, the FILL8 sequence region, and the FILL14 sequence region. In one embodiment, the filler sequence region is the FILL1 sequence region, the FILL8 sequence region, and the FILL15 sequence region. In one embodiment, the filler sequence region is the FILL1 sequence region, the FILL8 sequence region, and the FILL16 sequence region. In one embodiment, the filler sequence region is the FILL1 sequence region, the FILL8 sequence region, and the FILL17 sequence region. In one embodiment, the filler sequence region is the FILL1 sequence region, the FILL8 sequence region, and the FILL18 sequence region. In one embodiment, the filler sequence region is the FILL1 sequence region, the FILL9 sequence region, and the FILL10 sequence region. In one embodiment, the filler sequence region is the FILL1 sequence region, the FILL9 sequence region, and the FILL11 sequence region. In one embodiment, the filler sequence region is the FILL1 sequence region, the FILL9 sequence region, and the FILL12 sequence region. In one embodiment, the filler sequence region is the FILL1 sequence region, the FILL9 sequence region, and the FILL13 sequence region. In one embodiment, the filler sequence region is the FILL1 sequence region, the FILL9 sequence region, and the FILL14 sequence region. In one embodiment, the filler sequence region is the FILL1 sequence region, the FILL9 sequence region, and the FILL15 sequence region. In one embodiment, the filler sequence region is the FILL1 sequence region, the FILL9 sequence region, and the FILL16 sequence region. In one embodiment, the filler sequence region is the FILL1 sequence region, the FILL9 sequence region, and the FILL17 sequence region. In one embodiment, the filler sequence region is the FILL1 sequence region, the FILL9 sequence region, and the FILL18 sequence region. In one embodiment, the filler sequence region is the FILL1 sequence region, the FILL10 sequence region, and the FILL11 sequence region. In one embodiment, the filler sequence region is the FILL1 sequence region, the FILL10 sequence region, and the FILL12 sequence region. In one embodiment, the filler sequence region is the FILL1 sequence region, the FILL10 sequence region, and the FILL13 sequence region. In one embodiment, the filler sequence region is the FILL1 sequence region, the FILL10 sequence region, and the FILL14 sequence region. In one embodiment, the filler sequence region is the FILL1 sequence region, the FILL10 sequence region, and the FILL15 sequence region. In one embodiment, the filler sequence region is the FILL1 sequence region, the FILL10 sequence region, and the FILL16 sequence region. In one embodiment, the filler sequence region is the FILL1 sequence region, the FILL10 sequence region, and the FILL17 sequence region. In one embodiment, the filler sequence region is the FILL1 sequence region, the FILL10 sequence region, and the FILL18 sequence region. In one embodiment, the filler sequence region is the FILL1 sequence region, the FILL11 sequence region, and the FILL12 sequence region. In one embodiment, the filler sequence region is the FILL1 sequence region, the FILL11 sequence region, and the FILL13 sequence region. In one embodiment, the filler sequence region is the FILL1 sequence region, the FILL11 sequence region, and the FILL14 sequence region. In one embodiment, the filler sequence region is the FILL1 sequence region, the FILL1 sequence region, and the FILL15 sequence region. In one embodiment, the filler sequence region is the FILL1 sequence region, the FILL11 sequence region, and the FILL16 sequence region. In one embodiment, the filler sequence region is the FILL1 sequence region, the FILL11 sequence region, and the FILL17 sequence region. In one embodiment, the filler sequence region is the FILL1 sequence region, the FILL11 sequence region, and the FILL18 sequence region. In one embodiment, the filler sequence region is the FILL1 sequence region, the FILL12 sequence region, and the FILL13 sequence region. In one embodiment, the filler sequence region is the FILL1 sequence region, the FILL12 sequence region, and the FILL14 sequence region. In one embodiment, the filler sequence region is the FILL1 sequence region, the FILL12 sequence region, and the FILL15 sequence region. In one embodiment, the filler sequence region is the FILL1 sequence region, the FILL12 sequence region, and the FILL16 sequence region. In one embodiment, the filler sequence region is the FILL1 sequence region, the FILL12 sequence region, and the FILL17 sequence region. In one embodiment, the filler sequence region is the FILL1 sequence region, the FILL12 sequence region, and the FILL18 sequence region. In one embodiment, the filler sequence region is the FILL1 sequence region, the FILL13 sequence region, and the FILL14 sequence region. In one embodiment, the filler sequence region is the FILL1 sequence region, the FILL13 sequence region, and the FILL15 sequence region. In one embodiment, the filler sequence region is the FILL1 sequence region, the FILL13 sequence region, and the FILL16 sequence region. In one embodiment, the filler sequence region is the FILL1 sequence region, the FILL13 sequence region, and the FILL17 sequence region. In one embodiment, the filler sequence region is the FILL1 sequence region, the FILL13 sequence region, and the FILL18 sequence region. In one embodiment, the filler sequence region is the FILL1 sequence region, the FILL14 sequence region, and the FILL15 sequence region. In one embodiment, the filler sequence region is the FILL1 sequence region, the FILL14 sequence region, and the FILL16 sequence region. In one embodiment, the filler sequence region is the FILL1 sequence region, the FILL14 sequence region, and the FILL17 sequence region. In one embodiment, the filler sequence region is the FILL1 sequence region, the FILL14 sequence region, and the FILL18 sequence region. In one embodiment, the filler sequence region is the FILL1 sequence region, the FILL15 sequence region, and the FILL16 sequence region. In one embodiment, the filler sequence region is the FILL1 sequence region, the FILL15 sequence region, and the FILL17 sequence region. In one embodiment, the filler sequence region is the FILL1 sequence region, the FILL15 sequence region, and the FILL18 sequence region. In one embodiment, the filler sequence region is the FILL1 sequence region, the FILL16 sequence region, and the FILL17 sequence region. In one embodiment, the filler sequence region is the FILL1 sequence region, the FILL16 sequence region, and the FILL18 sequence region. In one embodiment, the filler sequence region is the FILL1 sequence region, the FILL17 sequence region, and the FILL18 sequence region. In one embodiment, the filler sequence region is the FILL2 sequence region, the FILL3 sequence region, and the FILL4 sequence region. In one embodiment, the filler sequence region is the FILL2 sequence region, the FILL3 sequence region, and the FILL5 sequence region. In one embodiment, the filler sequence region is the FILL2 sequence region, the FILL3 sequence region, and the FILL6 sequence region. In one embodiment, the filler sequence region is the FILL2 sequence region, the FILL3 sequence region, and the FILL7 sequence region. In one embodiment, the filler sequence region is the FILL2 sequence region, the FILL3 sequence region, and the FILL8 sequence region. In one embodiment, the filler sequence region is the FILL2 sequence region, the FILL3 sequence region, and the FILL9 sequence region. In one embodiment, the filler sequence region is the FILL2 sequence region, the FILL3 sequence region, and the FILL10 sequence region. In one embodiment, the filler sequence region is the FILL2 sequence region, the FILL3 sequence region, and the FILL11 sequence region. In one embodiment, the filler sequence region is the FILL2 sequence region, the FILL3 sequence region, and the FILL12 sequence region. In one embodiment, the filler sequence region is the FILL2 sequence region, the FILL3 sequence region, and the FILL13 sequence region. In one embodiment, the filler sequence region is the FILL2 sequence region, the FILL3 sequence region, and the FILL14 sequence region. In one embodiment, the filler sequence region is the FILL2 sequence region, the FILL3 sequence region, and the FILL15 sequence region. In one embodiment, the filler sequence region is the FILL2 sequence region, the FILL3 sequence region, and the FILL16 sequence region. In one embodiment, the filler sequence region is the FILL2 sequence region, the FILL3 sequence region, and the FILL17 sequence region. In one embodiment, the filler sequence region is the FILL2 sequence region, the FILL3 sequence region, and the FILL18 sequence region. In one embodiment, the filler sequence region is the FILL2 sequence region, the FILL4 sequence region, and the FILL5 sequence region. In one embodiment, the filler sequence region is the FILL2 sequence region, the FILL4 sequence region, and the FILL6 sequence region. In one embodiment, the filler sequence region is the FILL2 sequence region, the FILL4 sequence region, and the FILL7 sequence region. In one embodiment, the filler sequence region is the FILL2 sequence region, the FILL4 sequence region, and the FILL8 sequence region. In one embodiment, the filler sequence region is the FILL2 sequence region, the FILL4 sequence region, and the FILL9 sequence region. In one embodiment, the filler sequence region is the FILL2 sequence region, the FILL4 sequence region, and the FILL10 sequence region. In one embodiment, the filler sequence region is the FILL2 sequence region, the FILL4 sequence region, and the FILL11 sequence region. In one embodiment, the filler sequence region is the FILL2 sequence region, the FILL4 sequence region, and the FILL12 sequence region. In one embodiment, the filler sequence region is the FILL2 sequence region, the FILL4 sequence region, and the FILL13 sequence region. In one embodiment, the filler sequence region is the FILL2 sequence region, the FILL4 sequence region, and the FILL14 sequence region. In one embodiment, the filler sequence region is the FILL2 sequence region, the FILL4 sequence region, and the FILL15 sequence region. In one embodiment, the filler sequence region is the FILL2 sequence region, the FILL4 sequence region, and the FILL16 sequence region. In one embodiment, the filler sequence region is the FILL2 sequence region, the FILL4 sequence region, and the FILL17 sequence region. In one embodiment, the filler sequence region is the FILL2 sequence region, the FILM sequence region, and the FILL18 sequence region. In one embodiment, the filler sequence region is the FILL2 sequence region, the FILL5 sequence region, and the FILL6 sequence region. In one embodiment, the filler sequence region is the FILL2 sequence region, the FILL5 sequence region, and the FILL7 sequence region. In one embodiment, the filler sequence region is the FILL2 sequence region, the FILL5 sequence region, and the FILL8 sequence region. In one embodiment, the filler sequence region is the FILL2 sequence region, the FILL5 sequence region, and the FILL9 sequence region. In one embodiment, the filler sequence region is the FILL2 sequence region, the FILL5 sequence region, and the FILL10 sequence region. In one embodiment, the filler sequence region is the FILL2 sequence region, the FILL5 sequence region, and the FILL11 sequence region. In one embodiment, the filler sequence region is the FILL2 sequence region, the FILL5 sequence region, and the FILL12 sequence region. In one embodiment, the filler sequence region is the FILL2 sequence region, the FILL5 sequence region, and the FILL13 sequence region. In one embodiment, the filler sequence region is the FILL2 sequence region, the FILL5 sequence region, and the FILL14 sequence region. In one embodiment, the filler sequence region is the FILL2 sequence region, the FILL5 sequence region, and the FILL15 sequence region. In one embodiment, the filler sequence region is the FILL2 sequence region, the FILL5 sequence region, and the FILL16 sequence region. In one embodiment, the filler sequence region is the FILL2 sequence region, the FILL5 sequence region, and the FILL17 sequence region. In one embodiment, the filler sequence region is the FILL2 sequence region, the FILL5 sequence region, and the FILL18 sequence region. In one embodiment, the filler sequence region is the FILL2 sequence region, the FILL6 sequence region, and the FILL7 sequence region. In one embodiment, the filler sequence region is the FILL2 sequence region, the FILL6 sequence region, and the FILL5 sequence region. In one embodiment, the filler sequence region is the FILL2 sequence region, the FILL6 sequence region, and the FILL9 sequence region. In one embodiment, the filler sequence region is the FILL2 sequence region, the FILL6 sequence region, and the FILL10 sequence region. In one embodiment, the filler sequence region is the FILL2 sequence region, the FILL6 sequence region, and the FILL11 sequence region. In one embodiment, the filler sequence region is the FILL2 sequence region, the FILL6 sequence region, and the FILL12 sequence region. In one embodiment, the filler sequence region is the FILL2 sequence region, the FILL6 sequence region, and the FILL13 sequence region. In one embodiment, the filler sequence region is the FILL2 sequence region, the FILL6 sequence region, and the FILL14 sequence region. In one embodiment, the filler sequence region is the FILL2 sequence region, the FILL6 sequence region, and the FILL15 sequence region. In one embodiment, the filler sequence region is the FILL2 sequence region, the FILL6 sequence region, and the FILL16 sequence region. In one embodiment, the filler sequence region is the FILL2 sequence region, the FILL6 sequence region, and the FILL17 sequence region. In one embodiment, the filler sequence region is the FILL2 sequence region, the FILL6 sequence region, and the FILL18 sequence region. In one embodiment, the filler sequence region is the FILL2 sequence region, the FILL7 sequence region, and the FILL8 sequence region. In one embodiment, the filler sequence region is the FILL2 sequence region, the FILL7 sequence region, and the FILL9 sequence region. In one embodiment, the filler sequence region is the FILL2 sequence region, the FILL7 sequence region, and the FILL10 sequence region. In one embodiment, the filler sequence region is the FILL2 sequence region, the FILL7 sequence region, and the FILL11 sequence region. In one embodiment, the filler sequence region is the FILL2 sequence region, the FILL7 sequence region, and the FILL12 sequence region. In one embodiment, the filler sequence region is the FILL2 sequence region, the FILL7 sequence region, and the FILL13 sequence region. In one embodiment, the filler sequence region is the FILL2 sequence region, the FILL7 sequence region, and the FILL14 sequence region. In one embodiment, the filler sequence region is the FILL2 sequence region, the FILL7 sequence region, and the FILL15 sequence region. In one embodiment, the filler sequence region is the FILL2 sequence region, the FILL7 sequence region, and the FILL16 sequence region. In one embodiment, the filler sequence region is the FILL2 sequence region, the FILL7 sequence region, and the FILL17 sequence region. In one embodiment, the filler sequence region is the FILL2 sequence region, the FILL7 sequence region, and the FILL18 sequence region. In one embodiment, the filler sequence region is the FILL2 sequence region, the FILL8 sequence region, and the FILL9 sequence region. In one embodiment, the filler sequence region is the FILL2 sequence region, the FILL8 sequence region, and the FILL10 sequence region. In one embodiment, the filler sequence region is the FILL2 sequence region, the FILL8 sequence region, and the FILL11 sequence region. In one embodiment, the filler sequence region is the FILL2 sequence region, the FILL8 sequence region, and the FILL12 sequence region. In one embodiment, the filler sequence region is the FILL2 sequence region, the FILL8 sequence region, and the FILL13 sequence region. In one embodiment, the filler sequence region is the FILL2 sequence region, the FILL8 sequence region, and the FILL14 sequence region. In one embodiment, the filler sequence region is the FILL2 sequence region, the FILL8 sequence region, and the FILL15 sequence region. In one embodiment, the filler sequence region is the FILL2 sequence region, the FILL8 sequence region, and the FILL16 sequence region. In one embodiment, the filler sequence region is the FILL2 sequence region, the FILL8 sequence region, and the FILL17 sequence region. In one embodiment, the filler sequence region is the FILL2 sequence region, the FILL8 sequence region, and the FILL18 sequence region. In one embodiment, the filler sequence region is the FILL2 sequence region, the FILL9 sequence region, and the FILL10 sequence region. In one embodiment, the filler sequence region is the FILL2 sequence region, the FILL9 sequence region, and the FILL11 sequence region. In one embodiment, the filler sequence region is the FILL2 sequence region, the FILL9 sequence region, and the FILL12 sequence region. In one embodiment, the filler sequence region is the FILL2 sequence region, the FILL9 sequence region, and the FILL13 sequence region. In one embodiment, the filler sequence region is the FILL2 sequence region, the FILL9 sequence region, and the FILL14 sequence region. In one embodiment, the filler sequence region is the FILL2 sequence region, the FILL9 sequence region, and the FILL15 sequence region. In one embodiment, the filler sequence region is the FILL2 sequence region, the FILL9 sequence region, and the FILL16 sequence region. In one embodiment, the filler sequence region is the FILL2 sequence region, the FILL9 sequence region, and the FILL17 sequence region. In one embodiment, the filler sequence region is the FILL2 sequence region, the FILL9 sequence region, and the FILL18 sequence region. In one embodiment, the filler sequence region is the FILL2 sequence region, the FILL10 sequence region, and the FILL11 sequence region. In one embodiment, the filler sequence region is the FILL2 sequence region, the FILL10 sequence region, and the FILL12 sequence region. In one embodiment, the filler sequence region is the FILL2 sequence region, the FILL10 sequence region, and the FILL13 sequence region. In one embodiment, the filler sequence region is the FILL2 sequence region, the FILL10 sequence region, and the FILL14 sequence region. In one embodiment, the filler sequence region is the FILL2 sequence region, the FILL10 sequence region, and the FILL15 sequence region. In one embodiment, the filler sequence region is the FILL2 sequence region, the FILL10 sequence region, and the FILL16 sequence region. In one embodiment, the filler sequence region is the FILL2 sequence region, the FILL10 sequence region, and the FILL17 sequence region. In one embodiment, the filler sequence region is the FILL2 sequence region, the FILL10 sequence region, and the FILL18 sequence region. In one embodiment, the filler sequence region is the FILL2 sequence region, the FILL11 sequence region, and the FILL12 sequence region. In one embodiment, the filler sequence region is the FILL2 sequence region, the FILL11 sequence region, and the FILL13 sequence region. In one embodiment, the filler sequence region is the FILL2 sequence region, the FILL11 sequence region, and the FILL14 sequence region. In one embodiment, the filler sequence region is the FILL2 sequence region, the FILL11 sequence region, and the FILL15 sequence region. In one embodiment, the filler sequence region is the FILL2 sequence region, the FILL11 sequence region, and the FILL16 sequence region. In one embodiment, the filler sequence region is the FILL2 sequence region, the FILL1 sequence region, and the FILL17 sequence region. In one embodiment, the filler sequence region is the FILL2 sequence region, the FILL11 sequence region, and the FILL18 sequence region. In one embodiment, the filler sequence region is the FILL2 sequence region, the FILL12 sequence region, and the FILL13 sequence region. In one embodiment, the filler sequence region is the FILL2 sequence region, the FILL12 sequence region, and the FILL14 sequence region. In one embodiment, the filler sequence region is the FILL2 sequence region, the FILL12 sequence region, and the FILL15 sequence region. In one embodiment, the filler sequence region is the FILL2 sequence region, the FILL12 sequence region, and the FILL16 sequence region. In one embodiment, the filler sequence region is the FILL2 sequence region, the FILL12 sequence region, and the FILL17 sequence region. In one embodiment, the filler sequence region is the FILL2 sequence region, the FILL12 sequence region, and the FILL18 sequence region. In one embodiment, the filler sequence region is the FILL2 sequence region, the FILL13 sequence region, and the FILL14 sequence region. In one embodiment, the filler sequence region is the FILL2 sequence region, the FILL13 sequence region, and the FILL15 sequence region. In one embodiment, the filler sequence region is the FILL2 sequence region, the FILL13 sequence region, and the FILL16 sequence region. In one embodiment, the filler sequence region is the FILL2 sequence region, the FILL13 sequence region, and the FILL17 sequence region. In one embodiment, the filler sequence region is the FILL2 sequence region, the FILL13 sequence region, and the FILL18 sequence region. In one embodiment, the filler sequence region is the FILL2 sequence region, the FILL14 sequence region, and the FILL15 sequence region. In one embodiment, the filler sequence region is the FILL2 sequence region, the FILL14 sequence region, and the FILL16 sequence region. In one embodiment, the filler sequence region is the FILL2 sequence region, the FILL14 sequence region, and the FILL17 sequence region. In one embodiment, the filler sequence region is the FILL2 sequence region, the FILL14 sequence region, and the FILL18 sequence region. In one embodiment, the filler sequence region is the FILL2 sequence region, the FILL15 sequence region, and the FILL16 sequence region. In one embodiment, the filler sequence region is the FILL2 sequence region, the FILL15 sequence region, and the FILL17 sequence region. In one embodiment, the filler sequence region is the FILL2 sequence region, the FILL15 sequence region, and the FILL18 sequence region. In one embodiment, the filler sequence region is the FILL2 sequence region, the FILL16 sequence region, and the FILL17 sequence region. In one embodiment, the filler sequence region is the FILL2 sequence region, the FILL16 sequence region, and the FILL18 sequence region. In one embodiment, the filler sequence region is the FILL2 sequence region, the FILL17 sequence region, and the FILL18 sequence region. In one embodiment, the filler sequence region is the FILL3 sequence region, the FILL4 sequence region, and the FILL5 sequence region. In one embodiment, the filler sequence region is the FILL3 sequence region, the FILL4 sequence region, and the FILL6 sequence region. In one embodiment, the filler sequence region is the FILL3 sequence region, the FILL4 sequence region, and the FILL7 sequence region. In one embodiment, the filler sequence region is the FILL3 sequence region, the FILL4 sequence region, and the FILL8 sequence region. In one embodiment, the filler sequence region is the FILL3 sequence region, the FILL4 sequence region, and the FILL9 sequence region. In one embodiment, the filler sequence region is the FILL3 sequence region, the FILL4 sequence region, and the FILL10 sequence region. In one embodiment, the filler sequence region is the FILL3 sequence region, the FILL4 sequence region, and the FILL11 sequence region. In one embodiment, the filler sequence region is the FILL3 sequence region, the FILL4 sequence region, and the FILL12 sequence region. In one embodiment, the filler sequence region is the FILL3 sequence region, the FILL4 sequence region, and the FILL13 sequence region. In one embodiment, the filler sequence region is the FILL3 sequence region, the FILL4 sequence region, and the FILL14 sequence region. In one embodiment, the filler sequence region is the FILL3 sequence region, the FILL4 sequence region, and the FILL1S5 sequence region. In one embodiment, the filler sequence region is the FILL3 sequence region, the FILL4 sequence region, and the FILL16 sequence region. In one embodiment, the filler sequence region is the FILL3 sequence region, the FILL4 sequence region, and the FILL17 sequence region. In one embodiment, the filler sequence region is the FILL3 sequence region, the FILL4 sequence region, and the FILL18 sequence region. In one embodiment, the filler sequence region is the FILL3 sequence region, the FILL5 sequence region, and the FILL6 sequence region. In one embodiment, the filler sequence region is the FILL3 sequence region, the FILL5 sequence region, and the FILL7 sequence region. In one embodiment, the filler sequence region is the FILL3 sequence region, the FILL5 sequence region, and the FILL8 sequence region. In one embodiment, the filler sequence region is the FILL3 sequence region, the FILL5 sequence region, and the FILL9 sequence region. In one embodiment, the filler sequence region is the FILL3 sequence region, the FILL5 sequence region, and the FILL10 sequence region. In one embodiment, the filler sequence region is the FILL3 sequence region, the FILL5 sequence region, and the FILL11 sequence region. In one embodiment, the filler sequence region is the FILL3 sequence region, the FILL5 sequence region, and the FILL12 sequence region. In one embodiment, the filler sequence region is the FILL3 sequence region, the FILL5 sequence region, and the FILL13 sequence region. In one embodiment, the filler sequence region is the FILL3 sequence region, the FILL5 sequence region, and the FILL14 sequence region. In one embodiment, the filler sequence region is the FILL3 sequence region, the FILL5 sequence region, and the FILL15 sequence region. In one embodiment, the filler sequence region is the FILL3 sequence region, the FILL5 sequence region, and the FILL16 sequence region. In one embodiment, the filler sequence region is the FILL3 sequence region, the FILL5 sequence region, and the FILL17 sequence region. In one embodiment, the filler sequence region is the FILL3 sequence region, the FILL5 sequence region, and the FILL18 sequence region. In one embodiment, the filler sequence region is the FILL3 sequence region, the FILL6 sequence region, and the FILL7 sequence region. In one embodiment, the filler sequence region is the FILL3 sequence region, the FILL6 sequence region, and the FILL8 sequence region. In one embodiment, the filler sequence region is the FILL3 sequence region, the FILL6 sequence region, and the FILL9 sequence region. In one embodiment, the filler sequence region is the FILL3 sequence region, the FILL6 sequence region, and the FILL10 sequence region. In one embodiment, the filler sequence region is the FILL3 sequence region, the FILL6 sequence region, and the FILL11 sequence region. In one embodiment, the filler sequence region is the FILL3 sequence region, the FILL6 sequence region, and the FILL12 sequence region. In one embodiment, the filler sequence region is the FILL3 sequence region, the FILL6 sequence region, and the FILL13 sequence region. In one embodiment, the filler sequence region is the FILL3 sequence region, the FILL6 sequence region, and the FILL14 sequence region. In one embodiment, the filler sequence region is the FILL3 sequence region, the FILL6 sequence region, and the FILL15 sequence region. In one embodiment, the filler sequence region is the FILL3 sequence region, the FILL6 sequence region, and the FILL16 sequence region. In one embodiment, the filler sequence region is the FILL3 sequence region, the FILL6 sequence region, and the FILL17 sequence region. In one embodiment, the filler sequence region is the FILL3 sequence region, the FILL6 sequence region, and the FILL18 sequence region. In one embodiment, the filler sequence region is the FILL3 sequence region, the FILL7 sequence region, and the FILL8 sequence region. In one embodiment, the filler sequence region is the FILL3 sequence region, the FILL7 sequence region, and the FILL9 sequence region. In one embodiment, the filler sequence region is the FILL3 sequence region, the FILL7 sequence region, and the FILL10 sequence region. In one embodiment, the filler sequence region is the FILL3 sequence region, the FILL7 sequence region, and the FILL11 sequence region. In one embodiment, the filler sequence region is the FILL3 sequence region, the FILL7 sequence region, and the FILL12 sequence region. In one embodiment, the filler sequence region is the FILL3 sequence region, the FILL7 sequence region, and the FILL13 sequence region. In one embodiment, the filler sequence region is the FILL3 sequence region, the FILL7 sequence region, and the FILL14 sequence region. In one embodiment, the filler sequence region is the FILL3 sequence region, the FILL7 sequence region, and the FILL15 sequence region. In one embodiment, the filler sequence region is the FILL3 sequence region, the FILL7 sequence region, and the FILL16 sequence region. In one embodiment, the filler sequence region is the FILL3 sequence region, the FILL7 sequence region, and the FILL17 sequence region. In one embodiment, the filler sequence region is the FILL3 sequence region, the FILL7 sequence region, and the FILL18 sequence region. In one embodiment, the filler sequence region is the FILL3 sequence region, the FILL8 sequence region, and the FILL9 sequence region. In one embodiment, the filler sequence region is the FILL3 sequence region, the FILL8 sequence region, and the FILL10 sequence region. In one embodiment, the filler sequence region is the FILL3 sequence region, the FILL8 sequence region, and the FILL11 sequence region. In one embodiment, the filler sequence region is the FILL3 sequence region, the FILL8 sequence region, and the FILL12 sequence region. In one embodiment, the filler sequence region is the FILL3 sequence region, the FILL8 sequence region, and the FILL13 sequence region. In one embodiment, the filler sequence region is the FILL3 sequence region, the FILL8 sequence region, and the FILL14 sequence region. In one embodiment, the filler sequence region is the FILL3 sequence region, the FILL8 sequence region, and the FILL15 sequence region. In one embodiment, the filler sequence region is the FILL3 sequence region, the FILL8 sequence region, and the FILL16 sequence region. In one embodiment, the filler sequence region is the FILL3 sequence region, the FILL8 sequence region, and the FILL17 sequence region. In one embodiment, the filler sequence region is the FILL3 sequence region, the FILL8 sequence region, and the FILL18 sequence region. In one embodiment, the filler sequence region is the FILL3 sequence region, the FILL9 sequence region, and the FILL10 sequence region. In one embodiment, the filler sequence region is the FILL3 sequence region, the FILL9 sequence region, and the FILL11 sequence region. In one embodiment, the filler sequence region is the FILL3 sequence region, the FILL9 sequence region, and the FILL12 sequence region. In one embodiment, the filler sequence region is the FILL3 sequence region, the FILL9 sequence region, and the FILL13 sequence region. In one embodiment, the filler sequence region is the FILL3 sequence region, the FILL9 sequence region, and the FILL14 sequence region. In one embodiment, the filler sequence region is the FILL3 sequence region, the FILL9 sequence region, and the FILL15 sequence region. In one embodiment, the filler sequence region is the FILL3 sequence region, the FILL9 sequence region, and the FILL16 sequence region. In one embodiment, the filler sequence region is the FILL3 sequence region, the FILL9 sequence region, and the FILL17 sequence region. In one embodiment, the filler sequence region is the FILL3 sequence region, the FILL9 sequence region, and the FILL18 sequence region. In one embodiment, the filler sequence region is the FILL3 sequence region, the FILL10 sequence region, and the FILL11 sequence region. In one embodiment, the filler sequence region is the FILL3 sequence region, the FILL10 sequence region, and the FILL12 sequence region. In one embodiment, the filler sequence region is the FILL3 sequence region, the FILL10 sequence region, and the FILL13 sequence region. In one embodiment, the filler sequence region is the FILL3 sequence region, the FILL10 sequence region, and the FILL14 sequence region. In one embodiment, the filler sequence region is the FILL3 sequence region, the FILL10 sequence region, and the FILL15 sequence region. In one embodiment, the filler sequence region is the FILL3 sequence region, the FILL10 sequence region, and the FILL16 sequence region. In one embodiment, the filler sequence region is the FILL3 sequence region, the FILL10 sequence region, and the FILL17 sequence region. In one embodiment, the filler sequence region is the FILL3 sequence region, the FILL10 sequence region, and the FILL18 sequence region. In one embodiment, the filler sequence region is the FILL3 sequence region, the FILL11 sequence region, and the FILL12 sequence region. In one embodiment, the filler sequence region is the FILL3 sequence region, the FILL11 sequence region, and the FILL13 sequence region. In one embodiment, the filler sequence region is the FILL3 sequence region, the FILL11 sequence region, and the FILL14 sequence region. In one embodiment, the filler sequence region is the FILL3 sequence region, the FILL11 sequence region, and the FILL15 sequence region. In one embodiment, the filler sequence region is the FILL3 sequence region, the FILL11 sequence region, and the FILL16 sequence region. In one embodiment, the filler sequence region is the FILL3 sequence region, the FILL11 sequence region, and the FILL17 sequence region. In one embodiment, the filler sequence region is the FILL3 sequence region, the FILL11 sequence region, and the FILL18 sequence region. In one embodiment, the filler sequence region is the FILL3 sequence region, the FILL12 sequence region, and the FILL13 sequence region. In one embodiment, the filler sequence region is the FILL3 sequence region, the FILL12 sequence region, and the FILL14 sequence region. In one embodiment, the filler sequence region is the FILL3 sequence region, the FILL12 sequence region, and the FILL15 sequence region. In one embodiment, the filler sequence region is the FILL3 sequence region, the FILL12 sequence region, and the FILL16 sequence region. In one embodiment, the filler sequence region is the FILL3 sequence region, the FILL12 sequence region, and the FILL17 sequence region. In one embodiment, the filler sequence region is the FILL3 sequence region, the FILL12 sequence region, and the FILL18 sequence region. In one embodiment, the filler sequence region is the FILL3 sequence region, the FILL13 sequence region, and the FILL14 sequence region. In one embodiment, the filler sequence region is the FILL3 sequence region, the FILL13 sequence region, and the FILL15 sequence region. In one embodiment, the filler sequence region is the FILL3 sequence region, the FILL13 sequence region, and the FILL16 sequence region. In one embodiment, the filler sequence region is the FILL3 sequence region, the FILL13 sequence region, and the FILL17 sequence region. In one embodiment, the filler sequence region is the FILL3 sequence region, the FILL13 sequence region, and the FILL18 sequence region. In one embodiment, the filler sequence region is the FILL3 sequence region, the FILL14 sequence region, and the FILL15 sequence region. In one embodiment, the filler sequence region is the FILL3 sequence region, the FILL14 sequence region, and the FILL16 sequence region. In one embodiment, the filler sequence region is the FILL3 sequence region, the FILL14 sequence region, and the FILL17 sequence region. In one embodiment, the filler sequence region is the FILL3 sequence region, the FILL14 sequence region, and the FILL18 sequence region. In one embodiment, the filler sequence region is the FILL3 sequence region, the FILL15 sequence region, and the FILL16 sequence region. In one embodiment, the filler sequence region is the FILL3 sequence region, the FILL15 sequence region, and the FILL17 sequence region. In one embodiment, the filler sequence region is the FILL3 sequence region, the FILL15 sequence region, and the FILL18 sequence region. In one embodiment, the filler sequence region is the FILL3 sequence region, the FILL16 sequence region, and the FILL17 sequence region. In one embodiment, the filler sequence region is the FILL3 sequence region, the FILL16 sequence region, and the FILL18 sequence region. In one embodiment, the filler sequence region is the FILL3 sequence region, the FILL17 sequence region, and the FILL18 sequence region. In one embodiment, the filler sequence region is the FILL4 sequence region, the FILL5 sequence region, and the FILL6 sequence region. In one embodiment, the filler sequence region is the FILL4 sequence region, the FILL5 sequence region, and the FILL7 sequence region. In one embodiment, the filler sequence region is the FILL4 sequence region, the FILL5 sequence region, and the FILL8 sequence region. In one embodiment, the filler sequence region is the FILL4 sequence region, the FILL5 sequence region, and the FILL9 sequence region. In one embodiment, the filler sequence region is the FILL4 sequence region, the FILL5 sequence region, and the FILL10 sequence region. In one embodiment, the filler sequence region is the FILL4 sequence region, the FILL5 sequence region, and the FILL11 sequence region. In one embodiment, the filler sequence region is the FILL4 sequence region, the FILL5 sequence region, and the FILL12 sequence region. In one embodiment, the filler sequence region is the FILL4 sequence region, the FILL5 sequence region, and the FILL13 sequence region. In one embodiment, the filler sequence region is the FILL4 sequence region, the FILL5 sequence region, and the FILL14 sequence region. In one embodiment, the filler sequence region is the FILL4 sequence region, the FILL5 sequence region, and the FILL15 sequence region. In one embodiment, the filler sequence region is the FILL4 sequence region, the FILL5 sequence region, and the FILL16 sequence region. In one embodiment, the filler sequence region is the FILL4 sequence region, the FILL5 sequence region, and the FILL17 sequence region. In one embodiment, the filler sequence region is the FILL4 sequence region, the FILL5 sequence region, and the FILL18 sequence region. In one embodiment, the filler sequence region is the FILL4 sequence region, the FILL6 sequence region, and the FILL7 sequence region. In one embodiment, the filler sequence region is the FILL4 sequence region, the FILL6 sequence region, and the FILL8 sequence region. In one embodiment, the filler sequence region is the FILL4 sequence region, the FILL6 sequence region, and the FILL9 sequence region. In one embodiment, the filler sequence region is the FILL4 sequence region, the FILL6 sequence region, and the FILL10 sequence region. In one embodiment, the filler sequence region is the FILL4 sequence region, the FILL6 sequence region, and the FILL11 sequence region. In one embodiment, the filler sequence region is the FILL4 sequence region, the FILL6 sequence region, and the FILL12 sequence region. In one embodiment, the filler sequence region is the FILL4 sequence region, the FILL6 sequence region, and the FILL13 sequence region. In one embodiment, the filler sequence region is the FILL4 sequence region, the FILL6 sequence region, and the FILL14 sequence region. In one embodiment, the filler sequence region is the FILL4 sequence region, the FILL6 sequence region, and the FILL15 sequence region. In one embodiment, the filler sequence region is the FILL4 sequence region, the FILL6 sequence region, and the FILL16 sequence region. In one embodiment, the filler sequence region is the FILL4 sequence region, the FILL6 sequence region, and the FILL17 sequence region. In one embodiment, the filler sequence region is the FILL4 sequence region, the FILL6 sequence region, and the FILL18 sequence region. In one embodiment, the filler sequence region is the FILL4 sequence region, the FILL7 sequence region, and the FILL8 sequence region. In one embodiment, the filler sequence region is the FILL4 sequence region, the FILL7 sequence region, and the FILL9 sequence region. In one embodiment, the filler sequence region is the FILL4 sequence region, the FILL7 sequence region, and the FILL10 sequence region. In one embodiment, the filler sequence region is the FILL4 sequence region, the FILL7 sequence region, and the FILL11 sequence region. In one embodiment, the filler sequence region is the FILL4 sequence region, the FILL7 sequence region, and the FILL12 sequence region. In one embodiment, the filler sequence region is the FILL4 sequence region, the FILL7 sequence region, and the FILL13 sequence region. In one embodiment, the filler sequence region is the FILL4 sequence region, the FILL7 sequence region, and the FILL14 sequence region. In one embodiment, the filler sequence region is the FILL4 sequence region, the FILL7 sequence region, and the FILL15 sequence region. In one embodiment, the filler sequence region is the FILL4 sequence region, the FILL7 sequence region, and the FILL16 sequence region. In one embodiment, the filler sequence region is the FILL4 sequence region, the FILL7 sequence region, and the FILL17 sequence region. In one embodiment, the filler sequence region is the FILL4 sequence region, the FILL7 sequence region, and the FILL18 sequence region. In one embodiment, the filler sequence region is the FILL4 sequence region, the FILL8 sequence region, and the FILL9 sequence region. In one embodiment, the filler sequence region is the FILL4 sequence region, the FILL8 sequence region, and the FILL10 sequence region. In one embodiment, the filler sequence region is the FILL4 sequence region, the FILL8 sequence region, and the FILL11 sequence region. In one embodiment, the filler sequence region is the FILL4 sequence region, the FILL8 sequence region, and the FILL12 sequence region. In one embodiment, the filler sequence region is the FILL4 sequence region, the FILL8 sequence region, and the FILL13 sequence region. In one embodiment, the filler sequence region is the FILL4 sequence region, the FILL8 sequence region, and the FILL14 sequence region. In one embodiment, the filler sequence region is the FILL4 sequence region, the FILL8 sequence region, and the FILL15 sequence region. In one embodiment, the filler sequence region is the FILL4 sequence region, the FILL8 sequence region, and the FILL16 sequence region. In one embodiment, the filler sequence region is the FILL4 sequence region, the FILL8 sequence region, and the FILL17 sequence region. In one embodiment, the filler sequence region is the FILL4 sequence region, the FILL8 sequence region, and the FILL18 sequence region. In one embodiment, the filler sequence region is the FILL4 sequence region, the FILL9 sequence region, and the FILL10 sequence region. In one embodiment, the filler sequence region is the FILL4 sequence region, the FILL9 sequence region, and the FILL11 sequence region. In one embodiment, the filler sequence region is the FILL4 sequence region, the FILL9 sequence region, and the FILL12 sequence region. In one embodiment, the filler sequence region is the FILL4 sequence region, the FILL9 sequence region, and the FILL13 sequence region. In one embodiment, the filler sequence region is the FILL4 sequence region, the FILL9 sequence region, and the FILL14 sequence region. In one embodiment, the filler sequence region is the FILL4 sequence region, the FILL9 sequence region, and the FILL15 sequence region. In one embodiment, the filler sequence region is the FILL4 sequence region, the FILL9 sequence region, and the FILL16 sequence region. In one embodiment, the filler sequence region is the FILL4 sequence region, the FILL9 sequence region, and the FILL17 sequence region. In one embodiment, the filler sequence region is the FILL4 sequence region, the FILL9 sequence region, and the FILL18 sequence region. In one embodiment, the filler sequence region is the FILL4 sequence region, the FILL10 sequence region, and the FILL11 sequence region. In one embodiment, the filler sequence region is the FILL4 sequence region, the FILL10 sequence region, and the FILL12 sequence region. In one embodiment, the filler sequence region is the FILL4 sequence region, the FILL10 sequence region, and the FILL13 sequence region. In one embodiment, the filler sequence region is the FILL4 sequence region, the FILL10 sequence region, and the FILL14 sequence region. In one embodiment, the filler sequence region is the FILL4 sequence region, the FILL10 sequence region, and the FILL15 sequence region. In one embodiment, the filler sequence region is the FILL4 sequence region, the FILL10 sequence region, and the FILL16 sequence region. In one embodiment, the filler sequence region is the FILL4 sequence region, the FILL10 sequence region, and the FILL17 sequence region. In one embodiment, the filler sequence region is the FILL4 sequence region, the FILL10 sequence region, and the FILL18 sequence region. In one embodiment, the filler sequence region is the FILL4 sequence region, the FILL11 sequence region, and the FILL12 sequence region. In one embodiment, the filler sequence region is the FILL4 sequence region, the FILL11 sequence region, and the FILL13 sequence region. In one embodiment, the filler sequence region is the FILL4 sequence region, the FILL11 sequence region, and the FILL14 sequence region. In one embodiment, the filler sequence region is the FILL4 sequence region, the FILL11 sequence region, and the FILL15 sequence region. In one embodiment, the filler sequence region is the FILL4 sequence region, the FILL11 sequence region, and the FILL16 sequence region. In one embodiment, the filler sequence region is the FILL4 sequence region, the FILL11 sequence region, and the FILL17 sequence region. In one embodiment, the filler sequence region is the FILL4 sequence region, the FILL11 sequence region, and the FILL18 sequence region. In one embodiment, the filler sequence region is the FILL4 sequence region, the FILL12 sequence region, and the FILL13 sequence region. In one embodiment, the filler sequence region is the FILL4 sequence region, the FILL12 sequence region, and the FILL14 sequence region. In one embodiment, the filler sequence region is the FILL4 sequence region, the FILL12 sequence region, and the FILL15 sequence region. In one embodiment, the filler sequence region is the FILL4 sequence region, the FILL12 sequence region, and the FILL16 sequence region. In one embodiment, the filler sequence region is the FILL4 sequence region, the FILL12 sequence region, and the FILL17 sequence region. In one embodiment, the filler sequence region is the FILL4 sequence region, the FILL12 sequence region, and the FILL18 sequence region. In one embodiment, the filler sequence region is the FILL4 sequence region, the FILL13 sequence region, and the FILL14 sequence region. In one embodiment, the filler sequence region is the FILL4 sequence region, the FILL13 sequence region, and the FILL15 sequence region. In one embodiment, the filler sequence region is the FILL4 sequence region, the FILL13 sequence region, and the FILL16 sequence region. In one embodiment, the filler sequence region is the FILL4 sequence region, the FILL13 sequence region, and the FILL17 sequence region. In one embodiment, the filler sequence region is the FILL4 sequence region, the FILL13 sequence region, and the FILL18 sequence region. In one embodiment, the filler sequence region is the FILL4 sequence region, the FILL14 sequence region, and the FILL15 sequence region. In one embodiment, the filler sequence region is the FILL4 sequence region, the FILL14 sequence region, and the FILL16 sequence region. In one embodiment, the filler sequence region is the FILL4 sequence region, the FILL14 sequence region, and the FILL17 sequence region. In one embodiment, the filler sequence region is the FILL4 sequence region, the FILL14 sequence region, and the FILL18 sequence region. In one embodiment, the filler sequence region is the FILL4 sequence region, the FILL15 sequence region, and the FILL16 sequence region. In one embodiment, the filler sequence region is the FILL4 sequence region, the FILL15 sequence region, and the FILL17 sequence region. In one embodiment, the filler sequence region is the FILL4 sequence region, the FILL15 sequence region, and the FILL18 sequence region. In one embodiment, the filler sequence region is the FILL4 sequence region, the FILL16 sequence region, and the FILL17 sequence region. In one embodiment, the filler sequence region is the FILL4 sequence region, the FILL16 sequence region, and the FILL18 sequence region. In one embodiment, the filler sequence region is the FILL4 sequence region, the FILL17 sequence region, and the FILL18 sequence region. In one embodiment, the filler sequence region is the FILL5 sequence region, the FILL6 sequence region, and the FILL7 sequence region. In one embodiment, the filler sequence region is the FILL5 sequence region, the FILL6 sequence region, and the FILL8 sequence region. In one embodiment, the filler sequence region is the FILL5 sequence region, the FILL6 sequence region, and the FILL9 sequence region. In one embodiment, the filler sequence region is the FILL5 sequence region, the FILL6 sequence region, and the FILL10 sequence region. In one embodiment, the filler sequence region is the FILL5 sequence region, the FILL6 sequence region, and the FILL11 sequence region. In one embodiment, the filler sequence region is the FILL5 sequence region, the FILL6 sequence region, and the FILL12 sequence region. In one embodiment, the filler sequence region is the FILL5 sequence region, the FILL6 sequence region, and the FILL13 sequence region. In one embodiment, the filler sequence region is the FILL5 sequence region, the FILL6 sequence region, and the FILL14 sequence region. In one embodiment, the filler sequence region is the FILL5 sequence region, the FILL6 sequence region, and the FILL15 sequence region. In one embodiment, the filler sequence region is the FILL5 sequence region, the FILL6 sequence region, and the FILL16 sequence region. In one embodiment, the filler sequence region is the FILL5 sequence region, the FILL6 sequence region, and the FILL17 sequence region. In one embodiment, the filler sequence region is the FILL5 sequence region, the FILL6 sequence region, and the FILL18 sequence region. In one embodiment, the filler sequence region is the FILL5 sequence region, the FILL7 sequence region, and the FILL8 sequence region. In one embodiment, the filler sequence region is the FILL5 sequence region, the FILL7 sequence region, and the FILL9 sequence region. In one embodiment, the filler sequence region is the FILL5 sequence region, the FILL7 sequence region, and the FILL10 sequence region. In one embodiment, the filler sequence region is the FILL5 sequence region, the FILL7 sequence region, and the FILL11 sequence region. In one embodiment, the filler sequence region is the FILL5 sequence region, the FILL7 sequence region, and the FILL12 sequence region. In one embodiment, the filler sequence region is the FILL5 sequence region, the FILL7 sequence region, and the FILL13 sequence region. In one embodiment, the filler sequence region is the FILL5 sequence region, the FILL7 sequence region, and the FILL14 sequence region. In one embodiment, the filler sequence region is the FILL5 sequence region, the FILL7 sequence region, and the FILL15 sequence region. In one embodiment, the filler sequence region is the FILL5 sequence region, the FILL7 sequence region, and the FILL16 sequence region. In one embodiment, the filler sequence region is the FILL5 sequence region, the FILL7 sequence region, and the FILL17 sequence region. In one embodiment, the filler sequence region is the FILL5 sequence region, the FILL7 sequence region, and the FILL18 sequence region. In one embodiment, the filler sequence region is the FILL5 sequence region, the FILL8 sequence region, and the FILL9 sequence region. In one embodiment, the filler sequence region is the FILL5 sequence region, the FILL8 sequence region, and the FILL10 sequence region. In one embodiment, the filler sequence region is the FILL5 sequence region, the FILL8 sequence region, and the FILL1 sequence region. In one embodiment, the filler sequence region is the FILL5 sequence region, the FILL8 sequence region, and the FILL12 sequence region. In one embodiment, the filler sequence region is the FILL5 sequence region, the FILL8 sequence region, and the FILL13 sequence region. In one embodiment, the filler sequence region is the FILL5 sequence region, the FILL8 sequence region, and the FILL14 sequence region. In one embodiment, the filler sequence region is the FILL5 sequence region, the FILL8 sequence region, and the FILL15 sequence region. In one embodiment, the filler sequence region is the FILL5 sequence region, the FILL8 sequence region, and the FILL16 sequence region. In one embodiment, the filler sequence region is the FILL5 sequence region, the FILL8 sequence region, and the FILL17 sequence region. In one embodiment, the filler sequence region is the FILL5 sequence region, the FILL8 sequence region, and the FILL18 sequence region. In one embodiment, the filler sequence region is the FILL5 sequence region, the FILL9 sequence region, and the FILL10 sequence region. In one embodiment, the filler sequence region is the FILL5 sequence region, the FILL9 sequence region, and the FILL111 sequence region. In one embodiment, the filler sequence region is the FILL5 sequence region, the FILL9 sequence region, and the FILL12 sequence region. In one embodiment, the filler sequence region is the FILL5 sequence region, the FILL9 sequence region, and the FILL13 sequence region. In one embodiment, the filler sequence region is the FILL5 sequence region, the FILL9 sequence region, and the FILL14 sequence region. In one embodiment, the filler sequence region is the FILL5 sequence region, the FILL9 sequence region, and the FILL15 sequence region. In one embodiment, the filler sequence region is the FILL5 sequence region, the FILL9 sequence region, and the FILL16 sequence region. In one embodiment, the filler sequence region is the FILL5 sequence region, the FILL9 sequence region, and the FILL17 sequence region. In one embodiment, the filler sequence region is the FILL5 sequence region, the FILL9 sequence region, and the FILL18 sequence region. In one embodiment, the filler sequence region is the FILL5 sequence region, the FILL10 sequence region, and the FILL11 sequence region. In one embodiment, the filler sequence region is the FILL5 sequence region, the FILL10 sequence region, and the FILL12 sequence region. In one embodiment, the filler sequence region is the FILL5 sequence region, the FILL10 sequence region, and the FILL13 sequence region. In one embodiment, the filler sequence region is the FILL5 sequence region, the FILL10 sequence region, and the FILL14 sequence region. In one embodiment, the filler sequence region is the FILL5 sequence region, the FILL10 sequence region, and the FILL15 sequence region. In one embodiment, the filler sequence region is the FILL5 sequence region, the FILL10 sequence region, and the FILL16 sequence region. In one embodiment, the filler sequence region is the FILL5 sequence region, the FILL10 sequence region, and the FILL17 sequence region. In one embodiment, the filler sequence region is the FILL5 sequence region, the FILL10 sequence region, and the FILL18 sequence region. In one embodiment, the filler sequence region is the FILL5 sequence region, the FILL11 sequence region, and the FILL12 sequence region. In one embodiment, the filler sequence region is the FILL5 sequence region, the FILL11 sequence region, and the FILL13 sequence region. In one embodiment, the filler sequence region is the FILL5 sequence region, the FILL11 sequence region, and the FILL14 sequence region. In one embodiment, the filler sequence region is the FILL5 sequence region, the FILL11 sequence region, and the FILL15 sequence region. In one embodiment, the filler sequence region is the FILL5 sequence region, the FILL11 sequence region, and the FILL16 sequence region. In one embodiment, the filler sequence region is the FILL5 sequence region, the FILL11 sequence region, and the FILL17 sequence region. In one embodiment, the filler sequence region is the FILL5 sequence region, the FILL11 sequence region, and the FILL18 sequence region. In one embodiment, the filler sequence region is the FILL5 sequence region, the FILL12 sequence region, and the FILL13 sequence region. In one embodiment, the filler sequence region is the FILL5 sequence region, the FILL12 sequence region, and the FILL14 sequence region. In one embodiment, the filler sequence region is the FILL5 sequence region, the FILL12 sequence region, and the FILL15 sequence region. In one embodiment, the filler sequence region is the FILL5 sequence region, the FILL12 sequence region, and the FILL16 sequence region. In one embodiment, the filler sequence region is the FILL5 sequence region, the FILL12 sequence region, and the FILL17 sequence region. In one embodiment, the filler sequence region is the FILL5 sequence region, the FILL12 sequence region, and the FILL18 sequence region. In one embodiment, the filler sequence region is the FILL5 sequence region, the FILL13 sequence region, and the FILL14 sequence region. In one embodiment, the filler sequence region is the FILL5 sequence region, the FILL13 sequence region, and the FILL15 sequence region. In one embodiment, the filler sequence region is the FILL5 sequence region, the FILL13 sequence region, and the FILL16 sequence region. In one embodiment, the filler sequence region is the FILL5 sequence region, the FILL13 sequence region, and the FILL17 sequence region. In one embodiment, the filler sequence region is the FILL5 sequence region, the FILL13 sequence region, and the FILL18 sequence region. In one embodiment, the filler sequence region is the FILL5 sequence region, the FILL14 sequence region, and the FILL15 sequence region. In one embodiment, the filler sequence region is the FILL5 sequence region, the FILL14 sequence region, and the FILL16 sequence region. In one embodiment, the filler sequence region is the FILL5 sequence region, the FILL14 sequence region, and the FILL17 sequence region. In one embodiment, the filler sequence region is the FILL5 sequence region, the FILL14 sequence region, and the FILL18 sequence region. In one embodiment, the filler sequence region is the FILL5 sequence region, the FILL15 sequence region, and the FILL16 sequence region. In one embodiment, the filler sequence region is the FILL5 sequence region, the FILL15 sequence region, and the FILL17 sequence region. In one embodiment, the filler sequence region is the FILL5 sequence region, the FILL15 sequence region, and the FILL18 sequence region. In one embodiment, the filler sequence region is the FILL5 sequence region, the FILL16 sequence region, and the FILL17 sequence region. In one embodiment, the filler sequence region is the FILL5 sequence region, the FILL16 sequence region, and the FILL18 sequence region. In one embodiment, the filler sequence region is the FILL5 sequence region, the FILL17 sequence region, and the FILL18 sequence region. In one embodiment, the filler sequence region is the FILL6 sequence region, the FILL7 sequence region, and the FILL8 sequence region. In one embodiment, the filler sequence region is the FILL6 sequence region, the FILL7 sequence region, and the FILL9 sequence region. In one embodiment, the filler sequence region is the FILL6 sequence region, the FILL7 sequence region, and the FILL10 sequence region. In one embodiment, the filler sequence region is the FILL6 sequence region, the FILL7 sequence region, and the FILL11 sequence region. In one embodiment, the filler sequence region is the FILL6 sequence region, the FILL7 sequence region, and the FILL12 sequence region. In one embodiment, the filler sequence region is the FILL6 sequence region, the FILL7 sequence region, and the FILL13 sequence region. In one embodiment, the filler sequence region is the FILL6 sequence region, the FILL7 sequence region, and the FILL14 sequence region. In one embodiment, the filler sequence region is the FILL6 sequence region, the FILL7 sequence region, and the FILL15 sequence region. In one embodiment, the filler sequence region is the FILL6 sequence region, the FILL7 sequence region, and the FILL16 sequence region. In one embodiment, the filler sequence region is the FILL6 sequence region, the FILL7 sequence region, and the FILL17 sequence region. In one embodiment, the filler sequence region is the FILL6 sequence region, the FILL7 sequence region, and the FILL18 sequence region. In one embodiment, the filler sequence region is the FILL6 sequence region, the FILL8 sequence region, and the FILL9 sequence region. In one embodiment, the filler sequence region is the FILL6 sequence region, the FILL8 sequence region, and the FILL10 sequence region. In one embodiment, the filler sequence region is the FILL6 sequence region, the FILL8 sequence region, and the FILL11 sequence region. In one embodiment, the filler sequence region is the FILL6 sequence region, the FILL8 sequence region, and the FILL12 sequence region. In one embodiment, the filler sequence region is the FILL6 sequence region, the FILL8 sequence region, and the FILL13 sequence region. In one embodiment, the filler sequence region is the FILL6 sequence region, the FILL8 sequence region, and the FILL14 sequence region. In one embodiment, the filler sequence region is the FILL6 sequence region, the FILL8 sequence region, and the FILL15 sequence region. In one embodiment, the filler sequence region is the FILL6 sequence region, the FILL8 sequence region, and the FILL16 sequence region. In one embodiment, the filler sequence region is the FILL6 sequence region, the FILL8 sequence region, and the FILL17 sequence region. In one embodiment, the filler sequence region is the FILL6 sequence region, the FILL8 sequence region, and the FILL18 sequence region. In one embodiment, the filler sequence region is the FILL6 sequence region, the FILL9 sequence region, and the FILL10 sequence region. In one embodiment, the filler sequence region is the FILL6 sequence region, the FILL9 sequence region, and the FILL11 sequence region. In one embodiment, the filler sequence region is the FILL6 sequence region, the FILL9 sequence region, and the FILL12 sequence region. In one embodiment, the filler sequence region is the FILL6 sequence region, the FILL9 sequence region, and the FILL13 sequence region. In one embodiment, the filler sequence region is the FILL6 sequence region, the FILL9 sequence region, and the FILL14 sequence region. In one embodiment, the filler sequence region is the FILL6 sequence region, the FILL9 sequence region, and the FILL15 sequence region. In one embodiment, the filler sequence region is the FILL6 sequence region, the FILL9 sequence region, and the FILL16 sequence region. In one embodiment, the filler sequence region is the FILL6 sequence region, the FILL9 sequence region, and the FILL17 sequence region. In one embodiment, the filler sequence region is the FILL6 sequence region, the FILL9 sequence region, and the FILL18 sequence region. In one embodiment, the filler sequence region is the FILL6 sequence region, the FILL10 sequence region, and the FILL11 sequence region. In one embodiment, the filler sequence region is the FILL6 sequence region, the FILL10 sequence region, and the FILL12 sequence region. In one embodiment, the filler sequence region is the FILL6 sequence region, the FILL10 sequence region, and the FILL13 sequence region. In one embodiment, the filler sequence region is the FILL6 sequence region, the FILL10 sequence region, and the FILL14 sequence region. In one embodiment, the filler sequence region is the FILL6 sequence region, the FILL10 sequence region, and the FILL15 sequence region. In one embodiment, the filler sequence region is the FILL6 sequence region, the FILL10 sequence region, and the FILL16 sequence region. In one embodiment, the filler sequence region is the FILL6 sequence region, the FILL10 sequence region, and the FILL17 sequence region. In one embodiment, the filler sequence region is the FILL6 sequence region, the FILL10 sequence region, and the FILL18 sequence region. In one embodiment, the filler sequence region is the FILL6 sequence region, the FILL11 sequence region, and the FILL12 sequence region. In one embodiment, the filler sequence region is the FILL6 sequence region, the FILL11 sequence region, and the FILL13 sequence region. In one embodiment, the filler sequence region is the FILL6 sequence region, the FILL11 sequence region, and the FILL14 sequence region. In one embodiment, the filler sequence region is the FILL6 sequence region, the FILL11 sequence region, and the FILL15 sequence region. In one embodiment, the filler sequence region is the FILL6 sequence region, the FILL11 sequence region, and the FILL16 sequence region. In one embodiment, the filler sequence region is the FILL6 sequence region, the FILL11 sequence region, and the FILL17 sequence region. In one embodiment, the filler sequence region is the FILL6 sequence region, the FILL11 sequence region, and the FILL18 sequence region. In one embodiment, the filler sequence region is the FILL6 sequence region, the FILL12 sequence region, and the FILL13 sequence region. In one embodiment, the filler sequence region is the FILL6 sequence region, the FILL12 sequence region, and the FILL14 sequence region. In one embodiment, the filler sequence region is the FILL6 sequence region, the FILL12 sequence region, and the FILL15 sequence region. In one embodiment, the filler sequence region is the FILL6 sequence region, the FILL12 sequence region, and the FILL16 sequence region. In one embodiment, the filler sequence region is the FILL6 sequence region, the FILL12 sequence region, and the FILL17 sequence region. In one embodiment, the filler sequence region is the FILL6 sequence region, the FILL12 sequence region, and the FILL18 sequence region. In one embodiment, the filler sequence region is the FILL6 sequence region, the FILL13 sequence region, and the FILL14 sequence region. In one embodiment, the filler sequence region is the FILL6 sequence region, the FILL13 sequence region, and the FILL15 sequence region. In one embodiment, the filler sequence region is the FILL6 sequence region, the FILL13 sequence region, and the FILL16 sequence region. In one embodiment, the filler sequence region is the FILL6 sequence region, the FILL13 sequence region, and the FILL17 sequence region. In one embodiment, the filler sequence region is the FILL6 sequence region, the FILL13 sequence region, and the FILL18 sequence region. In one embodiment, the filler sequence region is the FILL6 sequence region, the FILL14 sequence region, and the FILL15 sequence region. In one embodiment, the filler sequence region is the FILL6 sequence region, the FILL14 sequence region, and the FILL16 sequence region. In one embodiment, the filler sequence region is the FILL6 sequence region, the FILL14 sequence region, and the FILL17 sequence region. In one embodiment, the filler sequence region is the FILL6 sequence region, the FILL14 sequence region, and the FILL18 sequence region. In one embodiment, the filler sequence region is the FILL6 sequence region, the FILL15 sequence region, and the FILL16 sequence region. In one embodiment, the filler sequence region is the FILL6 sequence region, the FILL15 sequence region, and the FILL17 sequence region. In one embodiment, the filler sequence region is the FILL6 sequence region, the FILL15 sequence region, and the FILL18 sequence region. In one embodiment, the filler sequence region is the FILL6 sequence region, the FILL16 sequence region, and the FILL17 sequence region. In one embodiment, the filler sequence region is the FILL6 sequence region, the FILL16 sequence region, and the FILL18 sequence region. In one embodiment, the filler sequence region is the FILL6 sequence region, the FILL17 sequence region, and the FILL18 sequence region. In one embodiment, the filler sequence region is the FILL7 sequence region, the FILL8 sequence region, and the FILL9 sequence region. In one embodiment, the filler sequence region is the FILL7 sequence region, the FILL8 sequence region, and the FILL10 sequence region. In one embodiment, the filler sequence region is the FILL7 sequence region, the FILL8 sequence region, and the FILL11 sequence region. In one embodiment, the filler sequence region is the FILL7 sequence region, the FILL5 sequence region, and the FILL12 sequence region. In one embodiment, the filler sequence region is the FILL7 sequence region, the FILL8 sequence region, and the FILL13 sequence region. In one embodiment, the filler sequence region is the FILL7 sequence region, the FILL5 sequence region, and the FILL14 sequence region. In one embodiment, the filler sequence region is the FILL7 sequence region, the FILL5 sequence region, and the FILL15 sequence region. In one embodiment, the filler sequence region is the FILL7 sequence region, the FILL8 sequence region, and the FILL16 sequence region. In one embodiment, the filler sequence region is the FILL7 sequence region, the FILL5 sequence region, and the FILL17 sequence region. In one embodiment, the filler sequence region is the FILL7 sequence region, the FILL5 sequence region, and the FILL18 sequence region. In one embodiment, the filler sequence region is the FILL7 sequence region, the FILL9 sequence region, and the FILL10 sequence region. In one embodiment, the filler sequence region is the FILL7 sequence region, the FILL9 sequence region, and the FILL11 sequence region. In one embodiment, the filler sequence region is the FILL7 sequence region, the FILL9 sequence region, and the FILL12 sequence region. In one embodiment, the filler sequence region is the FILL7 sequence region, the FILL9 sequence region, and the FILL13 sequence region. In one embodiment, the filler sequence region is the FILL7 sequence region, the FILL9 sequence region, and the FILL14 sequence region. In one embodiment, the filler sequence region is the FILL7 sequence region, the FILL9 sequence region, and the FILL15 sequence region. In one embodiment, the filler sequence region is the FILL7 sequence region, the FILL9 sequence region, and the FILL16 sequence region. In one embodiment, the filler sequence region is the FILL7 sequence region, the FILL9 sequence region, and the FILL17 sequence region. In one embodiment, the filler sequence region is the FILL7 sequence region, the FILL9 sequence region, and the FILL18 sequence region. In one embodiment, the filler sequence region is the FILL7 sequence region, the FILL10 sequence region, and the FILL11 sequence region. In one embodiment, the filler sequence region is the FILL7 sequence region, the FILL10 sequence region, and the FILL12 sequence region. In one embodiment, the filler sequence region is the FILL7 sequence region, the FILL10 sequence region, and the FILL13 sequence region. In one embodiment, the filler sequence region is the FILL7 sequence region, the FILL10 sequence region, and the FILL14 sequence region. In one embodiment, the filler sequence region is the FILL7 sequence region, the FILL10 sequence region, and the FILL15 sequence region. In one embodiment, the filler sequence region is the FILL7 sequence region, the FILL10 sequence region, and the FILL16 sequence region. In one embodiment, the filler sequence region is the FILL7 sequence region, the FILL10 sequence region, and the FILL17 sequence region. In one embodiment, the filler sequence region is the FILL7 sequence region, the FILL10 sequence region, and the FILL18 sequence region. In one embodiment, the filler sequence region is the FILL7 sequence region, the FILL11 sequence region, and the FILL12 sequence region. In one embodiment, the filler sequence region is the FILL7 sequence region, the FILL11 sequence region, and the FILL13 sequence region. In one embodiment, the filler sequence region is the FILL7 sequence region, the FILL11 sequence region, and the FILL14 sequence region. In one embodiment, the filler sequence region is the FILL7 sequence region, the FILL11 sequence region, and the FILL15 sequence region. In one embodiment, the filler sequence region is the FILL7 sequence region, the FILL11 sequence region, and the FILL16 sequence region. In one embodiment, the filler sequence region is the FILL7 sequence region, the FILL11 sequence region, and the FILL17 sequence region. In one embodiment, the filler sequence region is the FILL7 sequence region, the FILL11 sequence region, and the FILL18 sequence region. In one embodiment, the filler sequence region is the FILL7 sequence region, the FILL12 sequence region, and the FILL13 sequence region. In one embodiment, the filler sequence region is the FILL7 sequence region, the FILL12 sequence region, and the FILL14 sequence region. In one embodiment, the filler sequence region is the FILL7 sequence region, the FILL12 sequence region, and the FILL15 sequence region. In one embodiment, the filler sequence region is the FILL7 sequence region, the FILL12 sequence region, and the FILL16 sequence region. In one embodiment, the filler sequence region is the FILL7 sequence region, the FILL12 sequence region, and the FILL17 sequence region. In one embodiment, the filler sequence region is the FILL7 sequence region, the FILL12 sequence region, and the FILL18 sequence region. In one embodiment, the filler sequence region is the FILL7 sequence region, the FILL13 sequence region, and the FILL14 sequence region. In one embodiment, the filler sequence region is the FILL7 sequence region, the FILL13 sequence region, and the FILL15 sequence region. In one embodiment, the filler sequence region is the FILL7 sequence region, the FILL13 sequence region, and the FILL16 sequence region. In one embodiment, the filler sequence region is the FILL7 sequence region, the FILL13 sequence region, and the FILL17 sequence region. In one embodiment, the filler sequence region is the FILL7 sequence region, the FILL13 sequence region, and the FILL18 sequence region. In one embodiment, the filler sequence region is the FILL7 sequence region, the FILL14 sequence region, and the FILL15 sequence region. In one embodiment, the filler sequence region is the FILL7 sequence region, the FILL14 sequence region, and the FILL16 sequence region. In one embodiment, the filler sequence region is the FILL7 sequence region, the FILL14 sequence region, and the FILL17 sequence region. In one embodiment, the filler sequence region is the FILL7 sequence region, the FILL14 sequence region, and the FILL18 sequence region. In one embodiment, the filler sequence region is the FILL7 sequence region, the FILL15 sequence region, and the FILL16 sequence region. In one embodiment, the filler sequence region is the FILL7 sequence region, the FILL15 sequence region, and the FILL17 sequence region. In one embodiment, the filler sequence region is the FILL7 sequence region, the FILL15 sequence region, and the FILL18 sequence region. In one embodiment, the filler sequence region is the FILL7 sequence region, the FILL16 sequence region, and the FILL17 sequence region. In one embodiment, the filler sequence region is the FILL7 sequence region, the FILL16 sequence region, and the FILL18 sequence region. In one embodiment, the filler sequence region is the FILL7 sequence region, the FILL17 sequence region, and the FILL18 sequence region. In one embodiment, the filler sequence region is the FILL8 sequence region, the FILL9 sequence region, and the FILL10 sequence region. In one embodiment, the filler sequence region is the FILL8 sequence region, the FILL9 sequence region, and the FILL11 sequence region. In one embodiment, the filler sequence region is the FILL8 sequence region, the FILL9 sequence region, and the FILL12 sequence region. In one embodiment, the filler sequence region is the FILL8 sequence region, the FILL9 sequence region, and the FILL13 sequence region. In one embodiment, the filler sequence region is the FILL8 sequence region, the FILL9 sequence region, and the FILL14 sequence region. In one embodiment, the filler sequence region is the FILL8 sequence region, the FILL9 sequence region, and the FILL15 sequence region. In one embodiment, the filler sequence region is the FILL8 sequence region, the FILL9 sequence region, and the FILL16 sequence region. In one embodiment, the filler sequence region is the FILL8 sequence region, the FILL9 sequence region, and the FILL17 sequence region. In one embodiment, the filler sequence region is the FILL8 sequence region, the FILL9 sequence region, and the FILL18 sequence region. In one embodiment, the filler sequence region is the FILL8 sequence region, the FILL10 sequence region, and the FILL11 sequence region. In one embodiment, the filler sequence region is the FILL8 sequence region, the FILL10 sequence region, and the FILL12 sequence region. In one embodiment, the filler sequence region is the FILL8 sequence region, the FILL10 sequence region, and the FILL13 sequence region. In one embodiment, the filler sequence region is the FILL8 sequence region, the FILL10 sequence region, and the FILL14 sequence region. In one embodiment, the filler sequence region is the FILL8 sequence region, the FILL10 sequence region, and the FILL15 sequence region. In one embodiment, the filler sequence region is the FILL8 sequence region, the FILL10 sequence region, and the FILL16 sequence region. In one embodiment, the filler sequence region is the FILL8 sequence region, the FILL10 sequence region, and the FILL17 sequence region. In one embodiment, the filler sequence region is the FILL8 sequence region, the FILL10 sequence region, and the FILL18 sequence region. In one embodiment, the filler sequence region is the FILL8 sequence region, the FILL11 sequence region, and the FILL12 sequence region. In one embodiment, the filler sequence region is the FILL8 sequence region, the FILL11 sequence region, and the FILL13 sequence region. In one embodiment, the filler sequence region is the FILL8 sequence region, the FILL11 sequence region, and the FILL14 sequence region. In one embodiment, the filler sequence region is the FILL8 sequence region, the FILL11 sequence region, and the FILL15 sequence region. In one embodiment, the filler sequence region is the FILL8 sequence region, the FILL11 sequence region, and the FILL16 sequence region. In one embodiment, the filler sequence region is the FILL8 sequence region, the FILL11 sequence region, and the FILL17 sequence region. In one embodiment, the filler sequence region is the FILL8 sequence region, the FILL11 sequence region, and the FILL18 sequence region. In one embodiment, the filler sequence region is the FILL8 sequence region, the FILL12 sequence region, and the FILL13 sequence region. In one embodiment, the filler sequence region is the FILL8 sequence region, the FILL12 sequence region, and the FILL14 sequence region. In one embodiment, the filler sequence region is the FILL8 sequence region, the FILL12 sequence region, and the FILL15 sequence region. In one embodiment, the filler sequence region is the FILL8 sequence region, the FILL12 sequence region, and the FILL16 sequence region. In one embodiment, the filler sequence region is the FILL8 sequence region, the FILL12 sequence region, and the FILL17 sequence region. In one embodiment, the filler sequence region is the FILL8 sequence region, the FILL12 sequence region, and the FILL18 sequence region. In one embodiment, the filler sequence region is the FILL8 sequence region, the FILL13 sequence region, and the FILL14 sequence region. In one embodiment, the filler sequence region is the FILL8 sequence region, the FILL13 sequence region, and the FILL15 sequence region. In one embodiment, the filler sequence region is the FILL8 sequence region, the FILL13 sequence region, and the FILL16 sequence region. In one embodiment, the filler sequence region is the FILL8 sequence region, the FILL13 sequence region, and the FILL17 sequence region. In one embodiment, the filler sequence region is the FILL8 sequence region, the FILL13 sequence region, and the FILL18 sequence region. In one embodiment, the filler sequence region is the FILL8 sequence region, the FILL14 sequence region, and the FILL15 sequence region. In one embodiment, the filler sequence region is the FILL8 sequence region, the FILL14 sequence region, and the FILL16 sequence region. In one embodiment, the filler sequence region is the FILL8 sequence region, the FILL14 sequence region, and the FILL17 sequence region. In one embodiment, the filler sequence region is the FILL8 sequence region, the FILL14 sequence region, and the FILL18 sequence region. In one embodiment, the filler sequence region is the FILL8 sequence region, the FILL15 sequence region, and the FILL16 sequence region. In one embodiment, the filler sequence region is the FILL8 sequence region, the FILL15 sequence region, and the FILL17 sequence region. In one embodiment, the filler sequence region is the FILL8 sequence region, the FILL15 sequence region, and the FILL18 sequence region. In one embodiment, the filler sequence region is the FILL8 sequence region, the FILL16 sequence region, and the FILL17 sequence region. In one embodiment, the filler sequence region is the FILL8 sequence region, the FILL16 sequence region, and the FILL18 sequence region. In one embodiment, the filler sequence region is the FILL8 sequence region, the FILL17 sequence region, and the FILL18 sequence region. In one embodiment, the filler sequence region is the FILL9 sequence region, the FILL10 sequence region, and the FILL11 sequence region. In one embodiment, the filler sequence region is the FILL9 sequence region, the FILL10 sequence region, and the FILL12 sequence region. In one embodiment, the filler sequence region is the FILL9 sequence region, the FILL10 sequence region, and the FILL13 sequence region. In one embodiment, the filler sequence region is the FILL9 sequence region, the FILL10 sequence region, and the FILL14 sequence region. In one embodiment, the filler sequence region is the FILL9 sequence region, the FILL10 sequence region, and the FILL15 sequence region. In one embodiment, the filler sequence region is the FILL9 sequence region, the FILL10 sequence region, and the FILL16 sequence region. In one embodiment, the filler sequence region is the FILL9 sequence region, the FILL10 sequence region, and the FILL17 sequence region. In one embodiment, the filler sequence region is the FILL9 sequence region, the FILL10 sequence region, and the FILL18 sequence region. In one embodiment, the filler sequence region is the FILL9 sequence region, the FILL11 sequence region, and the FILL12 sequence region. In one embodiment, the filler sequence region is the FILL9 sequence region, the FILL11 sequence region, and the FILL13 sequence region. In one embodiment, the filler sequence region is the FILL9 sequence region, the FILL11 sequence region, and the FILL14 sequence region. In one embodiment, the filler sequence region is the FILL9 sequence region, the FILL11 sequence region, and the FILL15 sequence region. In one embodiment, the filler sequence region is the FILL9 sequence region, the FILL11 sequence region, and the FILL16 sequence region. In one embodiment, the filler sequence region is the FILL9 sequence region, the FILL11 sequence region, and the FILL17 sequence region. In one embodiment, the filler sequence region is the FILL9 sequence region, the FILL11 sequence region, and the FILL18 sequence region. In one embodiment, the filler sequence region is the FILL9 sequence region, the FILL12 sequence region, and the FILL13 sequence region. In one embodiment, the filler sequence region is the FILL9 sequence region, the FILL12 sequence region, and the FILL14 sequence region. In one embodiment, the filler sequence region is the FILL9 sequence region, the FILL12 sequence region, and the FILL15 sequence region. In one embodiment, the filler sequence region is the FILL9 sequence region, the FILL12 sequence region, and the FILL16 sequence region. In one embodiment, the filler sequence region is the FILL9 sequence region, the FILL12 sequence region, and the FILL17 sequence region. In one embodiment, the filler sequence region is the FILL9 sequence region, the FILL12 sequence region, and the FILL18 sequence region. In one embodiment, the filler sequence region is the FILL9 sequence region, the FILL13 sequence region, and the FILL14 sequence region. In one embodiment, the filler sequence region is the FILL9 sequence region, the FILL13 sequence region, and the FILL15 sequence region. In one embodiment, the filler sequence region is the FILL9 sequence region, the FILL13 sequence region, and the FILL16 sequence region. In one embodiment, the filler sequence region is the FILL9 sequence region, the FILL13 sequence region, and the FILL17 sequence region. In one embodiment, the filler sequence region is the FILL9 sequence region, the FILL13 sequence region, and the FILL18 sequence region. In one embodiment, the filler sequence region is the FILL9 sequence region, the FILL14 sequence region, and the FILL15 sequence region. In one embodiment, the filler sequence region is the FILL9 sequence region, the FILL14 sequence region, and the FILL16 sequence region. In one embodiment, the filler sequence region is the FILL9 sequence region, the FILL14 sequence region, and the FILL17 sequence region. In one embodiment, the filler sequence region is the FILL9 sequence region, the FILL14 sequence region, and the FILL18 sequence region. In one embodiment, the filler sequence region is the FILL9 sequence region, the FILL15 sequence region, and the FILL16 sequence region. In one embodiment, the filler sequence region is the FILL9 sequence region, the FILL15 sequence region, and the FILL17 sequence region. In one embodiment, the filler sequence region is the FILL9 sequence region, the FILL15 sequence region, and the FILL18 sequence region. In one embodiment, the filler sequence region is the FILL9 sequence region, the FILL16 sequence region, and the FILL17 sequence region. In one embodiment, the filler sequence region is the FILL9 sequence region, the FILL16 sequence region, and the FILL18 sequence region. In one embodiment, the filler sequence region is the FILL9 sequence region, the FILL17 sequence region, and the FILL18 sequence region. In one embodiment, the filler sequence region is the FILL10 sequence region, the FILL11 sequence region, and the FILL12 sequence region. In one embodiment, the filler sequence region is the FILL10 sequence region, the FILL11 sequence region, and the FILL13 sequence region. In one embodiment, the filler sequence region is the FILL10 sequence region, the FILL11 sequence region, and the FILL14 sequence region. In one embodiment, the filler sequence region is the FILL10 sequence region, the FILL11 sequence region, and the FILL15 sequence region. In one embodiment, the filler sequence region is the FILL10 sequence region, the FILL11 sequence region, and the FILL16 sequence region. In one embodiment, the filler sequence region is the FILL10 sequence region, the FILL11 sequence region, and the FILL17 sequence region. In one embodiment, the filler sequence region is the FILL10 sequence region, the FILL11 sequence region, and the FILL18 sequence region. In one embodiment, the filler sequence region is the FILL10 sequence region, the FILL12 sequence region, and the FILL13 sequence region. In one embodiment, the filler sequence region is the FILL10 sequence region, the FILL12 sequence region, and the FILL14 sequence region. In one embodiment, the filler sequence region is the FILL10 sequence region, the FILL12 sequence region, and the FILL15 sequence region. In one embodiment, the filler sequence region is the FILL10 sequence region, the FILL12 sequence region, and the FILL16 sequence region. In one embodiment, the filler sequence region is the FILL10 sequence region, the FILL12 sequence region, and the FILL17 sequence region. In one embodiment, the filler sequence region is the FILL10 sequence region, the FILL12 sequence region, and the FILL18 sequence region. In one embodiment, the filler sequence region is the FILL10 sequence region, the FILL13 sequence region, and the FILL14 sequence region. In one embodiment, the filler sequence region is the FILL10 sequence region, the FILL13 sequence region, and the FILL15 sequence region. In one embodiment, the filler sequence region is the FILL10 sequence region, the FILL13 sequence region, and the FILL16 sequence region. In one embodiment, the filler sequence region is the FILL10 sequence region, the FILL13 sequence region, and the FILL17 sequence region. In one embodiment, the filler sequence region is the FILL10 sequence region, the FILL13 sequence region, and the FILL18 sequence region. In one embodiment, the filler sequence region is the FILL10 sequence region, the FILL14 sequence region, and the FILL15 sequence region. In one embodiment, the filler sequence region is the FILL10 sequence region, the FILL14 sequence region, and the FILL16 sequence region. In one embodiment, the filler sequence region is the FILL10 sequence region, the FILL14 sequence region, and the FILL17 sequence region. In one embodiment, the filler sequence region is the FILL10 sequence region, the FILL14 sequence region, and the FILL18 sequence region. In one embodiment, the filler sequence region is the FILL10 sequence region, the FILL15 sequence region, and the FILL16 sequence region. In one embodiment, the filler sequence region is the FILL10 sequence region, the FILL15 sequence region, and the FILL17 sequence region. In one embodiment, the filler sequence region is the FILL10 sequence region, the FILL15 sequence region, and the FILL18 sequence region. In one embodiment, the filler sequence region is the FILL10 sequence region, the FILL16 sequence region, and the FILL17 sequence region. In one embodiment, the filler sequence region is the FILL10 sequence region, the FILL16 sequence region, and the FILL18 sequence region. In one embodiment, the filler sequence region is the FILL10 sequence region, the FILL17 sequence region, and the FILL18 sequence region. In one embodiment, the filler sequence region is the FILL11 sequence region, the FILL12 sequence region, and the FILL13 sequence region. In one embodiment, the filler sequence region is the FILL11 sequence region, the FILL12 sequence region, and the FILL14 sequence region. In one embodiment, the filler sequence region is the FILL11 sequence region, the FILL12 sequence region, and the FILL15 sequence region. In one embodiment, the filler sequence region is the FILL11 sequence region, the FILL12 sequence region, and the FILL16 sequence region. In one embodiment, the filler sequence region is the FILL11 sequence region, the FILL12 sequence region, and the FILL17 sequence region. In one embodiment, the filler sequence region is the FILL11 sequence region, the FILL12 sequence region, and the FILL18 sequence region. In one embodiment, the filler sequence region is the FILL11 sequence region, the FILL13 sequence region, and the FILL14 sequence region. In one embodiment, the filler sequence region is the FILL11 sequence region, the FILL13 sequence region, and the FILL15 sequence region. In one embodiment, the filler sequence region is the FILL11 sequence region, the FILL13 sequence region, and the FILL16 sequence region. In one embodiment, the filler sequence region is the FILL11 sequence region, the FILL13 sequence region, and the FILL17 sequence region. In one embodiment, the filler sequence region is the FILL11 sequence region, the FILL13 sequence region, and the FILL18 sequence region. In one embodiment, the filler sequence region is the FILL11 sequence region, the FILL14 sequence region, and the FILL15 sequence region. In one embodiment, the filler sequence region is the FILL11 sequence region, the FILL14 sequence region, and the FILL16 sequence region. In one embodiment, the filler sequence region is the FILL11 sequence region, the FILL14 sequence region, and the FILL17 sequence region. In one embodiment, the filler sequence region is the FILL11 sequence region, the FILL14 sequence region, and the FILL18 sequence region. In one embodiment, the filler sequence region is the FILL11 sequence region, the FILL15 sequence region, and the FILL16 sequence region. In one embodiment, the filler sequence region is the FILL11 sequence region, the FILL15 sequence region, and the FILL17 sequence region. In one embodiment, the filler sequence region is the FILL11 sequence region, the FILL15 sequence region, and the FILL18 sequence region. In one embodiment, the filler sequence region is the FILL11 sequence region, the FILL16 sequence region, and the FILL17 sequence region. In one embodiment, the filler sequence region is the FILL11 sequence region, the FILL16 sequence region, and the FILL18 sequence region. In one embodiment, the filler sequence region is the FILL11 sequence region, the FILL17 sequence region, and the FILL18 sequence region. In one embodiment, the filler sequence region is the FILL12 sequence region, the FILL13 sequence region, and the FILL14 sequence region. In one embodiment, the filler sequence region is the FILL12 sequence region, the FILL13 sequence region, and the FILL15 sequence region. In one embodiment, the filler sequence region is the FILL12 sequence region, the FILL13 sequence region, and the FILL16 sequence region. In one embodiment, the filler sequence region is the FILL12 sequence region, the FILL13 sequence region, and the FILL17 sequence region. In one embodiment, the filler sequence region is the FILL12 sequence region, the FILL13 sequence region, and the FILL18 sequence region. In one embodiment, the filler sequence region is the FILL12 sequence region, the FILL14 sequence region, and the FILL15 sequence region. In one embodiment, the filler sequence region is the FILL12 sequence region, the FILL14 sequence region, and the FILL16 sequence region. In one embodiment, the filler sequence region is the FILL12 sequence region, the FILL14 sequence region, and the FILL17 sequence region. In one embodiment, the filler sequence region is the FILL12 sequence region, the FILL14 sequence region, and the FILL18 sequence region. In one embodiment, the filler sequence region is the FILL12 sequence region, the FILL15 sequence region, and the FILL16 sequence region. In one embodiment, the filler sequence region is the FILL12 sequence region, the FILL15 sequence region, and the FILL17 sequence region. In one embodiment, the filler sequence region is the FILL12 sequence region, the FILL15 sequence region, and the FILL18 sequence region. In one embodiment, the filler sequence region is the FILL12 sequence region, the FILL16 sequence region, and the FILL17 sequence region. In one embodiment, the filler sequence region is the FILL12 sequence region, the FILL16 sequence region, and the FILL18 sequence region. In one embodiment, the filler sequence region is the FILL12 sequence region, the FILL17 sequence region, and the FILL18 sequence region. In one embodiment, the filler sequence region is the FILL13 sequence region, the FILL14 sequence region, and the FILL15 sequence region. In one embodiment, the filler sequence region is the FILL13 sequence region, the FILL14 sequence region, and the FILL16 sequence region. In one embodiment, the filler sequence region is the FILL13 sequence region, the FILL14 sequence region, and the FILL17 sequence region. In one embodiment, the filler sequence region is the FILL13 sequence region, the FILL14 sequence region, and the FILL18 sequence region. In one embodiment, the filler sequence region is the FILL13 sequence region, the FILL15 sequence region, and the FILL16 sequence region. In one embodiment, the filler sequence region is the FILL13 sequence region, the FILL15 sequence region, and the FILL17 sequence region. In one embodiment, the filler sequence region is the FILL13 sequence region, the FILL15 sequence region, and the FILL18 sequence region. In one embodiment, the filler sequence region is the FILL13 sequence region, the FILL16 sequence region, and the FILL17 sequence region. In one embodiment, the filler sequence region is the FILL13 sequence region, the FILL16 sequence region, and the FILL18 sequence region. In one embodiment, the filler sequence region is the FILL13 sequence region, the FILL17 sequence region, and the FILL18 sequence region. In one embodiment, the filler sequence region is the FILL14 sequence region, the FILL15 sequence region, and the FILL16 sequence region. In one embodiment, the filler sequence region is the FILL14 sequence region, the FILL15 sequence region, and the FILL17 sequence region. In one embodiment, the filler sequence region is the FILL14 sequence region, the FILL15 sequence region, and the FILL18 sequence region. In one embodiment, the filler sequence region is the FILL14 sequence region, the FILL16 sequence region, and the FILL17 sequence region. In one embodiment, the filler sequence region is the FILL14 sequence region, the FILL16 sequence region, and the FILL18 sequence region. In one embodiment, the filler sequence region is the FILL14 sequence region, the FILL17 sequence region, and the FILL18 sequence region. In one embodiment, the filler sequence region is the FILL15 sequence region, the FILL16 sequence region, and the FILL17 sequence region. In one embodiment, the filler sequence region is the FILL5 sequence region, the FILL16 sequence region, and the FILL18 sequence region. In one embodiment, the filler sequence region is the FILL15 sequence region, the FILL17 sequence region, and the FILL18 sequence region. In one embodiment, the filler sequence region is the FILL16 sequence region, the FILL17 sequence region, and the FILL18 sequence region.

[0705] In one embodiment, the AAV particle viral genome may comprise at least one enhancer sequence region. The enhancer sequence region(s) may, independently, have a length such as, but not limited to, 300, 301, 302, 303, 304, 305, 306, 307, 308, 309, 310, 311, 312, 313, 314, 315, 316, 317, 318, 319, 320, 321, 322, 323, 324, 325, 326, 327, 328, 329, 330, 331, 332, 333, 334, 335, 336, 337, 338, 339, 340, 341, 342, 343, 344, 345, 346, 347, 348, 349, 350, 351, 352, 353, 354, 355, 356, 357, 358, 359, 360, 361, 362, 363, 364, 365, 366, 367, 368, 369, 370, 371, 372, 373, 374, 375, 376, 377, 378, 379, 380, 381, 382, 383, 384, 385, 386, 387, 388, 389, 390, 391, 392, 393, 394, 395, 396, 397, 398, 399, and 400 nucleotides. The length of the enhancer region for the viral genome may be 300-310, 300-325, 305-315, 310-320, 315-325, 320-330, 325-335, 325-350, 330-340, 335-345, 340-350, 345-355, 350-360, 350-375, 355-365, 360-370, 365-375, 370-380, 375-385, 375-400, 380-390, 385-395, and 390-400 nucleotides. As a non-limiting example, the viral genome comprises an enhancer region that is about 303 nucleotides in length. As a non-limiting example, the viral genome comprises an enhancer region that is about 382 nucleotides in length.

[0706] In one embodiment, the AAV particle viral genome comprises at least one enhancer sequence region. Non-limiting examples of enhancer sequence regions are described in Table 20.

TABLE 20
Enhancer Sequence Regions

| Sequence Region Name | SEQ ID NO |
|---|---|
| Enhancer1 | 1814 |
| Enhancer2 | 1815 |

[0707] In one embodiment, the AAV particle viral genome comprises one enhancer sequence region. In one embodiment, the enhancer sequence regions is the Enhancer1 sequence region. In one embodiment, the enhancer sequence regions is the Enhancer2 sequence region.

[0708] In one embodiment, the AAV particle viral genome comprises two enhancer sequence regions. In one embodiment, the enhancer sequence regions are the Enhancer1 sequence region and the Enhancer 2 sequence region.

[0709] In one embodiment, the AAV particle viral genome may comprise at least one promoter sequence region. The promoter sequence region(s) may, independently, have a length such as, but not limited to, 4, 5, 6, 7, 8, 9, 10, 11, 12, 13, 14, 15, 16, 17, 18, 19, 20, 21, 22, 23, 24, 25, 26, 27, 28, 29, 30, 31, 32, 33, 34, 35, 36, 37, 38, 39, 40, 41, 42, 43, 44, 45, 46, 47, 48, 49, 50, 51, 52, 53, 54, 55, 56, 57, 58, 59, 60, 61, 62, 63, 64, 65, 66, 67, 68, 69, 70, 71, 72, 73, 74, 75, 76, 77, 78, 79, 80, 81, 82, 83, 84, 85, 86, 87, 88, 89, 90, 91, 92, 93, 94, 95, 96, 97, 98, 99, 100, 101, 102, 103, 104, 105, 106, 107, 108, 109, 110, 111, 112, 113, 114, 115, 116, 117, 118, 119, 120, 121, 122, 123, 124, 125, 126, 127, 128, 129, 130, 131, 132, 133, 134, 135, 136, 137, 138, 139, 140, 141, 142, 143, 144, 145, 146, 147, 148, 149, 150, 151, 152, 153, 154, 155, 156, 157, 158, 159, 160, 161, 162, 163, 164, 165, 166, 167, 168, 169, 170, 171, 172, 173, 174, 175, 176, 177, 178, 179, 180, 181, 182, 183, 184, 185, 186, 187, 188, 189, 190, 191, 192, 193, 194, 195, 196, 197, 198, 199, 200, 201, 202, 203, 204, 205, 206, 207, 208, 209, 210, 211, 212, 213, 214, 215, 216, 217, 218, 219, 220, 221, 222, 223, 224, 225, 226, 227, 228, 229, 230, 231, 232, 233, 234, 235, 236, 237, 238, 239, 240, 241, 242, 243, 244, 245, 246, 247, 248, 249, 250, 251, 252, 253, 254, 255, 256, 257, 258, 259, 260, 261, 262, 263, 264, 265, 266, 267, 268, 269, 270, 271, 272, 273, 274, 275, 276, 277, 278, 279, 280, 281, 282, 283, 284, 285, 286, 287, 288, 289, 290, 291, 292, 293, 294, 295, 296, 297, 298, 299, 300, 301, 302, 303, 304, 305, 306, 307, 308, 309, 310, 311, 312, 313, 314, 315, 316, 317, 318, 319, 320, 321, 322, 323, 324, 325, 326, 327, 328, 329, 330, 331, 332, 333, 334, 335, 336, 337, 338, 339, 340, 341, 342, 343, 344, 345, 346, 347, 348, 349, 350, 351, 352, 353, 354, 355, 356, 357, 358, 359, 360, 361, 362, 363, 364, 365, 366, 367, 368, 369, 370, 371, 372, 373, 374, 375, 376, 377, 378, 379, 380, 381, 382, 383, 384, 385, 386, 387, 388, 389, 390, 391, 392, 393, 394, 395, 396, 397, 398, 399, 400, 401, 402, 403, 404, 405, 406, 407, 408, 409, 410, 411, 412, 413, 414, 415, 416, 417, 418, 419, 420, 421, 422, 423, 424, 425, 426, 427, 428, 429, 430, 431, 432, 433, 434, 435, 436, 437, 438, 439, 440, 441, 442, 443, 444, 445, 446, 447, 448, 449, 450, 450, 451, 452, 453, 454, 455, 456, 457, 458, 459, 460, 461, 462, 463, 464, 465, 466, 467, 468, 469, 470, 471, 472, 473, 474, 475, 476, 477, 478, 479, 480, 481, 482, 483, 484, 485, 486, 487, 488, 489, 490, 491, 492, 493, 494, 495, 496, 497, 498, 499, 500, 501, 502, 503, 504, 505, 506, 507, 508, 509, 510, 511, 512, 513, 514, 515, 516, 517, 518, 519, 520, 521, 522, 523, 524, 525, 526, 527, 528, 529, 530, 531, 532, 533, 534, 535, 536, 537, 538, 539, 540, 541, 542, 543, 544, 545, 546, 547, 548, 549, 550, 551, 552, 553, 554, 555, 556, 557, 558, 559, 560, 561, 562, 563, 564, 565, 566, 567, 568, 569, 570, 571, 572, 573, 574, 575, 576, 577, 578, 579, 580, 581, 582, 583, 584, 585, 586, 587, 588, 589, 590, 591, 592, 593, 594, 595, 596, 597, 598, 599, and 600 nucleotides. The length of the promoter region for the viral genome may be 4-10, 10-20, 10-50, 20-30, 30-40, 40-50, 50-60, 50-100, 60-70, 70-80, 80-90, 90-100, 100-110, 100-150, 110-120, 120-130, 130-140, 140-150, 150-160, 150-200, 160-170, 170-180, 180-190, 190-200, 200-210, 200-250, 210-220, 220-230, 230-240, 240-250, 250-260, 250-300, 260-270, 270-280, 280-290, 290-300, 300-310, 300-350, 310-320, 320-330, 330-340, 340-350, 350-360, 350-400, 360-370, 370-380, 380-390, 390-400, 400-410, 400-450, 410-420, 420-430, 430-440, 440-450, 450-460, 450-500, 460-470, 470-480, 480-490, 490-500, 500-510, 500-550, 510-520, 520-530, 530-540, 540-550, 550-560, 550-600, 560-570, 570-580, 580-590, and 590-600 nucleotides. As a non-limiting example, the viral genome comprises a promoter region that is about 4 nucleotides in length. As a non-limiting example, the viral genome comprises a promoter region that is about 17 nucleotides in length. As a non-limiting example, the viral genome comprises a promoter region that is about 204 nucleotides in length. As a non-limiting example, the viral genome comprises a promoter region that is about 219 nucleotides in length. As a non-limiting example, the viral genome comprises a promoter region that is about 260 nucleotides in length. As a non-limiting example, the viral genome comprises a promoter region that is about 303 nucleotides in length. As a non-limiting example, the viral genome comprises a promoter region that is about 382 nucleotides in length. As a non-limiting example, the viral genome comprises a promoter region that is about 588 nucleotides in length.

[0710] In one embodiment, the AAV particle viral genome comprises at least one promoter sequence region. Non-limiting examples of promoter sequence regions are described in Table 21.

TABLE 21
Promoter Sequence Regions

| Sequence Region | SEQ ID NO or |
|---|---|
| Name | Sequence |
| Promoter1 | 1816 |
| Promoter2 | 1817 |
| Promoter3 | GTTG |
| Promoter4 | 1818 |
| Promoter5 | 1819 |
| Promoter6 | 1820 |

[0711] In one embodiment, the AAV particle viral genome comprises one promoter sequence region. In one embodiment, the promoter sequence region is Promoter1. In one embodiment, the promoter sequence region is Promoter2. In one embodiment, the promoter sequence region is Promoter3. In one embodiment, the promoter sequence region is Promoter4. In one embodiment, the promoter sequence region is Promoter5. In one embodiment, the promoter sequence region is Promoter6.

[0712] In one embodiment, the AAV particle viral genome comprises two promoter sequence regions. In one embodiment, the promoter sequence region is Promoter1 sequence region, and the Promoter2 sequence region. In one embodiment, the promoter sequence region is Promoter1 sequence region, and the Promoter3 sequence region. In one embodiment, the promoter sequence region is Promoter1 sequence region, and the Promoter4 sequence region. In one embodiment, the promoter sequence region is Promoter1 sequence region, and the Promoter5 sequence region. In one embodiment, the promoter sequence region is Promoter1 sequence region, and the Promoter6 sequence region. In one embodiment, the promoter sequence region is Promoter2 sequence region, and the Promoter3 sequence region. In one embodiment, the promoter sequence region is Promoter2 sequence region, and the Promoter4 sequence region. In one embodiment, the promoter sequence region is Promoter2 sequence region, and the Promoter5 sequence region. In one embodiment, the promoter sequence region is Promoter2 sequence region, and the Promoter6 sequence region. In one embodiment, the promoter sequence region is Promoter3 sequence region, and the Promoter4 sequence region. In one embodiment, the promoter sequence region is Promoter3 sequence region, and the Promoter5 sequence region. In one embodiment, the promoter sequence region is Promoter3 sequence region, and the Promoter6 sequence region. In one embodiment, the promoter sequence region is Promoter4 sequence region, and the Promoter5 sequence region. In one embodiment, the promoter sequence region is Promoter4 sequence region, and the Promoter6 sequence region. In one embodiment, the promoter sequence region is Promoter5 sequence region, and the Promoter6 sequence region.

[0713] In one embodiment, the AAV particle viral genome may comprise at least one exon sequence region. The exon region(s) may, independently, have a length such as, but not limited to, 2, 3, 4, 5, 6, 7, 8, 9, 10, 11, 12, 13, 14, 15, 16, 17, 18, 19, 20, 21, 22, 23, 24, 25, 26, 27, 28, 29, 30, 31, 32, 33, 34, 35, 36, 37, 38, 39, 40, 41, 42, 43, 44, 45, 46, 47, 48, 49, 50, 51, 52, 53, 54, 55, 56, 57, 58, 59, 60, 61, 62, 63, 64, 65, 66, 67, 68, 69, 70, 71, 72, 73, 74, 75, 76, 77, 78, 79, 80, 81, 82, 83, 84, 85, 86, 87, 88, 89, 90, 91, 92, 93, 94, 95, 96, 97, 98, 99, 100, 101, 102, 103, 104, 105, 106, 107, 108, 109, 110, 111, 112, 113, 114, 115, 116, 117, 118, 119, 120, 121, 122, 123, 124, 125, 126, 127, 128, 129, 130, 131, 132, 133, 134, 135, 136, 137, 138, 139, 140, 141, 142, 143, 144, 145, 146, 147, 148, 149, and 150 nucleotides. The length of the exon region for the viral genome may be 2-10, 5-10, 5-15, 10-20, 10-30, 10-40, 15-20, 15-25, 20-30, 20-40, 20-50, 25-30, 25-35, 30-40, 30-50, 30-60, 35-40, 35-45, 40-50, 40-60, 40-70, 45-50, 45-55, 50-60, 50-70, 50-80, 55-60, 55-65, 60-70, 60-80, 60-90, 65-70, 65-75, 70-80, 70-90, 70-100, 75-80, 75-85, 80-90, 80-100, 80-110, 85-90, 85-95, 90-100, 90-110, 90-120, 95-100, 95-105, 100-110, 100-120, 100-130, 105-110, 105-115, 110-120, 110-130, 110-140, 115-120, 115-125, 120-130, 120-140, 120-150, 125-130, 125-135, 130-140, 130-150, 135-140, 135-145, 140-150, and 145-150 nucleotides. As a non-limiting example, the viral genome comprises an exon region that is about 53 nucleotides in length. As a non-limiting example, the viral genome comprises an exon region that is about 134 nucleotides in length.

[0714] In one embodiment, the AAV particle viral genome comprises at least one Exon sequence region. Non-limiting examples of Exon sequence regions are described in Table 22.

TABLE 22
Exon Sequence Regions

| Sequence Region Name | SEQ ID NO |
|---|---|
| Exon1 | 1821 |
| Exon2 | 1822 |

[0715] In one embodiment, the AAV particle viral genome comprises one Exon sequence region. In one embodiment, the Exon sequence regions is the Exon1 sequence region. In one embodiment, the Exon sequence regions is the Exon2 sequence region.

[0716] In one embodiment, the AAV particle viral genome comprises two Exon sequence regions. In one embodiment, the Exon sequence regions are the Exon1 sequence region and the Exon 2 sequence region.

[0717] In one embodiment, the AAV particle viral genome may comprise at least one intron sequence region. The intron region(s) may, independently, have a length such as, but not limited to, 25, 26, 27, 28, 29, 30, 31, 32, 33, 34, 35, 36, 37, 38, 39, 40, 41, 42, 43, 44, 45, 46, 47, 48, 49, 50, 51, 52, 53, 54, 55, 56, 57, 58, 59, 60, 61, 62, 63, 64, 65, 66, 67, 68, 69, 70, 71, 72, 73, 74, 75, 76, 77, 78, 79, 80, 81, 82, 83, 84, 85, 86, 87, 88, 89, 90, 91, 92, 93, 94, 95, 96, 97, 98, 99, 100, 101, 102, 103, 104, 105, 106, 107, 108, 109, 110, 111, 112, 113, 114, 115, 116, 117, 118, 119, 120, 121, 122, 123, 124, 125, 126, 127, 128, 129, 130, 131, 132, 133, 134, 135, 136, 137, 138, 139, 140, 141, 142, 143, 144, 145, 146, 147, 148, 149, 150, 151, 152, 153, 154, 155, 156, 157, 158, 159, 160, 161, 162, 163, 164, 165, 166, 167, 168, 169, 170, 171, 172, 173, 174, 175, 176, 177, 178, 179, 180, 181, 182, 183, 184, 185, 186, 187, 188, 189, 190, 191, 192, 193, 194, 195, 196, 197, 198, 199, 200, 201, 202, 203, 204, 205, 206, 207, 208, 209, 210, 211, 212, 213, 214, 215, 216, 217, 218, 219, 220, 221, 222, 223, 224, 225, 226, 227, 228, 229, 230, 231, 232, 233, 234, 235, 236, 237, 238, 239, 240, 241, 242, 243, 244, 245, 246, 247, 248, 249, 250, 251, 252, 253, 254, 255, 256, 257, 258, 259, 260, 261, 262, 263, 264, 265, 266, 267, 268, 269, 270, 271, 272, 273, 274, 275, 276, 277, 278, 279, 280, 281, 282, 283, 284, 285, 286, 287, 288, 289, 290, 291, 292, 293, 294, 295, 296, 297, 298, 299, 300, 301, 302, 303, 304, 305, 306, 307, 308, 309, 310, 311, 312, 313, 314, 315, 316, 317, 318, 319, 320, 321, 322, 323, 324, 325, 326, 327, 328, 329, 330, 331, 332, 333, 334, 335, 336, 337, 338, 339, 340, 341, 342, 343, 344, 345, 346, 347, 348, 349, and 350 nucleotides. The length of the intron region for the viral genome may be 25-35, 25-50, 35-45, 45-55, 50-75, 55-65, 65-75, 75-85, 75-100, 85-95, 95-105, 100-125, 105-115, 115-125, 125-135, 125-150, 135-145, 145-155, 150-175, 155-165, 165-175, 175-185, 175-200, 185-195, 195-205, 200-225, 205-215, 215-225, 225-235, 225-250, 235-245, 245-255, 250-275, 255-265, 265-275, 275-285, 275-300, 285-295, 295-305, 300-325, 305-315, 315-325, 325-335, 325-350, and 335-345 nucleotides. As a non-limiting example, the viral genome comprises an intron region that is about 32 nucleotides in length. As a non-limiting example, the viral genome comprises an intron region that is about 172 nucleotides in length. As a non-limiting example, the viral genome comprises an intron region that is about 201 nucleotides in length. As a non-limiting example, the viral genome comprises an intron region that is about 347 nucleotides in length.

[0718] In one embodiment, the AAV particle viral genome comprises at least one intron sequence region. Non-limiting examples of intron sequence regions are described in Table 23.

TABLE 23
Intron Sequence Regions

| Sequence Region Name | SEQ ID NO |
|---|---|
| Intron1 | 1823 |
| Intron2 | 1824 |
| Intron3 | 1825 |
| Intron4 | 1826 |

[0719] In one embodiment, the AAV particle viral genome comprises one intron sequence region. In one embodiment, the intron sequence regions is the Intron1 sequence region. In one embodiment, the intron sequence regions is the Intron2 sequence region. In one embodiment, the intron sequence regions is the Intron3 sequence region. In one embodiment, the intron sequence regions is the Intron4 sequence region.

[0720] In one embodiment, the AAV particle viral genome comprises two intron sequence regions. In one embodiment, the intron sequence regions are the Intron1 sequence region and the Intron2 sequence region. In one embodiment, the intron sequence regions are the Intron sequence region and the Intron3 sequence region. In one embodiment, the intron sequence regions are the Intron1 sequence region and the Intron4 sequence region. In one embodiment, the intron sequence regions are the Intron2 sequence region and the Intron3 sequence region. In one embodiment, the intron sequence regions are the Intron2 sequence region and the Intron4 sequence region. In one embodiment, the intron sequence regions are the Intron3 sequence region and the Intron4 sequence region.

[0721] In one embodiment, the AAV particle viral genome comprises three intron sequence regions. In one embodiment, the intron sequence regions are the Intron1 sequence region, the Intron2 sequence region, and the Intron3 sequence region. In one embodiment, the intron sequence regions are the Intron sequence region, the Intron2 sequence region, and the Intron4 sequence region. In one embodiment, the intron sequence regions are the Intron1 sequence region, the Intron3 sequence region, and the Intron4 sequence region. In one embodiment, the intron sequence regions are the Intron2 sequence region, the Intron3 sequence region, and the Intron4 sequence region.

[0722] In one embodiment, the AAV particle viral genome may comprise at least one polyadenylation signal sequence region. The polyadenylation signal region sequence region(s) may, independently, have a length such as, but not limited to, 4, 5, 6, 7, 8, 9, 10, 11, 12, 13, 14, 15, 16, 17, 18, 19, 20, 21, 22, 23, 24, 25, 26, 27, 28, 29, 30, 31, 32, 33, 34, 35, 36, 37, 38, 39, 40, 41, 42, 43, 44, 45, 46, 47, 48, 49, 50, 51, 52, 53, 54, 55, 56, 57, 58, 59, 60, 61, 62, 63, 64, 65, 66, 67, 68, 69, 70, 71, 72, 73, 74, 75, 76, 77, 78, 79, 80, 81, 82, 83, 84, 85, 86, 87, 88, 89, 90, 91, 92, 93, 94, 95, 96, 97, 98, 99, 100, 101, 102, 103, 104, 105, 106, 107, 108, 109, 110, 111, 112, 113, 114, 115, 116, 117, 118, 119, 120, 121, 122, 123, 124, 125, 126, 127, 128, 129, 130, 131, 132, 133, 134, 135, 136, 137, 138, 139, 140, 141, 142, 143, 144, 145, 146, 147, 148, 149, 150, 151, 152, 153, 154, 155, 156, 157, 158, 159, 160, 161, 162, 163, 164, 165, 166, 167, 168, 169, 170, 171, 172, 173, 174, 175, 176, 177, 178, 179, 180, 181, 182, 183, 184, 185, 186, 187, 188, 189, 190, 191, 192, 193, 194, 195, 196, 197, 198, 199, 200, 201, 202, 203, 204, 205, 206, 207, 208, 209, 210, 211, 212, 213, 214, 215, 216, 217, 218, 219, 220, 221, 222, 223, 224, 225, 226, 227, 228, 229, 230, 231, 232, 233, 234, 235, 236, 237, 238, 239, 240, 241, 242, 243, 244, 245, 246, 247, 248, 249, 250, 251, 252, 253, 254, 255, 256, 257, 258, 259, 260, 261, 262, 263, 264, 265, 266, 267, 268, 269, 270, 271, 272, 273, 274, 275, 276, 277, 278, 279, 280, 281, 282, 283, 284, 285, 286, 287, 288, 289, 290, 291, 292, 293, 294, 295, 296, 297, 298, 299, 300, 301, 302, 303, 304, 305, 306, 307, 308, 309, 310, 311, 312, 313, 314, 315, 316, 317, 318, 319, 320, 321, 322, 323, 324, 325, 326, 327, 328, 329, 330, 331, 332, 333, 334, 335, 336, 337, 338, 339, 340, 341, 342, 343, 3443, 345, 3345, 46, 347, 348, 349, 350, 351, 352, 353, 354, 355, 356, 357, 358, 359, 360, 361, 362, 363, 364, 365, 366, 367, 368, 369, 370, 371, 372, 373, 374, 375, 376, 377, 378, 379, 380, 381, 382, 383, 384, 385, 386, 387, 388, 389, 390, 391, 392, 393, 394, 395, 396, 397, 398, 399, 400, 401, 402, 403, 404, 405, 406, 407, 408, 409, 410, 411, 412, 413, 414, 415, 416, 417, 418, 419, 420, 421, 422, 423, 424, 425, 426, 427, 428, 429, 430, 431, 432, 433, 434, 435, 436, 437, 438, 439, 440, 441, 442, 443, 444, 445, 446, 447, 448, 449, 450, 451, 452, 453, 454, 455, 456, 457, 458, 459, 460, 461, 462, 463, 464, 465, 466, 467, 468, 469, 470, 471, 472, 473, 474, 475, 476, 477, 478, 479, 480, 481, 482, 483, 484, 485, 486, 487, 488, 489, 490, 491, 492, 493, 494, 495, 496, 497, 498, 499, 500, 501, 502, 503, 504, 505, 506, 507, 508, 509, 510, 511, 512, 513, 514, 515, 516, 517, 518, 519, 520, 521, 522, 523, 524, 525, 526, 527, 528, 529, 530, 531, 532, 533, 534, 535, 536, 537, 538, 539, 540, 541, 542, 543, 544, 545, 546, 547, 548, 549, 550, 551, 552, 553, 554, 555, 556, 557, 558, 559, 560, 561, 562, 563, 564, 565, 566, 567, 568, 569, 570, 571, 572, 573, 574, 575, 576, 577, 578, 579, 580, 581, 582, 583, 584, 585, 586, 587, 588, 589, 590, 591, 592, 593, 594, 595, 596, 597, 598, 599, and 600 nucleotides. The length of the polyadenylation signal sequence region for the viral genome may be 4-10, 10-20, 10-50, 20-30, 30-40, 40-50, 50-60, 50-100, 60-70, 70-80, 80-90, 90-100, 100-110, 100-150, 110-120, 120-130, 130-140, 140-150, 150-160, 150-200, 160-170, 170-180, 180-190, 190-200, 200-210, 200-250, 210-220, 220-230, 230-240, 240-250, 250-260, 250-300, 260-270, 270-280, 280-290, 290-300, 300-310, 300-350, 310-320, 320-330, 330-340, 340-350, 350-360, 350-400, 360-370, 370-380, 380-390, 390-400, 400-410, 400-450, 410-420, 420-430, 430-440, 440-450, 450-460, 450-500, 460-470, 470-480, 480-490, 490-500, 500-510, 500-550, 510-520, 520-530, 530-540, 540-550, 550-560, 550-600, 560-570, 570-580, 580-590, and 590-600 nucleotides. As a non-limiting example, the viral genome comprises a polyadenylation signal sequence region that is about 127 nucleotides in length. As a non-limiting example, the viral genome comprises a polyadenylation signal sequence region that is about 225 nucleotides in length. As a non-limiting example, the viral genome comprises a polyadenylation signal sequence region that is about 476 nucleotides in length. As a non-limiting example, the viral genome comprises a polyadenylation signal sequence region that is about 477 nucleotides in length.

[0723] In one embodiment, the AAV particle viral genome comprises at least one polyadenylation (polyA) signal sequence region. Non-limiting examples of polyA signal sequence regions are described in Table 24.

TABLE 24
PolyA Signal Sequence Regions

| Sequence Region Name | SEQ ID NO |
|---|---|
| PolyA1 | 1827 |
| PolyA2 | 1828 |
| PolyA3 | 1829 |
| PolyA4 | 1830 |

[0724] In one embodiment, the AAV particle viral genome comprises one polyA signal sequence region. In one embodiment, the polyA signal sequence regions is the PolyA1 sequence region. In one embodiment, the polyA signal sequence regions is the PolyA2 sequence region. In one embodiment, the polyA signal sequence regions is the PolyA3 sequence region. In one embodiment, the polyA signal sequence regions is the PolyA4 sequence region.

[0725] In one embodiment, the AAV particle viral genome comprises more than one polyA signal sequence region.

[0726] AAV particles may be modified to enhance the efficiency of delivery. Such modified AAV particles comprising the nucleic acid sequence encoding the siRNA molecules of the present invention can be packaged efficiently and can be used to successfully infect the target cells at high frequency and with minimal toxicity.

[0727] In some embodiments, the AAV particle comprising a nucleic acid sequence encoding the siRNA molecules of the present invention may be a human serotype AAV particle. Such human AAV particle may be derived from any known serotype, e.g., from any one of serotypes AAV1-AAV11. As non-limiting examples, AAV particles may be vectors comprising an AAV-derived genome in an AAV1-derived capsid; vectors comprising an AAV2-derived genome in an AAV2-derived capsid; vectors comprising an AAV4-derived genome in an AAV4 derived capsid; vectors comprising an AAV6-derived genome in an AAV6 derived capsid or vectors comprising an AAV9-derived genome in an AAV9 derived capsid.

[0728] In other embodiments, the AAV particle comprising a nucleic acid sequence for encoding siRNA molecules of the present invention may be a pseudotyped hybrid or chimeric AAV particle which contains sequences and/or components originating from at least two different AAV serotypes. Pseudotyped AAV particles may be vectors comprising an AAV genome derived from one AAV serotype and a capsid protein derived at least in part from a different AAV serotype. As non-limiting examples, such pseudotyped AAV particles may be vectors comprising an AAV2-derived genome in an AAV1-derived capsid; or vectors comprising an AAV2-derived genome in an AAV6-derived capsid; or vectors comprising an AAV2-derived genome in an AAV4-derived capsid; or an AAV2-derived genome in an AAV9-derived capsid. In like fashion, the present invention contemplates any hybrid or chimeric AAV particle.

[0729] In other embodiments, AAV particles comprising a nucleic acid sequence encoding the siRNA molecules of the present invention may be used to deliver siRNA molecules to the central nervous system (e.g., U.S. Pat. No. 6,180,613; the contents of which is herein incorporated by reference in its entirety).

[0730] In some aspects, the AAV particles comprising a nucleic acid sequence encoding the siRNA molecules of the present invention may further comprise a modified capsid including peptides from non-viral origin. In other aspects, the AAV particle may contain a CNS specific chimeric capsid to facilitate the delivery of encoded siRNA duplexes into the brain and the spinal cord. For example, an alignment of cap nucleotide sequences from AAV variants exhibiting CNS tropism may be constructed to identify variable region (VR) sequence and structure.

### Polycistronic AAV Particles Comprising Modulatory Polynucleotides

[0731] In one embodiment, the AAV vector comprises a nucleic acid sequence encoding more than one modulatory polynucleotide. In one embodiment, the AAV vector comprises a nucleic acid sequence encoding more than one siRNA molecule. The AAV vector may comprise a nucleic acid sequence encoding 2, 3, 4, 5, 6, 7, 8, 9 or more than 9 modulatory polynucleotides. The AAV vector may comprise a nucleic acid sequence encoding 2, 3, 4, 5, 6, 7, 8, 9 or more than 9 siRNA molecules.

[0732] When the AAV vector comprises at least one nucleic acid sequence encoding more than one modulatory polynucleotide, e.g., siRNA molecule, the AAV vector may be referred to as polycistronic. When the nucleic acid sequence of the AAV vector encodes modulatory polynucleotide molecules, e.g., siRNA molecules, targeting a single target, then the AAV vector may be referred to as a “monospecific polycistronic” AAV vector. When the nucleic acid sequence of the AAV vector encodes modulatory polynucleotide molecules, e.g., siRNA molecules, targeting more than one target, then the AAV vector may be referred to as a “multispecific polycistronic” AAV vector. When the nucleic acid sequence of the AAV vector encodes siRNA molecules targeting two targets then the AAV vector may be referred to as a “bispecific polycistronic” AAV vector.

[0733] In one embodiment, the AAV vector comprises at least one nucleic acid sequence encoding a modulatory polynucleotide, e.g., siRNA molecule, targeting a single target gene. The AAV vector may comprise 1, 2, 3, 4, 5, 6, 7, 8, 9 or more than 9 nucleic acid sequences encoding a single modulatory polynucleotide, e.g., siRNA molecule, targeting a single target gene. As a non-limiting example, the target gene is HTT. As another non-limiting example, the target gene is SOD1.

[0734] In one embodiment, the AAV vector is a monospecific polycistronic AAV vector and comprises a nucleic acid sequence encoding two modulatory polynucleotides, e.g., siRNA molecules, targeting a target gene. In one aspect, the modulatory polynucleotides, e.g., siRNA molecules, comprise the same sense strands. In another aspect, the modulatory polynucleotides, e.g., siRNA molecules, comprise different sense strands. In one aspect, the modulatory polynucleotides, e.g., siRNA molecules, comprise different sense strands which have at least 80% complementarity (e.g., 80%, 85%, 90%, 95%, 99% or more than 99%, 80-85%, 80-90%, 85-90%, 85-95% 90-95%, 90-100%) to the same region on the target gene sequence. In one aspect, the modulatory polynucleotides, e.g., siRNA molecules, comprise different sense strands which have complementarity to different regions of the target gene sequence. As a non-limiting example, the target gene is HTT. As another non-limiting example, the target gene is SOD1.

[0735] In one embodiment, the AAV vector is a monospecific polycistronic AAV vector and comprises a nucleic acid sequence encoding three modulatory polynucleotides, e.g., siRNA molecules, targeting a target gene. In one aspect, the modulatory polynucleotides, e.g., siRNA molecules, comprise the same sense strands. In another aspect, each of the modulatory polynucleotides, e.g., siRNA molecules, comprise different sense strands. In another aspect, two of the modulatory polynucleotides. e.g., siRNA molecules, comprise the same sense strand and the third modulatory polynucleotide, e.g., siRNA molecule, comprises a different sense strand. In one aspect, each of the modulatory polynucleotides, e.g., siRNA molecules, comprise different sense strands which have at least 80% complementarity (e.g., 80%, 85%, 90%, 95%, 99% or more than 99%, 80-85%, 80-90%, 85-90%, 85-95%, 90-95%, 90-100%) to the same region on the target gene sequence. In one aspect, two of the modulatory polynucleotides, e.g., siRNA molecules, comprise different sense strands which have at least 80% complementarity (e.g., 80%, 85%, 90%, 95%, 99% or more than 99%, 80-85%, 80-90%, 85-90%, 85-95%, 90-95%, 90-100%) to the same region on the target gene sequence. In one aspect, the modulatory polynucleotides, e.g., siRNA molecules, comprise different sense strands which have complementarity to different regions of the target gene sequence. As a non-limiting example, the target gene is HTT. As another non-limiting example, the target gene is SOD1.

[0736] In one embodiment, the AAV vector is a monospecific polycistronic AAV vector and comprises a nucleic acid sequence encoding four modulatory polynucleotides, e.g., siRNA molecules, targeting a target gene. In one aspect, the modulatory polynucleotides, e.g., siRNA molecules, comprise the same sense strands. In another aspect, each of the modulatory polynucleotides, e.g., siRNA molecules, comprise different sense strands. In another aspect, two of the modulatory polynucleotides, e.g., siRNA molecules, comprise a first sense strand sequence and the other two modulatory polynucleotides, e.g., siRNA molecules, comprise a second sense strand sequence. In another aspect, three of the modulatory polynucleotides, e.g., siRNA molecules, comprise a first sense strand sequence and the other modulatory polynucleotides e.g., siRNA molecule, comprises a second sense strand sequence. In one aspect, each of the modulatory polynucleotides, e.g., siRNA molecules, comprise different sense strands which have at least 80% complementarity (e.g., 80%, 85%, 90%, 95%, 99% or more than 99%, 80-85%, 80-90%, 85-90%, 85-95%, 90-95%, 90-100%) to the same region on the target gene sequence. In one aspect, two of the modulatory polynucleotides, e.g., siRNA molecules, comprise different sense strands which have at least 80% complementarity (e.g., 80%, 85%, 90%, 95%, 99% or more than 99%, 80-85%, 80-90%, 85-90%, 85-95%, 90-95%, 90-100%) to the same region on the target gene sequence. In one aspect, the modulatory polynucleotides, e.g., siRNA molecules, comprise different sense strands which have complementarity to different regions of the target gene sequence. As a non-limiting example, the target gene is HTT. As another non-limiting example, the target gene is SOD1.

[0737] In one embodiment, the AAV particle is a bispecific polycistronic AAV particle and comprises a nucleic acid sequence encoding two modulatory polynucleotides, e.g., siRNA molecules. In one aspect, one of the modulatory polynucleotides, e.g., siRNA molecules, targets a first target gene and the other modulatory polynucleotide, e.g., siRNA molecule, targets a second target gene, and may reduce the expression of a protein and/or mRNA in at least one region of the central nervous system to treat a disease or disorder of the central nervous system. As a non-limiting example, the target genes are HTT and SOD1 and the diseases are HD and ALS.

[0738] In one embodiment, the AAV particle is a multispecific polycistronic AAV particle and comprises a nucleic acid sequence encoding two or more modulatory polynucleotides, e.g., siRNA molecules. In one aspect, one of the modulatory polynucleotides, e.g., siRNA molecules, targets a first target gene and the other modulatory polynucleotide(s), e.g., siRNA molecule(s), targets a second target gene and may reduce the expression of a protein and/or mRNA in at least one region of the central nervous system to treat a disease or disorder of the central nervous system. In one aspect, each of the modulatory polynucleotides, e.g., siRNA molecules, target a different mRNA to reduce the expression of a protein and/or mRNA in at least one region of the central nervous system to treat a disease or disorder of the central nervous system. As a non-limiting example, the target genes are HTT and SOD1 and the diseases are HD and ALS.

[0739] In one embodiment, the AAV particle may comprise modulatory polynucleotides comprising more than one molecular scaffold sequence. The AAV particle may comprise 1, 2, 3, 4, 5, 6, 7, 8, 9, or more than 9 molecular scaffold sequences.

[0740] In one embodiment, the polycistronic AAV particle viral genome comprises at least one inverted terminal repeat (ITR) sequence region, at least one enhancer sequence region, at least one promoter sequence region, two modulatory polynucleotide regions, and at least one polyadenylation signal sequence region.

[0741] In one embodiment, the polycistronic AAV particle viral genome comprises a 5′ inverted terminal repeat (ITR) sequence region and a 3′ ITR sequence region, a CMV enhancer sequence region, a CBA promoter sequence region, two modulatory polynucleotide sequence regions targeting the same gene of interest (HTT), and a rabbit globin polyadenylation signal sequence region. Non-limiting examples of an ITR to ITR sequence for use in the polycistronic AAV particles of the present invention having all of the sequence modules above are described in Table 25. In Table 25, the sequence identifier or sequence of the sequence region (Region SEQ ID NO) and the length of the sequence region (Region length) are described as well as the name and sequence identifier of the ITR to ITR sequence (e.g., VOYPC1 (SEQ ID NO: 1831)),

TABLE 25
Sequence Regions in ITR to ITR Sequence

| | VOYPC1 (SEQ ID | |
|---|---|---|
| | NO: 1831) | |
| | Region | |
| Sequence | SEQ ID | Region |
| Regions | NO | length |
| 5′ ITR | 1788 | 105 |
| CMV | 1814 | 382 |
| enhancer | | |
| CBA Promoter | 1816 | 260 |
| Modulatory | 1595 | 158 |
| Polynucleotide | | |
| (VOYHTmiR- | | |
| 104.579) | | |
| Modulatory | 1595 | 158 |
| Polynucleotide | | |
| (VOYHTmiR- | | |
| 104.579) | | |
| Rabbit globin | 1827 | 127 |
| PolyA Signal | | |
| 3′ ITR | 1790 | 130 |

[0742] In one embodiment, the polycistronic AAV particle viral genome comprises SEQ ID NO: 1831 (VOYPC1) which comprises a 5′ inverted terminal repeat (ITR) sequence region and a 3′ ITR sequence region, a CMV enhancer sequence region, a CBA promoter sequence region, two modulatory polynucleotide regions targeting the same gene of interest (HTT), and a rabbit globin polyadenylation signal sequence region.

[0743] In one embodiment, the polycistronic AAV particle viral genome comprises at least one inverted terminal repeat (ITR) sequence region, at least one enhancer sequence region, at least one promoter sequence region, at least one intron sequence region, two modulatory polynucleotide regions, and at least one polyadenylation signal sequence region.

[0744] In one embodiment, the polycistronic AAV particle viral genome comprises a 5′ inverted terminal repeat (ITR) sequence region and a 3′ ITR sequence region, a CMV enhancer sequence region, a CBA promoter sequence region, a SV40 intron sequence region, two modulatory polynucleotide sequence regions targeting the same gene of interest (HTT), and a rabbit globin polyadenylation signal sequence region. Non-limiting examples of an ITR to ITR sequence for use in the polycistronic AAV particles of the present invention having all of the sequence modules above are described in Tables 26 and 27. In Table 26 and 27, the sequence identifier or sequence of the sequence region (Region SEQ ID NO) and the length of the sequence region (Region length) are described as well as the name and sequence identifier of the ITR to ITR sequence (e.g., VOYPC2 (SEQ ID NO: 1832)),

TABLE 26
Sequence Regions in ITR to ITR Sequences

| | VOYPC2 (SEQ ID | | VOYPC3 (SEQ ID | | VOYPC4 (SEQ ID | | VOYPC5 (SEQ ID | |
|---|---|---|---|---|---|---|---|---|
| | NO: 1832) | | NO: 1833) | | NO: 1834) | | NO: 1835) | |
| | Region | | Region | | Region | | Region | |
| Sequence | SEQ ID | Region | SEQ ID | Region | SEQ ID | Region | SEQ ID | Region |
| Regions | NO | length | NO | length | NO | length | NO | length |
| 5′ ITR | 1788 | 105 | 1788 | 105 | 1788 | 105 | 1788 | 105 |
| CMV | 1814 | 382 | 1814 | 382 | 1814 | 382 | 1814 | 382 |
| enhancer | | | | | | | | |
| CBA Promoter | 1816 | 260 | 1816 | 260 | 1816 | 260 | 1816 | 260 |
| SV40 Intron | 1823 | 172 | 1823 | 172 | 1823 | 172 | 1823 | 172 |
| Modulatory | 1589 | 158 | — | — | 1589 | 158 | — | — |
| Polynucleolide | | | | | | | | |
| (VOYHTmiR- | | | | | | | | |
| 104.016) | | | | | | | | |
| Modulatory | — | — | 1599 | 260 | — | — | 1599 | 260 |
| Polynucleotide | | | | | | | | |
| (VOYHTmiR- | | | | | | | | |
| 127.579) | | | | | | | | |
| Modulatory | 1589 | 158 | 1589 | 158 | — | — | — | — |
| Polynucleotide | | | | | | | | |
| (VOYHTmiR- | | | | | | | | |
| 104.016) | | | | | | | | |
| Modulatory | — | — | — | — | 1599 | 260 | 1599 | 260 |
| Polynucleolide | | | | | | | | |
| (VOYHTmiR- | | | | | | | | |
| 127.579) | | | | | | | | |
| Rabbit globin | 1827 | 127 | 1827 | 177 | 1827 | 127 | 1827 | 127 |
| PolyA Signal | | | | | | | | |
| 3′ ITR | 1790 | 130 | 1790 | 130 | 1790 | 130 | 1790 | 130 |

TABLE 27
Sequence Regions in ITR to ITR Sequences

| | VOYPC6 (SEQ | | VOYPC7 (SEQ | | VOYPC8 (SEQ | |
|---|---|---|---|---|---|---|
| | ID NO: 1836) | | ID NO: 1837) | | ID NO: 1838) | |
| | Region | | Region | | Region | |
| Sequence | SEQ ID | Region | SEQ ID | Region | SEQ ID | Region |
| Regions | NO | length | NO | length | NO | length |
| 5′ ITR | 1788 | 105 | 1788 | 105 | 1788 | 105 |
| CMV | 1814 | 382 | 1814 | 382 | 1814 | 382 |
| enhancer | | | | | | |
| CBA Promoter | 1816 | 260 | 1816 | 260 | 1816 | 260 |
| SV40 Intron | 1826 | 701 | 1826 | 201 | 1826 | 201 |
| Modulatory | 1593 | 260 | — | — | 1593 | 260 |
| Polynucleotide | | | | | | |
| (VOYHTmiR- | | | | | | |
| 127.016) | | | | | | |
| Modulatory | — | — | 1595 | 158 | — | — |
| Polynucleotide | | | | | | |
| (VOYHTmiR- | | | | | | |
| 104.579) | | | | | | |
| Modulatory | 1593 | 260 | 1593 | 260 | — | — |
| Polynucleotide | | | | | | |
| (VOYHTmiR- | | | | | | |
| 127.016) | | | | | | |
| Modulatory | — | — | — | — | 1595 | 158 |
| Polynucleotide | | | | | | |
| (VOYHTmiR- | | | | | | |
| 104.579) | | | | | | |
| Rabbit global | 1827 | 127 | 1827 | 127 | 1827 | 127 |
| Poly A Signal | | | | | | |
| 3′ ITR | 1790 | 130 | 1790 | 130 | 1790 | 130 |

[0745] In one embodiment, the polycistronic AAV particle viral genome comprises SEQ ID NO: 1832 (VOYPC2) which comprises a 5′ inverted terminal repeat (ITR) sequence region and a 3′ ITR sequence region, a CMV enhancer sequence region, a CBA promoter sequence region, a SV40 intron sequence region, two modulatory polynucleotide regions targeting the same gene of interest (HTT), and a rabbit globin polyadenylation signal sequence region.

[0746] In one embodiment, the polycistronic AAV particle viral genome comprises SEQ ID NO: 1833 (VOYPC3) which comprises a 5′ inverted terminal repeat (ITR) sequence region and a 3′ ITR sequence region, a CMV enhancer sequence region, a CBA promoter sequence region, a SV40 intron sequence region, two modulatory polynucleotide regions targeting the same gene of interest (HTT), and a rabbit globin polyadenylation signal sequence region.

[0747] In one embodiment, the polycistronic AAV particle viral genome comprises SEQ ID NO: 1834 (VOYPC4) which comprises a 5′ inverted terminal repeat (ITR) sequence region and a 3′ ITR sequence region, a CMV enhancer sequence region, a CBA promoter sequence region, a SV40 intron sequence region, two modulatory polynucleotide regions targeting the same gene of interest (HTT), and a rabbit globin polyadenylation signal sequence region.

[0748] In one embodiment, the polycistronic AAV particle viral genome comprises SEQ ID NO: 1835 (VOYPC5) which comprises a 5′ inverted terminal repeat (ITR) sequence region and a 3′ ITR sequence region, a CMV enhancer sequence region, a CBA promoter sequence region, a SV40 intron sequence region, two modulatory polynucleotide regions targeting the same gene of interest (HTT), and a rabbit globin polyadenylation signal sequence region.

[0749] In one embodiment, the polycistronic AAV particle viral genome comprises SEQ ID NO: 1836 (VOYPC6) which comprises a 5′ inverted terminal repeat (ITR) sequence region and a 3′ ITR sequence region, a CMV enhancer sequence region, a CBA promoter sequence region, a SV40 intron sequence region, two modulatory polynucleotide regions targeting the same gene of interest (HTT), and a rabbit globin polyadenylation signal sequence region.

[0750] In one embodiment, the polycistronic AAV particle viral genome comprises SEQ ID NO: 1837 (VOYPC7) which comprises a 5′ inverted terminal repeat (ITR) sequence region and a 3′ ITR sequence region, a CMV enhancer sequence region, a CBA promoter sequence region, a SV40 intron sequence region, two modulatory polynucleotide regions targeting the same gene of interest (HTT), and a rabbit globin polyadenylation signal sequence region.

[0751] In one embodiment, the polycistronic AAV particle viral genome comprises SEQ ID NO: 1838 (VOYPC8) which comprises a 5′ inverted terminal repeat (ITR) sequence region and a 3′ ITR sequence region, a CMV enhancer sequence region, a CBA promoter sequence region, a SV40 intron sequence region, two modulatory polynucleotide regions targeting the same gene of interest (HTT), and a rabbit globin polyadenylation signal sequence region

[0752] In one embodiment, the polycistronic AAV particle viral genome comprises at least one inverted terminal repeat (ITR) sequence region, at least one promoter sequence region, two modulatory polynucleotide regions, and at least one polyadenylation signal sequence region.

[0753] In one embodiment, the polycistronic AAV particle viral genome comprises at least one inverted terminal repeat (ITR) sequence region, at least one promoter sequence region, and two modulatory polynucleotide regions.

[0754] In one embodiment, the polycistronic AAV particle viral genome comprises a 5′ inverted terminal repeat (ITR) sequence region and a 3′ ITR sequence region a CBA promoter sequence region, a H1 promoter sequence region, and two modulatory polynucleotide sequence regions targeting the same gene of interest (HTT). Non-limiting examples of an ITR to ITR sequence for use in the polycistronic AAV particles of the present invention having all of the sequence modules above are described in Table 28. In Table 28, the sequence identifier or sequence of the sequence region (Region SEQ ID NO) and the length of the sequence region (Region length) are described as well as the name and sequence identifier of the ITR to ITR sequence (e.g., VOYPC1 (SEQ ID NO: 1831)),

TABLE 28
Sequence Regions in ITR to ITR Sequences

| | VOYPC9 (SEQ ID | | VOYPC10 (SEQ ID | | VOYPC11 (SEQ ID | | VOYPC12 (SEQ ID | |
|---|---|---|---|---|---|---|---|---|
| | NO: 1839) | | NO: 1840) | | NO: 1841) | | NO: 1842) | |
| | Region | | Region | | Region | | Region | |
| Sequence | SEQ ID | Region | SEQ ID | Region | SEQ ID | Region | SEQ ID | Region |
| Regions | NO | length | NO | length | NO | length | NO | length |
| 5′ ITR | 1788 | 105 | 1788 | 105 | 1788 | 105 | 1788 | 105 |
| CBA Promoter | 1819 | 219 | 1819 | 219 | 1819 | 219 | 1819 | 219 |
| Modulatory | 1589 | 158 | — | — | — | — | 1589 | 158 |
| Polynucleolide | | | | | | | | |
| (VOYHTmiR- | | | | | | | | |
| 104.016) | | | | | | | | |
| Modulatory | — | — | 1599 | 260 | 1599 | 260 | — | — |
| Polynucleolide | | | | | | | | |
| (VOYHTmiR- | | | | | | | | |
| 127.579) | | | | | | | | |
| H1 Promoter | 1819 | 219 | 1819 | 219 | 1819 | 219 | 1819 | 219 |
| Modulatory | 1589 | 158 | — | — | 1589 | 158 | — | — |
| Polynucleotide | | | | | | | | |
| (VOYHTmiR- | | | | | | | | |
| 104.016) | | | | | | | | |
| Modulatory | — | — | 1599 | 260 | — | — | 1599 | 260 |
| Polynucleotide | | | | | | | | |
| (VOYHTmiR- | | | | | | | | |
| 127.579) | | | | | | | | |
| 3′ ITR | 1790 | 130 | 1790 | 130 | 1790 | 130 | 1790 | 130 |

[0755] In one embodiment, the polycistronic AAV particle viral genome comprises a Pol III promoter. In one embodiment, the polycistronic AAV particle viral genome comprises a type 3 Pol III promoter. In one embodiment, the polycistronic AAV particle viral genome comprises a H III promoter. In one embodiment, the polycistronic AAV particle viral genome comprises a U6 promoter. In one embodiment, the polycistronic AAV particle viral genome comprises a U3 promoter. In one embodiment, the polycistronic AAV particle viral genome comprises a U7 promoter. In one embodiment, the polycistronic AAV particle viral genome comprises a U7SK promoter. In one embodiment, the polycistronic AAV particle viral genome comprises an MRP promoter. In one embodiment, the polycistronic AAV particle viral genome comprises a Pol MRP promoter. In one embodiment, the polycistronic AAV particle viral genome comprises a truncated Pol II promoter.

[0756] In one embodiment, the polycistronic AAV particle viral genome comprises SEQ ID NO: 1839 (VOYPC9) which comprises a 5′ inverted terminal repeat (ITR) sequence region and a 3′ ITR sequence region, a CBA promoter sequence region, a H1 promoter sequence region, and two modulatory polynucleotide regions targeting the same gene of interest (HTT).

[0757] In one embodiment, the polycistronic AAV particle viral genome comprises SEQ ID NO: 1840 (VOYPC10) which comprises a 5′ inverted terminal repeat (ITR) sequence region and a 3′ ITR sequence region, a CBA promoter sequence region, a H1 promoter sequence region, and two modulatory polynucleotide regions targeting the same gene of interest (HTT).

[0758] In one embodiment, the polycistronic AAV particle viral genome comprises SEQ ID NO: 1841 (VOYPC11) which comprises a 5′ inverted terminal repeat (ITR) sequence region and a 3′ ITR sequence region, a CBA promoter sequence region, a H1 promoter sequence region, and two modulatory polynucleotide regions targeting the same gene of interest (HTT).

[0759] In one embodiment, the polycistronic AAV particle viral genome comprises SEQ ID NO: 1842 (VOYPC12) which comprises a 5′ inverted terminal repeat (ITR) sequence region and a 3′ ITR sequence region, a CBA promoter sequence region, a H1 promoter sequence region, and two modulatory polynucleotide regions targeting the same gene of interest (HTT).

[0760] In one embodiment, the polycistronic AAV particle viral genome comprises a 5′ inverted terminal repeat (ITR) sequence region and a 3′ ITR sequence region, two H1 promoter sequence regions, two modulatory polynucleotide sequence regions targeting the same gene of interest, and two H1 terminator sequences, where each modulatory polynucleotide sequence region is driven by its own Pol III promoter, for example, type 3 Pol III promoter, e.g., H1 promoter, and followed by its own promoter terminator sequence, e.g., H1 terminator sequence. Non-limiting examples of an ITR to ITR sequence for use in the polycistronic AAV particles of the present invention having these sequence modules are described in Table 29. In Table 29, the sequence identifier or sequence of the sequence region (Region SEQ ID NO) and the length of the sequence region (Region length) are described as well as the name and sequence identifier of the ITR to ITR sequence (e.g., VOYPC59 (SEQ ID NO: 2682))

TABLE 29
Sequence Regions in ITR to ITR Sequences

| | VOYPC59 SEQ ID | | VOYPC60 (SEQ: | | VOYPC61 (SEQ | | VOYPC62 (SEQ | |
|---|---|---|---|---|---|---|---|---|
| | NO: 2682) | | ID NO: 2683 | | ID NO: 2684) | | ID NO: 2685) | |
| | Region | | Region | | Region | | Region | |
| Sequence | SEQ ID | Region | SEQ ID | Region | SEQ ID | Region | SEQ ID | Region |
| Regions | NO | length | NO | length | NO | length | NO | length |
| 5′ ITR | 1788 | 105 | 1788 | 105 | 1788 | 105 | 1788 | 105 |
| H1 Promoter | 1819 | 219 | 1819 | 219 | | | | |
| Modulatory | 1589 | 158 | 1589 | 158 | | | | |
| Polynucleotide | | | | | | | | |
| (VOYHTmiR- | | | | | | | | |
| 104.016) | | | | | | | | |
| H1 Terminator | 2681 | 5 | 2681 | 5 | | | | |
| H1 Promoter | | | 1819 | 219 | 1819 | 219 | 1819 | 219 |
| Modulatory | | | 1599 | 260 | 1599 | 260 | 1599 | 260 |
| Polynucleotide | | | | | | | | |
| (VOYHTmiR- | | | | | | | | |
| 127.579) | | | | | | | | |
| H1 Terminator | | | 2681 | 5 | 2681 | 5 | 2681 | 5 |
| H1 Promoter | 1819 | 219 | | | 1819 | 219 | | |
| Modulatory | 1589 | 158 | | | 1589 | 158 | | |
| Polynucleotide | | | | | | | | |
| (VOYHTmiR- | | | | | | | | |
| 104.016) | | | | | | | | |
| H1 Terminator | 2681 | 5 | | | 2681 | 5 | | |
| H1 Promoter | | | | | | | 1819 | 219 |
| Modulatory | | | | | | | 1599 | 260 |
| Polynucleolide | | | | | | | | |
| (VOYHTmiR- | | | | | | | | |
| 127.579) | | | | | | | | |
| H1 Terminator | | | | | | | 2681 | 5 |
| 3′ ITR | 1790 | 130 | 1790 | 130 | 1790 | 130 | 1790 | 130 |

[0761] In one embodiment, the polycistronic AAV particle viral genome comprises SEQ ID NO: 2682 (VOYPC59) which comprises a 5′ inverted terminal repeat (ITR) sequence region and a 3′ ITR sequence region, two H1 promoter sequence regions, two modulatory polynucleotide regions targeting the same gene of interest (HTT), and two H1 terminator sequence regions, where each modulatory polynucleotide region is driven by its own H1 promoter and followed by its own H1 terminator.

[0762] In one embodiment, the polycistronic AAV particle viral genome comprises SEQ ID NO: 2683 (VOYPC60) which comprises a 5′ inverted terminal repeat (ITR) sequence region and a 3′ ITR sequence region, two H1 promoter sequence regions, two modulatory polynucleotide regions targeting the same gene of interest (HTT), and two H1 terminator sequence regions, where each modulatory polynucleotide region is driven by its own H1 promoter and followed by its own H1 terminator.

[0763] In one embodiment, the polycistronic AAV particle viral genome comprises SEQ ID NO: 2684 (VOYPC61) which comprises a 5′ inverted terminal repeat (ITR) sequence region and a 3′ ITR sequence region, two H promoter sequence regions, two modulatory polynucleotide regions targeting the same gene of interest (HTT), and two H1 terminator sequence regions, where each modulatory polynucleotide region is driven by its own H1 promoter and followed by its own H1 terminator.

[0764] In one embodiment, the polycistronic AAV particle viral genome comprises SEQ ID NO: 2685 (VOYPC62) which comprises a 5′ inverted terminal repeat (ITR) sequence region and a 3′ ITR sequence region, two H1 promoter sequence regions, two modulatory polynucleotide regions targeting the same gene of interest (HTT), and two H1 terminator sequence regions, where each modulatory polynucleotide region is driven by its own H1 promoter and followed by its own H1 terminator.

[0765] In one embodiment, the polycistronic AAV particle viral genome comprises two promoter sequence regions, two modulatory polynucleotide regions and at least one polyadenylation sequence region.

[0766] In one embodiment, the polycistronic AAV particle viral genome comprises a CMV promoter sequence region, a T7 primer binding site, two modulatory polynucleotide sequence regions targeting the same gene of interest (HTT) and a polyadenylation sequence region. Non-limiting examples of sequences for use in the polycistronic AAV particles of the present invention having all of the sequence modules above are described in Tables 30 and 31. In Tables 30 and 31, the sequence identifier or sequence of the sequence region (Region SEQ ID NO) and the length of the sequence region (Region length) are described as well as the name of the sequence (e.g., VOYPC13),

TABLE 30
Sequence Regions

| | VOYPC13 (SEQ ID | | VOYPC14 (SEQ ID | | VOYPC15 (SEQ ID | | VOYPC16 (SEQ ID | |
|---|---|---|---|---|---|---|---|---|
| | NO: 2686) | | NO: 2687) | | NO: 2688) | | NO: 2689) | |
| | Region | | Region | | Region | | Region | |
| Sequence | SEQ ID | Region | SEQ ID | Region | SEQ ID | Region | SEQ ID | Region |
| Regions | NO | length | NO | length | NO | length | NO | length |
| CMV | 1817 | 588 | 1817 | 588 | 1817 | 588 | 1817 | 588 |
| Promoter | | | | | | | | |
| T7 Primer | 1820 | 17 | 1820 | 17 | 1820 | 17 | 1820 | 17 |
| Binding Site | | | | | | | | |
| Modulatory | 1589 | 158 | — | — | 1589 | 158 | — | — |
| Polynucleotide | | | | | | | | |
| (VOYHTmiR- | | | | | | | | |
| 104.016) | | | | | | | | |
| Modulatory | — | — | 1599 | 260 | 1599 | 260 | 1599 | 260 |
| Polynucleotide | | | | | | | | |
| (VOYHTmiR- | | | | | | | | |
| 127.579) | | | | | | | | |
| Modulatory | 1589 | 158 | 1589 | 158 | — | — | — | — |
| Polynucleolide | | | | | | | | |
| (VOYHTmiR- | | | | | | | | |
| 104.016) | | | | | | | | |
| Modulatory | — | — | — | — | — | — | 1599 | 260 |
| Polynucleolide | | | | | | | | |
| (VOYHTmiR- | | | | | | | | |
| 127.579) | | | | | | | | |
| PolyA | 1828 | 225 | 1828 | 225 | 1828 | 225 | 1828 | 225 |

TABLE 31
Sequence Regions

| | VOYPC17 | | VOYPC18 | | VOYPC19 | | VOYPC20 | |
|---|---|---|---|---|---|---|---|---|
| | Region | | Region | | Region | | Region | |
| Sequence | SEQ ID | Region | SEQ ID | Region | SEQ ID | Region | SEQ ID | Region |
| Regions | NO | length | NO | length | NO | length | NO | length |
| CMV | 1817 | 588 | 1817 | 588 | 1817 | 588 | 1817 | 588 |
| Promoter | | | | | | | | |
| T7 Primer | 1820 | 17 | 1820 | 17 | 1820 | 17 | 1820 | 17 |
| Binding Site | | | | | | | | |
| Modulatory | 1595 | 158 | — | — | 1595 | 158 | — | — |
| Polynucleotide | | | | | | | | |
| (VOYHTmiR- | | | | | | | | |
| 104.579) | | | | | | | | |
| Modulatory | — | — | 1593 | 260 | 1593 | 260 | 1593 | 260 |
| Polynucleotide | | | | | | | | |
| (VOYHTmiR- | | | | | | | | |
| 127.016) | | | | | | | | |
| Modulatory | 1595 | 158 | — | — | — | — | 1595 | 158 |
| Polynucleotide | | | | | | | | |
| (VOYHTmiR- | | | | | | | | |
| 104.579) | | | | | | | | |
| Modulatory | — | — | 1593 | 260 | — | — | — | — |
| Polynucleotide | | | | | | | | |
| (VOYHTmiR- | | | | | | | | |
| 127.016) | | | | | | | | |
| PolyA | 1828 | 225 | 1828 | 225 | 1828 | 225 | 1828 | 225 |

[0767] In one embodiment, the polycistronic AAV particle viral genome comprises the sequence modules described in VOYPC13 which comprises a CMV promoter sequence region, a T7 primer binding site, two modulatory polynucleotide regions targeting the same gene of interest (HTT), and a polyadenylation sequence region.

[0768] In one embodiment, the polycistronic AAV particle viral genome comprises the sequence modules described in VOYPC14 which comprises a CMV promoter sequence region, a T7 primer binding site, two modulatory polynucleotide regions targeting the same gene of interest (HTT), and a polyadenylation sequence region.

[0769] In one embodiment, the polycistronic AAV particle viral genome comprises the sequence modules described in VOYPC15 which comprises a CMV promoter sequence region, a T7 primer binding site, two modulatory polynucleotide regions targeting the same gene of interest (HTT), and a polyadenylation sequence region.

[0770] In one embodiment, the polycistronic AAV particle viral genome comprises the sequence modules described in VOYPC16 which comprises a CMV promoter sequence region, a T7 primer binding site, two modulatory polynucleotide regions targeting the same gene of interest (HTT), and a polyadenylation sequence region.

[0771] In one embodiment, the polycistronic AAV particle viral genome comprises the sequence modules described in VOYPC17 which comprises a CMV promoter sequence region, a T7 primer binding site, two modulatory polynucleotide regions targeting the same gene of interest (HTT), and a polyadenylation sequence region.

[0772] In one embodiment, the polycistronic AAV particle viral genome comprises the sequence modules described in VOYPC18 which comprises a CMV promoter sequence region, a T7 primer binding site, two modulatory polynucleotide regions targeting the same gene of interest (HTT), and a polyadenylation sequence region.

[0773] In one embodiment, the polycistronic AAV particle viral genome comprises the sequence modules described in VOYPC19 which comprises a CMV promoter sequence region, a T7 primer binding site, two modulatory polynucleotide regions targeting the same gene of interest (HTT), and a polyadenylation sequence region.

[0774] In one embodiment, the polycistronic AAV particle viral genome comprises the sequence modules described in VOYPC20 which comprises a CMV promoter sequence region, a T7 primer binding site, two modulatory polynucleotide regions targeting the same gene of interest (HTT), and a polyadenylation sequence region.

[0775] In one embodiment, the polycistronic AAV particle viral genome comprises a CMV promoter sequence region, a T7 primer binding site, and two modulatory polynucleotide sequence regions targeting different genes of interest (HTT and SOD1) and a polyadenylation sequence region. Non-limiting examples of sequences for use in the polycistronic AAV particles of the present invention having all of the sequence modules above are described in Table 32. In Table 32, the sequence identifier or sequence of the sequence region (Region SEQ ID NO) and the length of the sequence region (Region length) are described as well as the name of the sequence (e.g., VOYPC25),

TABLE 32
Sequence Regions

| | VOYPC25 | | VOYPC26 | |
|---|---|---|---|---|
| | Region | | Region | |
| Sequence | SEQ ID | Region | SEQ ID | Region |
| Regions | NO | length | NO | length |
| CMV | 1817 | 588 | 1817 | 588 |
| Promoter | | | | |
| T7 Primer | 1820 | 17 | 1820 | 17 |
| Binding Site | | | | |
| Modulatory | 1699 | 158 | 1599 | 260 |
| Polynucleotide | | | | |
| (VOYSOD1mi | | | | |
| R-104) | | | | |
| Modulatory | 1599 | 260 | — | — |
| Polynucleotide | | | | |
| (VOYHTmiR- | | | | |
| 127.579) | | | | |
| Modulatory | — | — | 1699 | 158 |
| Polynucleotide | | | | |
| (VOYSOD1mi | | | | |
| R-104) | | | | |
| PolyA | 1828 | 225 | 1828 | 225 |

[0776] In one embodiment, the polycistronic AAV particle viral genome comprises the sequence modules described in VOYPC25 which comprises a CMV promoter sequence region, a T7 primer binding site, two modulatory polynucleotide regions targeting the two different genes of interest (HTT and SOD1), and a polyadenylation sequence region.

[0777] In one embodiment, the polycistronic AAV particle viral genome comprises the sequence modules described in VOYPC26 which comprises a CMV promoter sequence region, a T7 primer binding site, two modulatory polynucleotide regions targeting the two different genes of interest (HTT and SOD1), and a polyadenylation sequence region.

[0778] In one embodiment, the polycistronic AAV particle viral genome comprises three promoter sequence regions, two modulatory polynucleotide regions and at least one polyadenylation sequence region.

[0779] In one embodiment, the polycistronic AAV particle viral genome comprises a GTTG region, two H1 promoter sequence region, and two modulatory polynucleotide sequence regions targeting the same gene of interest (HTT). Non-limiting examples of sequences for use in the polycistronic AAV particles of the present invention having all of the sequence modules above are described in Table 33. In Table 33, the sequence identifier or sequence of the sequence region (Region SEQ ID NO) and the length of the sequence region (Region length) are described as well as the name of the sequence (e.g., VOYPC21),

TABLE 33
Sequence Regions

| | VOYPC21 | | VOYPC22 | | VOYPC23 | | VOYPC24 | |
|---|---|---|---|---|---|---|---|---|
| | Region | | Region | | Region | | Region | |
| Sequence | SEQ ID | Region | SEQ ID | Region | SEQ ID | Region | SEQ ID | Region |
| Regions | NO | length | NO | length | NO | length | NO | length |
| GTTG | - - - | 4 | - - - | 4 | - - - | 4 | - - - | 4 |
| H1 Promoter | 1819 | 219 | 1819 | 219 | 1819 | 219 | 1819 | 219 |
| Modulatory | 1599 | 260 | 1599 | 260 | — | — | — | — |
| Polynucleotide | | | | | | | | |
| (VOYHTmiR- | | | | | | | | |
| 127.579) | | | | | | | | |
| Modulatory | — | — | — | — | 1589 | 158 | 1589 | 158 |
| Polynucleotide | | | | | | | | |
| (VOYHTmiR- | | | | | | | | |
| 104.016) | | | | | | | | |
| H1 promoter | 1819 | 219 | 1819 | 219 | 1819 | 219 | 1819 | 219 |
| Modulatory | 1599 | 260 | — | — | 1599 | 260 | — | — |
| Polynucleotide | | | | | | | | |
| (VOYHTmiR- | | | | | | | | |
| 127.579) | | | | | | | | |
| Modulatory | — | — | 1589 | 158 | — | — | 1589 | 158 |
| Polynucleotide | | | | | | | | |
| (VOYHTmiR- | | | | | | | | |
| 104.016) | | | | | | | | |

[0780] In one embodiment, the polycistronic AAV particle viral genome comprises the sequence modules described in VOYPC21 which comprises a GTTG region, two H1 promoter sequence regions, and two modulatory polynucleotide regions targeting the same gene of interest (HTT).

[0781] In one embodiment, the polycistronic AAV particle viral genome comprises the sequence modules described in VOYPC22 which comprises a GTTG region, two H1 promoter sequence regions, and two modulatory polynucleotide regions targeting the same gene of interest (HTT).

[0782] In one embodiment, the polycistronic AAV particle viral genome comprises the sequence modules described in VOYPC23 which comprises a GTTG region, two H1 promoter sequence regions, and two modulatory polynucleotide regions targeting the same gene of interest (HTT).

[0783] In one embodiment, the polycistronic AAV particle viral genome comprises the sequence modules described in VOYPC24 which comprises a GTTG region, two H1 promoter sequence regions, and two modulatory polynucleotide regions targeting the same gene of interest (HTT).

[0784] In one embodiment, the polycistronic AAV particle viral genome comprises at least one inverted terminal repeat (ITR) sequence region, at least one enhancer sequence region, at least one promoter sequence region, at least one intron sequence region, three modulatory polynucleotide regions, and at least one polyadenylation signal sequence region.

[0785] In one embodiment, the polycistronic AAV particle viral genome comprises a 5′ inverted terminal repeat (ITR) sequence region and a 3′ ITR sequence region, a CMV enhancer sequence region, a GTTG region, SV40 intron sequence region, three modulatory polynucleotide sequence regions targeting the same gene of interest (HTT), and a rabbit globin polyadenylation signal sequence region. Non-limiting examples of an ITR to ITR sequence for use in the polycistronic AAV particles of the present invention having all of the sequence modules above are described in Table 34. In Table 34, the sequence identifier or sequence of the sequence region (Region SEQ ID NO) and the length of the sequence region (Region length) are described as well as the name and sequence identifier of the ITR to ITR sequence (e.g., VOYPC27 (SEQ ID NO: 1843)),

TABLE 34
Sequence Regions in ITR to ITR Sequence

| | VOYPC27 (SEQ ID | | VOYPC28 (SEQ ID | |
|---|---|---|---|---|
| | NO: 1843) | | NO: 1844) | |
| | Region | | Region | |
| Sequence | SEQ ID | Region | SEQ ID | Region |
| Regions | NO | length | NO | length |
| 5′ ITR | 1788 | 105 | 1788 | 105 |
| CMV | 1814 | 382 | 1814 | 382 |
| enhancer | | | | |
| CBA Promoter | 1816 | 260 | 1816 | 260 |
| SV40 intron | 1826 | 201 | 1826 | 201 |
| Modulatory | 1599 | 260 | 1599 | 260 |
| Polynucleotide | | | | |
| (VOYHTmiR- | | | | |
| 127.579) | | | | |
| Modulatory | 1589 | 158 | 1589 | 158 |
| Polynucleotide | | | | |
| (VOYHTmiR- | | | | |
| 104.016) | | | | |
| Modulatory | 1589 | 158 | — | — |
| Polynucleotide | | | | |
| (VOYHTmiR- | | | | |
| 104.016) | | | | |
| Modulatoty | — | — | 1599 | 260 |
| Polynucleotide | | | | |
| (VOYHTmiR- | | | | |
| 127.579) | | | | |
| Rabbit globin | 1827 | 127 | 1827 | 127 |
| PolyA Signal | | | | |
| 3′ ITR | 1790 | 130 | 1790 | 130 |

[0786] In one embodiment, the polycistronic AAV particle viral genome comprises SEQ ID NO: 1843 (VOYPC27) which comprises a 5′ inverted terminal repeat (ITR) sequence region and a 3′ ITR sequence region, a CMV enhancer sequence region, a CBA promoter sequence region, a SV40 intron sequence region, three modulatory polynucleotide regions targeting the same gene of interest (HTT), and a rabbit globin polyadenylation signal sequence region.

[0787] In one embodiment, the polycistronic AAV particle viral genome comprises SEQ ID NO: 1844 (VOYPC28) which comprises a 5′ inverted terminal repeat (ITR) sequence region and a 3′ ITR sequence region, a CMV enhancer sequence region, a CBA promoter sequence region, a SV40 intron sequence region, three modulatory polynucleotide regions targeting the same gene of interest (HTT), and a rabbit globin polyadenylation signal sequence region.

[0788] In one embodiment, the polycistronic AAV particle viral genome comprises at least one inverted terminal repeat (ITR) sequence region, at least one promoter sequence region, and three modulatory polynucleotide regions.

[0789] In one embodiment, the polycistronic AAV particle viral genome comprises a 5′ inverted terminal repeat (ITR) sequence region and a 3′ ITR sequence region, three H1 promoter sequence regions, and three modulatory polynucleotide sequence regions targeting the same gene of interest (HTT). Non-limiting examples of an ITR to ITR sequence for use in the polycistronic AAV particles of the present invention having all of the sequence modules above are described in Tables 35 and 36. In Tables 35 and 36, the sequence identifier or sequence of the sequence region (Region SEQ ID NO) and the length of the sequence region (Region length) are described as well as the name and sequence identifier of the ITR to ITR sequence (e.g., VOYPC29 (SEQ ID NO: 1845)),

TABLE 35
Sequence Regions in ITR to ITR Sequence

| | VOYPC29 (SEQ | | VOYPC31 (SEQ | | VOYPC32 (SEQ | |
|---|---|---|---|---|---|---|
| | ID NO: 1845) | | ID NO: 1847) | | ID NO: 1848) | |
| | Region | | Region | | Region | |
| Sequence | SEQ ID | Region | SEQ ID | Region | SEQ ID | Region |
| Regions | NO | length | NO | length | NO | length |
| 5′ ITR | 1788 | 105 | 1788 | 105 | 1788 | 105 |
| H1 Promoter | 1819 | 219 | 1819 | 219 | 1819 | 219 |
| Modulatory | 1599 | 260 | 1599 | 260 | 1599 | 260 |
| Polynucleotide | | | | | | |
| (VOYHTmiR- | | | | | | |
| 127.579) | | | | | | |
| H1 Terminator | 2681 | 5 | 2681 | 5 | 2681 | 5 |
| H1 Promoter | 1819 | 219 | 1819 | 219 | 1819 | 219 |
| Modulatory | 1589 | 158 | — | — | — | — |
| Polynucleotide | | | | | | |
| (VOYHTmiR- | | | | | | |
| 104.016) | | | | | | |
| Modulatory | — | — | 1599 | 260 | 1599 | 260 |
| Polynucleotide | | | | | | |
| (VOYHTmiR- | | | | | | |
| 127.579) | | | | | | |
| H1 Terminator | 2681 | 5 | 2681 | 5 | 2681 | 5 |
| H1 Promoter | 1819 | 219 | 1819 | 219 | 1819 | 219 |
| Modulatory | 1599 | 260 | 1599 | 260 | — | — |
| Polynucleotide | | | | | | |
| 127579) | | | | | | |
| Modulatory | — | — | — | | 1589 | 158 |
| Modulatory | | | | | | |
| Polynucleotide | | | | | | |
| (VOYHTmiR- | | | | | | |
| 104.016) | | | | | | |
| H1 Terminator | 2681 | 5 | 2681 | 5 | 2681 | 5 |
| 3′ ITR | 1790 | 130 | 1790 | 130 | 1790 | 130 |

TABLE 36
Sequence Regions in ITR to ITR Sequence

| | VOYPC30 (SEQ | | VOYPC33 (SEQ | | VOYPC34 (SEQ | |
|---|---|---|---|---|---|---|
| | ID NO: 1846) | | ID NO: 1849) | | ID NO: 1850) | |
| | Region | | Region | | Region | |
| Sequence | SEQ ID | Region | SEQ ID | Region | SEQ ID | Region |
| Regions | NO | length | NO | length | NO | length |
| 5′ ITR | 1788 | 105 | 1788 | 105 | 1788 | 105 |
| H1 Promoter | 1819 | 219 | 1819 | 219 | 1819 | 219 |
| Modulatory | 1589 | 158 | 1589 | 158 | 1589 | 158 |
| Polynucleotide | | | | | | |
| (VOYHTmiR- | | | | | | |
| 104.016) | | | | | | |
| H1 Terminator | 2681 | 5 | 2681 | 5 | 2681 | 5 |
| H1 Promoter | 1819 | 219 | 1819 | 219 | 1819 | 219 |
| Modulatory | 1599 | 260 | — | — | — | — |
| Polynucleotide | | | | | | |
| (VOYHTmiR- | | | | | | |
| 127.579) | | | | | | |
| Modulatory | — | — | 1589 | 158 | 1589 | 158 |
| Polynucleotide | | | | | | |
| (VOYHTmiR- | | | | | | |
| 104.016) | | | | | | |
| H1 Terminator | 2681 | 5 | 2681 | 5 | 2681 | 5 |
| H1 Promoter | 1819 | 219 | 1819 | 219 | 1819 | 219 |
| Modulatory | | | — | — | 1599 | 260 |
| Polynucleotide | | | | | | |
| (VOYHTmiR- | | | | | | |
| 127.579) | | | | | | |
| Modulatory | 1589 | 158 | 1589 | 158 | | |
| Polynucleotide | | | | | | |
| (VOYHTmiR- | | | | | | |
| 104.016) | | | | | | |
| H1 Terminator | 2681 | 5 | 2681 | 5 | 2681 | 5 |
| 3′ ITR | 1790 | 130 | 1790 | 130 | 1790 | 130 |

[0790] In one embodiment, the polycistronic AAV particle viral genome comprises SEQ ID NO: 1845 (VOYPC29) which comprises a 5′ inverted terminal repeat (ITR) sequence region and a 3′ ITR sequence region, three H1 promoter sequence regions, three modulatory polynucleotide regions targeting the same gene of interest (HTT), and three H1 terminator sequence regions, where each modulatory polynucleotide region is driven by its own H1 promoter and followed by its own H1 terminator.

[0791] In one embodiment, the polycistronic AAV particle viral genome comprises SEQ ID NO: 1846 (VOYPC30) which comprises a 5′ inverted terminal repeat (ITR) sequence region and a 3′ ITR sequence region, three H1 promoter sequence regions, three modulatory polynucleotide regions targeting the same gene of interest (HTT), and three H1 terminator sequence regions, and three H1 terminator sequence regions, where each modulatory polynucleotide region is driven by its own H1 promoter and followed by its own H1 terminator.

[0792] In one embodiment, the polycistronic AAV particle viral genome comprises SEQ ID NO: 1847 (VOYPC31) which comprises a 5′ inverted terminal repeat (ITR) sequence region and a 3′ ITR sequence region, three H1 promoter sequence regions, three modulatory polynucleotide regions targeting the same gene of interest (HTT), and three H1 terminator sequence regions, where each modulatory polynucleotide region is driven by its own H1 promoter and followed by its own H1 terminator.

[0793] In one embodiment, the polycistronic AAV particle viral genome comprises SEQ ID NO: 1848 (VOYPC32) which comprises a 5′ inverted terminal repeat (ITR) sequence region and a 3′ ITR sequence region, three H1 promoter sequence regions, three modulatory polynucleotide regions targeting the same gene of interest (HTT), and three H1 terminator sequence regions, where each modulatory polynucleotide region is driven by its own H1 promoter and followed by its own H1 terminator.

[0794] In one embodiment, the polycistronic AAV particle viral genome comprises SEQ ID NO: 1849 (VOYPC33) which comprises a 5′ inverted terminal repeat (ITR) sequence region and a 3′ ITR sequence region, three H1 promoter sequence regions, three modulatory polynucleotide regions targeting the same gene of interest (HTT), and three H1 terminator sequence regions, where each modulatory polynucleotide region is driven by its own H1 promoter and followed by its own H1 terminator.

[0795] In one embodiment, the polycistronic AAV particle viral genome comprises SEQ ID NO: 1850 (VOYPC34) which comprises a 5′ inverted terminal repeat (ITR) sequence region and a 3′ ITR sequence region, three H1 promoter sequence regions, three modulatory polynucleotide regions targeting the same gene of interest (HTT), and three H1 terminator sequence regions, where each modulatory polynucleotide region is driven by its own H1 promoter and followed by its own H1 terminator.

[0796] In one embodiment, the polycistronic AAV particle viral genome comprises two promoter sequence regions, three modulatory polynucleotide regions and at least one polyadenylation sequence region.

[0797] In one embodiment, the polycistronic AAV particle viral genome comprises a CMV promoter sequence region, a T7 primer binding site, three modulatory polynucleotide sequence regions targeting the same gene of interest (HTT) and a polyadenylation sequence region. Non-limiting examples of sequences for use in the polycistronic AAV particles of the present invention having all of the sequence modules above are described in Table 37. In Table 37, the sequence identifier or sequence of the sequence region (Region SEQ ID NO) and the length of the sequence region (Region length) are described as well as the name of the sequence (e.g., VOYPC35),

TABLE 37
Sequence Regions

| | VOYPC35 | | VOYPC36 | |
|---|---|---|---|---|
| Sequence | Region | | Region | |
| Regions | SEQ ID | Region | SEQ ID | Region |
| | NO | length | NO | length |
| CMV | 1817 | 588 | 1817 | 588 |
| Promoter | | | | |
| T7 Primer | 1820 | 17 | 1820 | 17 |
| Binding Site | | | | |
| Modulatory | 1599 | 260 | 1599 | 260 |
| Polynucleotide | | | | |
| (VOYHTmiR- | | | | |
| 127.579) | | | | |
| Modulatory | 1589 | 158 | 1589 | 158 |
| Polynucleotide | | | | |
| (VOYHTmiR- | | | | |
| 104.016) | | | | |
| Modulatory | 1589 | 158 | — | — |
| Polynucleotide | | | | |
| (VOYHTmiR- | | | | |
| 104.016) | | | | |
| Modulatory | — | — | 1599 | 260 |
| Polynucleotide | | | | |
| (VOYHTmiR- | | | | |
| 127.579) | | | | |
| PolyA | 1828 | 225 | 1828 | 225 |

[0798] In one embodiment, the polycistronic AAV particle viral genome comprises the sequence modules described in VOYPC35 which comprises a CMV promoter sequence region, a T7 primer binding site, three modulatory polynucleotide regions targeting the same gene of interest (HTT), and a polyadenylation sequence region.

[0799] In one embodiment, the polycistronic AAV particle viral genome comprises three promoter sequence regions, and three modulatory polynucleotide regions.

[0800] In one embodiment, the polycistronic AAV particle viral genome comprises a GTTG region, two H1 promoter sequence regions, and three modulatory polynucleotide sequence regions targeting the same gene of interest (HTT). Non-limiting examples of sequences for use in the polycistronic AAV particles of the present invention having all of the sequence modules above are described in Tables 38 and 39. In Tables 38 and 39, the sequence identifier or sequence of the sequence region (Region SEQ ID NO) and the length of the sequence region (Region length) are described as well as the name of the sequence (e.g., VOYPC37),

TABLE 38
Sequence Regions

| | VOYPC37 | | VOYPC38 | | VOYPC41 | |
|---|---|---|---|---|---|---|
| | Region | | Region | | Region | |
| Sequence | SEQ ID | Region | SEQ ID | Region | SEQ ID | Region |
| Regions | NO | length | NO | length | NO | length |
| GTTG | - - - | 4 | - - - | 4 | - - - | 4 |
| H1 Promoter | 1819 | 219 | 1819 | 219 | 1819 | 219 |
| Modulatory | 1599 | 260 | 1599 | 260 | 1599 | 260 |
| Polynucleotide | | | | | | |
| (VOYHTmiR- | | | | | | |
| 127.579) | | | | | | |
| H1 promoter | 1819 | 219 | 1819 | 219 | 1819 | 219 |
| Modulatory | 1599 | 260 | 1599 | 260 | — | — |
| Polynucleotide | | | | | | |
| (VOYHTmiR- | | | | | | |
| 127.579) | | | | | | |
| Modulatory | — | — | — | — | 1589 | 158 |
| Polynucleotide | | | | | | |
| (VOYHTmiR- | | | | | | |
| 104.016) | | | | | | |
| H1 promoter | 1819 | 219 | 1819 | 219 | 1819 | 219 |
| Modulatory | 1599 | 260 | — | — | 1599 | 260 |
| Polynucleotide | | | | | | |
| (VOYHTmiR- | | | | | | |
| 127.579) | | | | | | |
| Modulatory | — | — | 1589 | 158 | — | — |
| Polynucleotide | | | | | | |
| (VOYHTmiR- | | | | | | |
| 104.016) | | | | | | |

TABLE 39
Sequence Regions

| | VOYPC39 | | VOYPC40 | | VOYPC42 | |
|---|---|---|---|---|---|---|
| | Region | | Region | | Region | |
| Sequence | SEQ ID | Region | SEQ ID | Region | SEQ ID | Region |
| Regions | NO | length | NO | length | NO | length |
| GTTG | - - - | 4 | - - - | 4 | - - - | 4 |
| H1 Promoter | 1819 | 219 | 1819 | 219 | 1819 | 219 |
| Modulatory | 1589 | 158 | 1589 | 158 | 1589 | 158 |
| Polynucleotide | | | | | | |
| (VOYHTmiR- | | | | | | |
| 104.016) | | | | | | |
| H1 promoter | 1819 | 219 | 1819 | 219 | 1819 | 219 |
| Modulatory | 1589 | 158 | 1589 | 158 | — | — |
| Polynucleotide | | | | | | |
| (VOYHTmiR- | | | | | | |
| 104.016) | | | | | | |
| Modulatory | — | — | — | — | 1599 | 260 |
| Polynucleotide | | | | | | |
| (VOYHTmiR- | | | | | | |
| 127.579) | | | | | | |
| H1 promoter | 1819 | 219 | 1819 | 219 | 1819 | 219 |
| Modulatory | — | — | 1599 | 260 | — | — |
| Polynucleotide | | | | | | |
| (VOYHTmiR- | | | | | | |
| 127.579) | | | | | | |
| Modulatory | 1589 | 158 | — | — | 1589 | 158 |
| Polynucleotide | | | | | | |
| (VOYHTmiR- | | | | | | |
| 104.016) | | | | | | |

[0801] In one embodiment, the polycistronic AAV particle viral genome comprises the sequence modules described in VOYPC37 which comprises a GTTG region, three H1 promoter sequence region, and three modulatory polynucleotide regions targeting the same gene of interest (HTT).

[0802] In one embodiment, the polycistronic AAV particle viral genome comprises the sequence modules described in VOYPC38 which comprises a GTTG region, three H1 promoter sequence region, and three modulatory polynucleotide regions targeting the same gene of interest (HTT).

[0803] In one embodiment, the polycistronic AAV particle viral genome comprises the sequence modules described in VOYPC39 which comprises a GTTG, three H1 promoter sequence region, and three modulatory polynucleotide regions targeting the same gene of interest (HTT).

[0804] In one embodiment, the polycistronic AAV particle viral genome comprises the sequence modules described in VOYPC40 which comprises a GTTG region, three H1 promoter sequence region, and three modulatory polynucleotide regions targeting the same gene of interest (HTT).

[0805] In one embodiment, the polycistronic AAV particle viral genome comprises the sequence modules described in VOYPC41 which comprises a GTTG region, three H1 promoter sequence region, and three modulatory polynucleotide regions targeting the same gene of interest (HTT).

[0806] In one embodiment, the polycistronic AAV particle viral genome comprises the sequence modules described in VOYPC42 which comprises a GTTG region, three H1 promoter sequence region, and three modulatory polynucleotide regions targeting the same gene of interest (HTT),

[0807] In one embodiment, the polycistronic AAV particle viral genome comprises at least one inverted terminal repeat (ITR) sequence region, at least one promoter sequence region, and four modulatory polynucleotide regions.

[0808] In one embodiment, the polycistronic AAV particle viral genome comprises a 5′ inverted terminal repeat (ITR) sequence region and a 3′ ITR sequence region, four H1 promoter sequence regions, four modulatory polynucleotide sequence regions targeting the same gene of interest (HTT), and four H terminator sequence regions, where each modulatory polynucleotide region is driven by its own H1 promoter and followed by its own H1 terminator.

[0809] Non-limiting examples of an ITR to ITR sequence for use in the polycistronic AAV particles of the present invention having all of the sequence modules above are described in Tables 40 and 41. In Tables 40 and 41, the sequence identifier or sequence of the sequence region (Region SEQ ID NO) and the length of the sequence region (Region length) are described as well as the name and sequence identifier of the ITR to ITR sequence (e.g., VOYPC43 (SEQ ID NO: 1851)),

TABLE 40
Sequence Regions in ITR to ITR Sequence

| | VOYPC43 (SEQ ID | | VOYPC44 (SEQ ID | | VOYPC45 (SEQ ID | |
|---|---|---|---|---|---|---|
| | NO: 1851) | | NO: 1852) | | NO: 1853) | |
| | Region | | Region | | Region | |
| Sequence | SEQ ID | Region | SEQ ID | Region | SEQ ID | Region |
| Regions | NO | length | NO | length | NO | length |
| 5′ ITR | 1788 | 105 | 1788 | 105 | 1788 | 105 |
| H1 promoter | 1819 | 219 | 1819 | 219 | 1819 | 219 |
| Modulatory | 1599 | 260 | 1599 | 260 | 1599 | 260 |
| Polynucleotide | | | | | | |
| (VOYHTmiR- | | | | | | |
| 127.579) | | | | | | |
| H1 Terminator | 2681 | 5 | 2681 | 5 | 2681 | 5 |
| H1 promoter | 1819 | 219 | 1819 | 219 | 1819 | 219 |
| Modulatory | 1599 | 260 | — | — | — | — |
| Polynucleotide | | | | | | |
| (VOYHTmiR- | | | | | | |
| 127.579) | | | | | | |
| Modulatory | — | — | 1589 | 158 | 1589 | 158 |
| Polynucleotide | | | | | | |
| (VOYHTmiR- | | | | | | |
| 104.016) | | | | | | |
| H1 Terminator | 2681 | 5 | 2681 | 5 | 2681 | 5 |
| H1 promoter | 1819 | 219 | 1819 | 219 | 1819 | 219 |
| Modulatory | 1599 | 260 | 1599 | 260 | — | — |
| Polynucleotide | | | | | | |
| (VOYHTmiR- | | | | | | |
| 127.579) | | | | | | |
| Modulatory | — | — | — | — | 1589 | 158 |
| Polynucleotide | | | | | | |
| (VOYHTmiR- | | | | | | |
| 104.016) | | | | | | |
| H1 Terminator | 2681 | 5 | 2681 | 5 | 2681 | 5 |
| H1 promoter | 1819 | 219 | 1819 | 219 | 1819 | 219 |
| Modulatoty | 1599 | 260 | — | — | 1599 | 260 |
| Polynucleotide | | | | | | |
| (VOYHTmiR- | | | | | | |
| 127.579) | | | | | | |
| Modulatory | — | — | 1589 | 158 | — | — |
| Polynucleotide | | | | | | |
| (VOYHTmiR- | | | | | | |
| 104.016) | | | | | | |
| H1 Terminator | 2681 | 5 | 2681 | 5 | 2681 | 5 |
| 3′ ITR | 1790 | 130 | 1790 | 130 | 1790 | 130 |

TABLE 41
Sequence Regions in ITR to ITR Sequence

| | VOYPC46 (SEQ ID | | VOYPC47 (SEQ ID | | VOYPC48 (SEQ ID | |
|---|---|---|---|---|---|---|
| | NO: 1854) | | NO: 1855) | | NO: 1856) | |
| | Region | | Region | | Region | |
| Sequence | SEQ ID | Region | SEQ ID | Region | SEQ ID | Region |
| Regions | NO | length | NO | length | NO | length |
| 5′ ITR | 1788 | 105 | 1788 | 105 | 1788 | 105 |
| H1 promoter | 1819 | 219 | 1819 | 219 | 1819 | 219 |
| Modulatory | 1589 | 158 | 1589 | 158 | 1589 | 158 |
| Polynucleotide | | | | | | |
| (VOYHTmiR- | | | | | | |
| 104.016) | | | | | | |
| H1 Terminator | 2681 | 5 | 2681 | 5 | 2681 | 5 |
| H1 promoter | 1819 | 219 | 1819 | 219 | 1819 | 219 |
| Modulatory | 1599 | 260 | — | — | 1599 | 260 |
| Polynucleotide | | | | | | |
| (VOYHTmiR- | | | | | | |
| 127.579) | | | | | | |
| Modulatory | — | — | 1589 | 158 | — | — |
| Polynucleotide | | | | | | |
| (VOYHTmiR- | | | | | | |
| 104.016) | | | | | | |
| H1 Terminator | 2681 | 5 | 2681 | 5 | 2681 | 5 |
| H1 promoter | 1819 | 219 | 1819 | 219 | 1819 | 219 |
| Modulatory | 1599 | 260 | — | — | — | — |
| Polynucleotide | | | | | | |
| (VOYHTmiR- | | | | | | |
| 127.579) | | | | | | |
| Modulatory | — | — | 1589 | 158 | 1589 | 158 |
| Polynucleotide | | | | | | |
| (VOYHTmiR- | | | | | | |
| 104.016) | | | | | | |
| H1 Terminator | 2681 | 5 | 2681 | 5 | 2681 | 5 |
| H1 promoter | 1819 | 219 | 1819 | 219 | 1819 | 219 |
| Modulatory | — | — | — | — | 1599 | 260 |
| Polynucleotide | | | | | | |
| (VOYHTmiR- | | | | | | |
| 127.579) | | | | | | |
| Modulatory | 1589 | 158 | 1589 | 158 | — | — |
| Polynucleotide | | | | | | |
| (VOYHTmiR- | | | | | | |
| 104.016) | | | | | | |
| H1 Terminator | 2681 | 5 | 2681 | 5 | 2681 | 5 |
| 3′ ITR | 1790 | 130 | 1790 | 130 | 1790 | 130 |

[0810] In one embodiment, the polycistronic AAV particle viral genome comprises SEQ ID NO: 1851 (VOYPC43) which comprises a 5′ inverted terminal repeat (ITR) sequence region and a 3′ ITR sequence region, four H1 promoter sequence regions, four modulatory polynucleotide regions targeting the same gene of interest (HTT), and four H1 terminator sequence regions, where each modulatory polynucleotide region is driven by its own H1 promoter and followed by its own H1 terminator.

[0811] In one embodiment, the polycistronic AAV particle viral genome comprises SEQ ID NO: 1852 (VOYPC44) which comprises a 5′ inverted terminal repeat (ITR) sequence region and a 3′ ITR sequence region, four H1 promoter sequence regions, four modulatory polynucleotide regions targeting the same gene of interest (HTT), and four H1 terminator sequence regions, where each modulatory polynucleotide region is driven by its own H1 promoter and followed by its own H1 terminator.

[0812] In one embodiment, the polycistronic AAV particle viral genome comprises SEQ ID NO: 1853 (VOYPC45) which comprises a 5′ inverted terminal repeat (ITR) sequence region and a 3′ ITR sequence region, four H1 promoter sequence regions, four modulatory polynucleotide regions targeting the same gene of interest (HTT), and four H1 terminator sequence regions, where each modulatory polynucleotide region is driven by its own H1 promoter and followed by its own H1 terminator.

[0813] In one embodiment, the polycistronic AAV particle viral genome comprises SEQ ID NO: 1854 (VOYPC46) which comprises a 5′ inverted terminal repeat (ITR) sequence region and a 3′ ITR sequence region, four H1 promoter sequence regions, four modulatory polynucleotide regions targeting the same gene of interest (HTT), and four H1 terminator sequence regions, where each modulatory polynucleotide region is driven by its own H1 promoter and followed by its own H1 terminator.

[0814] In one embodiment, the polycistronic AAV particle viral genome comprises SEQ ID NO: 1855 (VOYPC47) which comprises a 5′ inverted terminal repeat (ITR) sequence region and a 3′ ITR sequence region, four H1 promoter sequence regions, four modulatory polynucleotide regions targeting the same gene of interest (HTT), and four H1 terminator sequence regions, where each modulatory polynucleotide region is driven by its own H1 promoter and followed by its own H1 terminator.

[0815] In one embodiment, the polycistronic AAV particle viral genome comprises SEQ ID NO: 1856 (VOYPC48) which comprises a 5′ inverted terminal repeat (ITR) sequence region and a 3′ ITR sequence region, four H1 promoter sequence regions, four modulatory polynucleotide regions targeting the same gene of interest (HTT), and four H1 terminator sequence regions, where each modulatory polynucleotide region is driven by its own H1 promoter and followed by its own H1 terminator.

[0816] In one embodiment, the polycistronic AAV particle viral genome comprises at least one inverted terminal repeat (ITR) sequence region, at least one enhancer sequence region, at least one intron sequence region, at least one promoter sequence region, and four modulatory polynucleotide regions.

[0817] In one embodiment, the polycistronic AAV particle viral genome comprises a 5′ inverted terminal repeat (ITR) sequence region and a 3′ ITR sequence region, a CMV enhancer sequence region, four H1 promoter sequence regions, and four modulatory polynucleotide sequence regions targeting the same gene of interest (HTT). Non-limiting examples of an ITR to ITR sequence for use in the polycistronic AAV particles of the present invention having all of the sequence modules above are described in Table 42. In Table 42, the sequence identifier or sequence of the sequence region (Region SEQ ID NO) and the length of the sequence region (Region length) are described as well as the name and sequence identifier of the ITR to ITR sequence (e.g., VOYPC49 (SEQ ID NO: 1857)),

TABLE 42
Sequence Regions in ITR to ITR Sequence

| | VOYPC49 (SEQ ID | | VOYPC50 (SEQ ID | |
|---|---|---|---|---|
| | NO: 1857) | | NO: 1858) | |
| | Region | | Region | |
| Sequence | SEQ ID | Region | SEQ ID | Region |
| Regions | NO | length | NO | length |
| 5′ ITR | 1788 | 105 | 1788 | 105 |
| CMV | 1814 | 382 | 1814 | 382 |
| enhancer | | | | |
| CBA Promoter | 1816 | 260 | 1816 | 260 |
| SV40 intron | 1826 | 201 | 1826 | 201 |
| Modulatory | 1599 | 260 | 1599 | 260 |
| Polynucleotide | | | | |
| (VOYHTmiR- | | | | |
| 127.579) | | | | |
| Modulatory | 1589 | 158 | 1589 | 158 |
| Polynucleotide | | | | |
| (VOYHTmiR- | | | | |
| 104.016) | | | | |
| Modulatory | 1599 | 260 | — | — |
| Polynucleotide | | | | |
| (VOYHTmiR- | | | | |
| 127.579) | | | | |
| Modulatory | — | — | 1589 | 158 |
| Polynucleotide | | | | |
| (VOYHTmiR- | | | | |
| 104.016) | | | | |
| Modulatory | — | — | 1599 | 260 |
| Polynucleotide | | | | |
| (VOYHTmiR- | | | | |
| 127.579) | | | | |
| Modulatory | 1589 | 158 | — | — |
| Polynucleotide | | | | |
| (VOYHTmiR- | | | | |
| 104.016) | | | | |
| PolyA | 1827 | 127 | 1827 | 127 |
| 3′ ITR | 1790 | 130 | 1790 | 130 |

[0818] In one embodiment, the polycistronic AAV particle viral genome comprises SEQ ID NO: 1857 (VOYPC49) which comprises a 5′ inverted terminal repeat (ITR) sequence region and a 3′ ITR sequence region, a CMV enhancer, a SV40 intron, four modulatory polynucleotide regions targeting the same gene of interest (HTT), and a polyadenylation sequence region.

[0819] In one embodiment, the polycistronic AAV particle viral genome comprises SEQ ID NO: 1858 (VOYPC50) which comprises a 5′ inverted terminal repeat (ITR) sequence region and a 3′ ITR sequence region, a CMV enhancer, a SV40 intron, four modulatory polynucleotide regions targeting the same gene of interest (HTT), and a polyadenylation sequence region.

[0820] In one embodiment, the polycistronic AAV particle viral genome comprises two promoter sequence regions, four modulatory polynucleotide regions and at least one polyadenylation sequence region.

[0821] In one embodiment, the polycistronic AAV particle viral genome comprises a CMV promoter sequence region, a T7 primer binding site region, four modulatory polynucleotide sequence regions targeting the same gene of interest (HTT) and a polyadenylation sequence region. Non-limiting examples of sequences for use in the polycistronic AAV particles of the present invention having all of the sequence modules above are described in Table 43. In Table 43, the sequence identifier or sequence of the sequence region (Region SEQ ID NO) and the length of the sequence region (Region length) are described as well as the name of the sequence (e.g., VOYPC51),

TABLE 43
Sequence Regions

| | VOYPC51 | | VOYPC52 | |
|---|---|---|---|---|
| | Region | | Region | |
| Sequence | SEQ ID | Region | SEQ ID | Region |
| Regions | NO | length | NO | length |
| CMV | 1817 | 588 | 1817 | 588 |
| Promoter | | | | |
| T7 Primer | 1820 | 17 | 1820 | 17 |
| binding site | | | | |
| Modulatory | 1599 | 260 | 1599 | 260 |
| Polynucleotide | | | | |
| (VOYHTmiR- | | | | |
| 127.579) | | | | |
| Modulatory | 1589 | 158 | 1589 | 158 |
| Polynucleotide | | | | |
| (VOYHTmiR- | | | | |
| 104. 016) | | | | |
| Modulatory | — | — | 1589 | 158 |
| Polynucleotide | | | | |
| (VOYHTmiR- | | | | |
| 104.016) | | | | |
| Modulatory | 1599 | 260 | — | — |
| Polynucleotide | | | | |
| (VOYHTmiR- | | | | |
| 127.579) | | | | |
| Modulatory | 1589 | 158 | — | — |
| Polynucleotide | | | | |
| (VOYHTmiR- | | | | |
| 104.016) | | | | |
| Modulatory | — | — | 1599 | 260 |
| Polynucleotide | | | | |
| (VOYHTmiR- | | | | |
| 127.579) | | | | |
| PolyA | 1828 | 225 | 1828 | 225 |

[0822] In one embodiment, the polycistronic AAV particle viral genome comprises the sequence modules described in VOYPC51 which comprises a CMV promoter sequence region, a T7 primer binding site region, four modulatory polynucleotide regions targeting the same gene of interest (HTT), and a polyadenylation sequence region.

[0823] In one embodiment, the polycistronic AAV particle viral genome comprises the sequence modules described in VOYPC52 which comprises a CMV promoter sequence region, a T7 primer binding site region, four modulatory polynucleotide regions targeting the same gene of interest (HTT), and a polyadenylation sequence region.

[0824] In one embodiment, the polycistronic AAV particle viral genome comprises five promoter sequence regions and four modulatory polynucleotide regions.

[0825] In one embodiment, the polycistronic AAV particle viral genome comprises a GTTG region, four H1 promoter sequence regions, and four modulatory polynucleotide sequence regions targeting the same gene of interest (HTT). Non-limiting examples of sequences for use in the polycistronic AAV particles of the present invention having all of the sequence modules above are described in Tables 44 and 45. In Tables 44 and 45, the sequence identifier or sequence of the sequence region (Region SEQ ID NO) and the length of the sequence region (Region length) are described as well as the name of the sequence (e.g., VOYPC53),

TABLE 44
Sequence Regions

| | VOYPC53 | | VOYPC54 | | VOYPC55 | |
|---|---|---|---|---|---|---|
| | Region | | Region | | Region | |
| Sequence | SEQ ID | Region | SEQ ID | Region | SEQ ID | Region |
| Regions | NO | length | NO | length | NO | length |
| GTTG | — | 4 | — | 4 | — | 4 |
| H1 Promoter | 1819 | 219 | 1819 | 219 | 1819 | 219 |
| Modulatory | 1599 | 260 | 1599 | 260 | 1599 | 260 |
| Polynucleotide | | | | | | |
| (VOYHTmiR- | | | | | | |
| 127.579) | | | | | | |
| H1 promoter | 1819 | 219 | 1819 | 219 | 1819 | 219 |
| Modulatory | 1599 | 260 | — | — | — | — |
| Polynucleotide | | | | | | |
| (VOYHTmiR- | | | | | | |
| 127.579) | | | | | | |
| Modulatory | — | — | 1589 | 158 | 1589 | 158 |
| Polynucleotide | | | | | | |
| (VOYHTmiR- | | | | | | |
| 104.016) | | | | | | |
| H1 promoter | 1819 | 219 | 1819 | 219 | 1819 | 219 |
| Modulatory | 1599 | 260 | 1599 | 260 | — | — |
| Polynucleotide | | | | | | |
| (VOYHTmiR- | | | | | | |
| 127.579) | | | | | | |
| Modulatory | — | — | — | — | 1589 | 158 |
| Polynucleotide | | | | | | |
| (VOYHTmiR- | | | | | | |
| 104.016) | | | | | | |
| H1 promoter | 1819 | 219 | 1819 | 219 | 1819 | 219 |
| Modulatory | 1599 | 260 | — | — | 1599 | 260 |
| Polynucleotide | | | | | | |
| (VOYHTmiR- | | | | | | |
| 127.579) | | | | | | |
| Modulatory | — | — | 1589 | 158 | — | — |
| Polynucleotide | | | | | | |
| (VOYHTmiR- | | | | | | |
| 104.016) | | | | | | |

TABLE 45
Sequence Regions

| | VOYPC56 | | VOYPC57 | | VOYPC58 | |
|---|---|---|---|---|---|---|
| | Region | | Region | | Region | |
| Sequence | SEQ ID | Region | SEQ ID | Region | SEQ ID | Region |
| Regions | NO | length | NO | length | NO | length |
| GTTG | — | 4 | — | 4 | — | 4 |
| H1 Promoter | 1819 | 219 | 1819 | 219 | 1819 | 219 |
| Modulatory | 1589 | 158 | 1589 | 158 | 1589 | 158 |
| Polynucleotide | | | | | | |
| (VOYHTmiR- | | | | | | |
| 104.016) | | | | | | |
| H1 promoter | 1819 | 219 | 1819 | 219 | 1819 | 219 |
| Modulatory | 1599 | 260 | 1599 | 260 | — | — |
| Polynucleotide | | | | | | |
| (VOYHTmiR- | | | | | | |
| 127.579) | | | | | | |
| Modulatory | — | — | — | — | 1589 | 158 |
| Polynucleotide | | | | | | |
| (VOYHTmiR- | | | | | | |
| 104.016) | | | | | | |
| H1 promoter | 1819 | 219 | 1819 | 219 | 1819 | 219 |
| Modulatory | — | — | 1599 | 260 | — | — |
| Polynucleotide | | | | | | |
| (VOYHTmiR- | | | | | | |
| 127.579) | | | | | | |
| Modulatory | 1589 | 158 | — | — | 1589 | 158 |
| Polynucleotide | | | | | | |
| (VOYHTmiR- | | | | | | |
| 104.016) | | | | | | |
| H1 promoter | 1819 | 219 | 1819 | 219 | 1819 | 219 |
| Modulatory | 1599 | 260 | — | — | — | — |
| Polynucleotide | | | | | | |
| (VOYHTmiR- | | | | | | |
| 127.579) | | | | | | |
| Modulatory | — | — | 1589 | 158 | 1589 | 158 |
| Polynucleotide | | | | | | |
| (VOYHTmiR- | | | | | | |
| 104.016) | | | | | | |

[0826] In one embodiment, the polycistronic AAV particle viral genome comprises the sequence modules described in VOYPC53 which comprises a GTTG region, four H1 promoter sequence regions, and four modulatory polynucleotide regions targeting the same gene of interest (HTT).

[0827] In one embodiment, the polycistronic AAV particle viral genome comprises the sequence modules described in VOYPC54 which comprises a GTTG region, four H1 promoter sequence regions, and four modulatory polynucleotide regions targeting the same gene of interest (HTT).

[0828] In one embodiment, the polycistronic AAV particle viral genome comprises the sequence modules described in VOYPC55 which comprises a GTTG region, four H1 promoter sequence regions, and four modulatory polynucleotide regions targeting the same gene of interest (HTT).

[0829] In one embodiment, the polycistronic AAV particle viral genome comprises the sequence modules described in VOYPC56 which comprises a GTTG region, four H1 promoter sequence regions, and four modulatory polynucleotide regions targeting the same gene of interest (HTT),

[0830] In one embodiment, the polycistronic AAV particle viral genome comprises the sequence modules described in VOYPC57 which comprises a GTTG region, four H1 promoter sequence regions, and four modulatory polynucleotide regions targeting the same gene of interest (HTT).

[0831] In one embodiment, the polycistronic AAV particle viral genome comprises the sequence modules described in VOYPC58 which comprises a GTTG region, four H1 promoter sequence regions, and four modulatory polynucleotide regions targeting the same gene of interest (HTT),

### Viral Production

[0832] The present disclosure provides a method for the generation of parvoviral particles. e.g. AAV particles, by viral genome replication in a viral replication cell comprising contacting the viral replication cell with an AAV polynucleotide or AAV genome.

[0833] The present disclosure provides a method for producing an AAV particle having enhanced (increased, improved) transduction efficiency comprising the steps of: 1) co-transfecting competent bacterial cells with a bacmid vector and either a viral construct vector and/or AAV payload construct vector, 2) isolating the resultant viral construct expression vector and AAV payload construct expression vector and separately transfecting viral replication cells, 3) isolating and purifying resultant payload and viral construct particles comprising viral construct expression vector or AAV payload construct expression vector, 4) co-infecting a viral replication cell with both the AAV payload and viral construct particles comprising viral construct expression vector or AAV payload construct expression vector, 5) harvesting and purifying the viral particle comprising a parvoviral genome.

[0834] In one embodiment, the present invention provides a method for producing an AAV particle comprising the steps of 1) simultaneously co-transfecting mammalian cells, such as, but not limited to HEK293 cells, with a payload region, a construct expressing rep and cap genes and a helper construct, 2) harvesting and purifying the AAV particle comprising a viral genome.

### Cells

[0835] The present disclosure provides a cell comprising an AAV polynucleotide and/or AAV genome.

[0836] Viral production disclosed herein describes processes and methods for producing AAV particles that contact a target cell to deliver a payload construct, e.g. a recombinant viral construct, which comprises a polynucleotide sequence encoding a payload molecule.

[0837] In one embodiment, the AAV particles may be produced in a viral replication cell that comprises an insect cell.

[0838] Growing conditions for insect cells in culture, and production of heterologous products in insect cells in culture are well-known in the art, see U.S. Pat. No. 6,204,059, the contents of which are herein incorporated by reference in their entirety.

[0839] Any insect cell which allows for replication of parvovirus and which can be maintained in culture can be used in accordance with the present invention. Cell lines may be used from Spodoptera frugiperda, including, but not limited to the Sf9 or Sf21 cell lines, Drosophila cell lines, or mosquito cell lines, such as Aedes albopictus derived cell lines. Use of insect cells for expression of heterologous proteins is well documented, as are methods of introducing nucleic acids, such as vectors, e.g., insect-cell compatible vectors, into such cells and methods of maintaining such cells in culture. See, for example, Methods in Molecular Biology, ed. Richard, Humana Press, NJ (1995): O'Reilly et al., Baculovirus Expression Vectors, A Laboratory Manual, Oxford Univ. Press (1994); Samulski et al., J. Vir. 63:3822-8 (1989); Kajigaya et al., Proc. Nat'l. Acad. Sci. USA 88: 4646-50 (1991); Ruffing et al., J. Vir. 66:6922-30 (1992); Kimbauer et al., Vir. 219:37-44 (1996); Zhao et al., Vir. 272:382-93 (2000); and Samulski et al., U.S. Pat. No. 6,204,059, the contents of each of which is herein incorporated by reference in its entirety.

[0840] The viral replication cell may be selected from any biological organism, including prokaryotic (e.g., bacterial) cells, and eukaryotic cells, including, insect cells, yeast cells and mammalian cells. Viral replication cells may comprise mammalian cells such as A549, WEH1, 3T3, 10T1/2, BHK, MDCK, COS 1, COS 7, BSC 1, BSC 40, BMT 10, VERO. W138, HeLa, HEK293, Saos, C2C12, L cells, HT1080, HepG2 and primary fibroblast, hepatocyte and myoblast cells derived from mammals. Viral replication cells comprise cells derived from mammalian species including, but not limited to, human, monkey, mouse, rat, rabbit, and hamster or cell type, including but not limited to fibroblast, hepatocyte, tumor cell, cell line transformed cell, etc.

### Small Scale Production of AAV Particles

[0841] Viral production disclosed herein describes processes and methods for producing AAV particles that contact a target cell to deliver a payload, e.g. a recombinant viral construct, which comprises a polynucleotide sequence encoding a payload.

[0842] In one embodiment, the AAV particles may be produced in a viral replication cell that comprises a mammalian cell.

[0843] Viral replication cells commonly used for production of recombinant AAV particles include, but are not limited to 293 cells, COS cells, HeLa cells, KB cells, and other mammalian cell lines as described in U.S. Pat. Nos. 6,156,303, 5,387,484, 5,741,683, 5,691,176, and 5,688,676; U.S. patent application 2002/0081721, and International Patent Applications WO 00/47757, WO 00/24916, and WO 96/17947, the contents of each of which are herein incorporated by reference in their entireties.

[0844] In one embodiment, AAV particles are produced in mammalian-cells wherein all three VP proteins are expressed at a stoichiometry approaching 1:1:10 (VP1:VP2:VP3). The regulatory mechanisms that allow this controlled level of expression include the production of two mRNAs, one for VP1, and the other for VP2 and VP3, produced by differential splicing.

[0845] In another embodiment, AAV particles are produced in mammalian cells using a triple transfection method wherein a payload construct, parvoviral Rep and parvoviral Cap and a helper construct are comprised within three different constructs. The triple transfection method of the three components of AAV particle production may be utilized to produce small lots of virus for assays including transduction efficiency, target tissue (tropism) evaluation, and stability.

### Baculovirus

[0846] Particle production disclosed herein describes processes and methods for producing AAV particles that contact a target cell to deliver a payload construct which comprises a polynucleotide sequence encoding a payload.

[0847] Briefly, the viral construct vector and the AAV payload construct vector are each incorporated by a transposon donor/acceptor system into a bacmid, also known as a baculovirus plasmid, by standard molecular biology techniques known and performed by a person skilled in the art. Transfection of separate viral replication cell populations produces two baculoviruses, one that comprises the viral construct expression vector, and another that comprises the AAV payload construct expression vector. The two baculoviruses may be used to infect a single viral replication cell population for production of AAV particles.

[0848] Baculovirus expression vectors for producing viral particles in insect cells, including but not limited to Spodoptera frugiperda (Sf9) cells, provide high titers of viral particle product. Recombinant baculovirus encoding the viral construct expression vector and AAV payload construct expression vector initiates a productive infection of viral replicating cells. Infectious baculovirus particles released from the primary infection secondarily infect additional cells in the culture, exponentially infecting the entire cell culture population in a number of infection cycles that is a function of the initial multiplicity of infection, see Urabe, M. et al., J Virol. 2006 February; 80 (4): 1874-85, the contents of which are herein incorporated by reference in their entirety.

[0849] Production of AAV particles with baculovirus in an insect cell system may address known baculovirus genetic and physical instability. In one embodiment, the production system addresses baculovirus instability over multiple passages by utilizing a titerless infected-cells preservation and scale-up system. Small scale seed cultures of viral producing cells are transfected with viral expression constructs encoding the structural, non-structural, components of the viral particle. Baculovirus-infected viral producing cells are harvested into aliquots that may be cryopreserved in liquid nitrogen; the aliquots retain viability and infectivity for infection of large scale viral producing cell culture Wasilko D J et al., Protein Expr Purif. 2009 June; 65(2): 122-32, the contents of which are herein incorporated by reference in their entirety.

[0850] A genetically stable baculovirus may be used to produce source of the one or more of the components for producing AAV particles in invertebrate cells. In one embodiment, defective baculovirus expression vectors may be maintained episomally in insect cells. In such an embodiment the bacmid vector is engineered with replication control elements, including but not limited to promoters, enhancers, and/or cell-cycle regulated replication elements.

[0851] In one embodiment, baculoviruses may be engineered with a (non-) selectable marker for recombination into the chitinase/cathepsin locus. The chia/v-cath locus is non-essential for propagating baculovirus in tissue culture, and the V-cath (EC 3.4.22.50) is a cysteine endoprotease that is most active on Arg-Arg dipeptide containing substrates. The Arg-Arg dipeptide is present in densovirus and parvovirus capsid structural proteins but infrequently occurs in dependovirus VP1.

[0852] In one embodiment, stable viral replication cells permissive for baculovirus infection are engineered with at least one stable integrated copy of any of the elements necessary for AAV replication and viral particle production including, but not limited to, the entire AAV genome, Rep and Cap genes, Rep genes, Cap genes, each Rep protein as a separate transcription cassette, each VP protein as a separate transcription cassette, the AAP (assembly activation protein), or at least one of the baculovirus helper genes with native or non-native promoters.

### Large-Scale Production

[0853] In some embodiments, AAV particle production may be modified to increase the scale of production. Large scale viral production methods according to the present disclosure may include any of those taught in U.S. Pat. Nos. 5,756,283, 6,258,595, 6,261,551, 6,270,996, 6,281,010, 6,365,394, 6,475,769, 6,482,634, 6,485,966, 6,943,019, 6,953,690, 7,022,519, 7,238,526, 7,291,498 and 7,491,508 or International Publication Nos, WO 1996039530, WO 1998010088, WO 1999014354, WO 1999015685, WO 1999047691, WO2000055342, WO2000075353 and WO2001023597, the contents of each of which are herein incorporated by reference in their entirety. Methods of increasing viral particle production scale typically comprise increasing the number of viral replication cells. In some embodiments, viral replication cells comprise adherent cells. To increase the scale of viral particle production by adherent viral replication cells, larger cell culture surfaces are required. In some cases, large-scale production methods comprise the use of roller bottles to increase cell culture surfaces. Other cell culture substrates with increased surface areas are known in the art. Examples of additional adherent cell culture products with increased surface areas include, but are not limited to CELLSTACK®, CELLCUBE® (Corning Corp., Corning, N.Y.) and NUNC™ CELL FACTORY™ (Thermo Scientific, Waltham, Mass.) In some cases, large-scale adherent cell surfaces may comprise from about 1,000 cm² to about 100,000 cm². In some cases, large-scale adherent cell cultures may comprise from about 10⁷ to about 10⁹ cells, from about 10⁸ to about 10¹⁰ cells, from about 10⁹ to about 10¹² cells or at least 10¹² cells. In some cases, large-scale adherent cultures may produce from about 10⁹ to about 10¹², from about 10¹⁰ to about 10¹³, from about 10¹¹ to about 10¹⁴, from about 10¹² to about 10¹⁹ or at least 10¹⁵ viral particles.

[0854] In some embodiments, large-scale viral production methods of the present disclosure may comprise the use of suspension cell cultures. Suspension cell culture allows for significantly increased numbers of cells. Typically, the number of adherent cells that can be grown on about 10-50 cm² of surface area can be grown in about 1 cm³ volume in suspension.

[0855] Transfection of replication cells in large-scale culture formats may be carried out according to any methods known in the art. For large-scale adherent cell cultures, transfection methods may include, but are not limited to the use of inorganic compounds (e.g. calcium phosphate), organic compounds [e.g. polyethyleneimine (PEI)] or the use of non-chemical methods (e.g. electroporation.) With cells grown in suspension, transfection methods may include, but are not limited to the use of calcium phosphate and the use of PEI. In some cases, transfection of large scale suspension cultures may be carried out according to the section entitled “Transfection Procedure” described in Feng. L. et al., 2008. Biotechnol Appl. Biochem. 50:121-32, the contents of which are herein incorporated by reference in their entirety. According to such embodiments, PEI-DNA complexes may be formed for introduction of plasmids to be transfected. In some cases, cells being transfected with PEI-DNA complexes may be ‘shocked’ prior to transfection. This comprises lowering cell culture temperatures to 4° C. for a period of about 1 hour. In some cases, cell cultures may be shocked for a period of from about 10 minutes to about 5 hours. In some cases, cell cultures may be shocked at a temperature of from about 0° C. to about 20° C.

[0856] In some cases, transfections may include one or more vectors for expression of an RNA effector molecule to reduce expression of nucleic acids from one or more AAV payload construct. Such methods may enhance the production of viral particles by reducing cellular resources wasted on expressing payload constructs. In some cases, such methods may be carried according to those taught in US Publication No. US2014/0099666, the contents of which are herein incorporated by reference in their entirety.

### Bioreactors

[0857] In some embodiments, cell culture bioreactors may be used for large scale viral production. In some cases, bioreactors comprise stirred tank reactors. Such reactors generally comprise a vessel, typically cylindrical in shape, with a stirrer (e.g. impeller.) In some embodiments, such bioreactor vessels may be placed within a water jacket to control vessel temperature and/or to minimize effects from ambient temperature changes. Bioreactor vessel volume may range in size from about 500 ml to about 2 L, from about 1 L to about 5 L, from about 2.5 L to about 20 L, from about 10 L to about 50 L, from about 25 L to about 100 L, from about 75 L to about 500 L, from about 250 L to about 2,000 L, from about 1,000 L to about 10,000 L, from about 5,000 L to about 50,000 L or at least 50,000 L. Vessel bottoms may be rounded or flat. In some cases, animal cell cultures may be maintained in bioreactors with rounded vessel bottoms.

[0858] In some cases, bioreactor vessels may be warmed through the use of a thermocirculator. Thermocirculators pump heated water around water jackets. In some cases, heated water may be pumped through pipes (e.g. coiled pipes) that are present within bioreactor vessels. In some cases, warm air may be circulated around bioreactors, including, but not limited to air space directly above culture medium. Additionally, pH and CO₂ levels may be maintained to optimize cell viability.

[0859] In some cases, bioreactors may comprise hollow-fiber reactors. Hollow-fiber bioreactors may support the culture of both anchorage dependent and anchorage independent cells. Further bioreactors may include, but are not limited to packed-bed or fixed-bed bioreactors. Such bioreactors may comprise vessels with glass beads for adherent cell attachment. Further packed-bed reactors may comprise ceramic beads.

[0860] In some cases, viral particles are produced through the use of a disposable bioreactor. In some embodiments, such bioreactors may include WAVE™ disposable bioreactors.

[0861] In some embodiments, AAV particle production in animal cell bioreactor cultures may be carried out according to the methods taught in U.S. Pat. Nos. 5,064,764, 6,194,191, 6,566,118, 8,137,948 or US Patent Application No. US2011/0229971, the contents of each of which are herein incorporated by reference in their entirety.

### Cell Lysis

[0862] Cells of the invention, including, but not limited to viral production cells, may be subjected to cell lysis according to any methods known in the art. Cell lysis may be carried out to obtain one or more agents (e.g. viral particles) present within any cells of the invention. In some embodiments, cell lysis may be carried out according to any of the methods listed in U.S. Pat. Nos. 7,326,555, 7,579,181, 7,048,920, 6,410,300, 6,436,394, 7,732,129, 7,510,875, 7,445,930, 6,726,907, 6,194,191, 7,125,706, 6,995,006, 6,676,935, 7,968,333, 5,756,283, 6,258,595, 6,261,551, 6,270,996, 6,281,010, 6,365,394, 6,475,769, 6,482,634, 6,485,966, 6,943,019, 6,953,690, 7,022,519, 7,238,526, 7,291,498 and 7,491,508 or International Publication Nos, WO 1996039530, WO 1998010088, WO 1999014354, WO 1999015685, WO 1999047691, WO2000055342, WO2000075353 and WO2001023597, the contents of each of which are herein incorporated by reference in their entirety. Cell lysis methods may be chemical or mechanical. Chemical cell lysis typically comprises contacting one or more cells with one or more lysis agent. Mechanical lysis typically comprises subjecting one or more cells to one or more lysis condition and/or one or more lysis force.

[0863] In some embodiments, chemical lysis may be used to lyse cells. As used herein, the term “lysis agent” refers to any agent that may aid in the disruption of a cell. In some cases, lysis agents are introduced in solutions, termed lysis solutions or lysis buffers. As used herein, the term “lysis solution” refers to a solution (typically aqueous) comprising one or more lysis agent. In addition to lysis agents, lysis solutions may include one or more buffering agents, solubilizing agents, surfactants, preservatives, cryoprotectants, enzymes, enzyme inhibitors and/or chelators. Lysis buffers are lysis solutions comprising one or more buffering agent. Additional components of lysis solutions may include one or more solubilizing agent. As used herein, the term “solubilizing agent” refers to a compound that enhances the solubility of one or more components of a solution and/or the solubility of one or more entities to which solutions are applied. In some cases, solubilizing agents enhance protein solubility. In some cases, solubilizing agents are selected based on their ability to enhance protein solubility while maintaining protein conformation and/or activity.

[0864] Exemplary lysis agents may include any of those described in U.S. Pat. Nos. 8,685,734, 7,901,921, 7,732,129, 7,223,585, 7,125,706, 8,236,495, 8,110,351, 7,419,956, 7,300,797, 6,699,706 and 6,143,567, the contents of each of which are herein incorporated by reference in their entirety. In some cases, lysis agents may be selected from lysis salts, amphoteric agents, cationic agents, ionic detergents and non-ionic detergents. Lysis salts may include, but are not limited to sodium chloride (NaCl) and potassium chloride (KCl.) Further lysis salts may include any of those described in U.S. Pat. Nos. 8,614,101, 7,326,555, 7,579,181, 7,048,920, 6,410,300, 6,436,394, 7,732,129, 7,510,875, 7,445,930, 6,726,907, 6,194,191, 7,125,706, 6,995,006, 6,676,935 and 7,968,333, the contents of each of which are herein incorporated by reference in their entirety. Concentrations of salts may be increased or decreased to obtain an effective concentration for rupture of cell membranes. Amphoteric agents, as referred to herein, are compounds capable of reacting as an acid or a base. Amphoteric agents may include, but are not limited to lysophosphatidylcholine, 3-((3-Cholamidopropyl) dimethylammonium)-1-propanesulfonate (CHAPS), ZWITTERGENT® and the like. Cationic agents may include, but are not limited to cetyltrimethylammonium bromide (C (16) TAB) and Benzalkonium chloride. Lysis agents comprising detergents may include ionic detergents or non-ionic detergents. Detergents may function to break apart or dissolve cell structures including, but not limited to cell membranes, cell walls, lipids, carbohydrates, lipoproteins and glycoproteins. Exemplary ionic detergents include any of those taught in U.S. Pat. Nos. 7,625,570 and 6,593,123 or US Publication No. US2014/0087361, the contents of each of which are herein incorporated by reference in their entirety. Some ionic detergents may include, but are not limited to sodium dodecyl sulfate (SDS), cholate and deoxycholate. In some cases, ionic detergents may be included in lysis solutions as a solubilizing agent. Non-ionic detergents may include, but are not limited to octylglucoside, digitonin, lubrol, C12E8, TWEEN®-20, TWEEN®-80, Triton X-100 and Noniodet P-40. Non-ionic detergents are typically weaker lysis agents, but may be included as solubilizing agents for solubilizing cellular and/or viral proteins. Further lysis agents may include enzymes and urea. In some cases, one or more lysis agents may be combined in a lysis solution in order to enhance one or more of cell lysis and protein solubility. In some cases, enzyme inhibitors may be included in lysis solutions in order to prevent proteolysis that may be triggered by cell membrane disruption.

[0865] In some embodiments, mechanical cell lysis is carried out. Mechanical cell lysis methods may include the use of one or more lysis condition and/or one or more lysis force. As used herein, the term “lysis condition” refers to a state or circumstance that promotes cellular disruption. Lysis conditions may comprise certain temperatures, pressures, osmotic purity, salinity and the like. In some cases, lysis conditions comprise increased or decreased temperatures. According to some embodiments, lysis conditions comprise changes in temperature to promote cellular disruption. Cell lysis carried out according to such embodiments may include freeze-thaw lysis. As used herein, the term “freeze-thaw lysis” refers to cellular lysis in which a cell solution is subjected to one or more freeze-thaw cycle. According to freeze-thaw lysis methods, cells in solution are frozen to induce a mechanical disruption of cellular membranes caused by the formation and expansion of ice crystals. Cell solutions used according freeze-thaw lysis methods, may further comprise one or more lysis agents, solubilizing agents, buffering agents, cryoprotectants, surfactants, preservatives, enzymes, enzyme inhibitors and/or chelators. Once cell solutions subjected to freezing are thawed, such components may enhance the recovery of desired cellular products. In some cases, one or more cryoprotectants are included in cell solutions undergoing freeze-thaw lysis. As used herein, the term “cryoprotectant” refers to an agent used to protect one or more substance from damage due to freezing. Cryoprotectants may include any of those taught in US Publication No. US2013/0323302 or U.S. Pat. Nos. 6,503,888, 6,180,613, 7,888,096, 7,091,030, the contents of each of which are herein incorporated by reference in their entirety. In some cases, cryoprotectants may include, but are not limited to dimethyl sulfoxide, 1,2-propanediol, 2,3-butanediol, formamide, glycerol, ethylene glycol, 1,3-propanediol and n-dimethyl formamide, polyvinylpyrrolidone, hydroxyethyl starch, agarose, dextrans, inositol, glucose, hydroxyethylstarch, lactose, sorbitol, methyl glucose, sucrose and urea. In some embodiments, freeze-thaw lysis may be carried out according to any of the methods described in U.S. Pat. No. 7,704,721, the contents of which are herein incorporated by reference in their entirety.

[0866] As used herein, the term “lysis force” refers to a physical activity used to disrupt a cell. Lysis forces may include, but are not limited to mechanical forces, sonic forces, gravitational forces, optical forces, electrical forces and the like. Cell lysis carried out by mechanical force is referred to herein as “mechanical lysis.” Mechanical forces that may be used according to mechanical lysis may include high shear fluid forces. According to such methods of mechanical lysis, a microfluidizer may be used. Microfluidizers typically comprise an inlet reservoir where cell solutions may be applied. Cell solutions may then be pumped into an interaction chamber via a pump (e.g. high-pressure pump) at high speed and/or pressure to produce shear fluid forces. Resulting lysates may then be collected in one or more output reservoir. Pump speed and/or pressure may be adjusted to modulate cell lysis and enhance recovery of products (e.g. viral particles.) Other mechanical lysis methods may include physical disruption of cells by scraping.

[0867] Cell lysis methods may be selected based on the cell culture format of cells to be lysed. For example, with adherent cell cultures, some chemical and mechanical lysis methods may be used. Such mechanical lysis methods may include freeze-thaw lysis or scraping. In another example, chemical lysis of adherent cell cultures may be carried out through incubation with lysis solutions comprising surfactant, such as Triton-X-100. In some cases, cell lysates generated from adherent cell cultures may be treated with one more nuclease to lower the viscosity of the lysates caused by liberated DNA.

[0868] In one embodiment, a method for harvesting AAV particles without lysis may be used for efficient and scalable AAV particle production. In a non-limiting example, AAV particles may be produced by culturing an AAV particle lacking a heparin binding site, thereby allowing the AAV particle to pass into the supernatant, in a cell culture, collecting supernatant from the culture, and isolating the AAV particle from the supernatant, as described in US Patent Application 20090275107, the contents of which are incorporated herein by reference in their entirety.

### Clarification

[0869] Cell lysates comprising viral particles may be subjected to clarification. Clarification refers to initial steps taken in purification of viral particles from cell lysates. Clarification serves to prepare lysates for further purification by removing larger, insoluble debris. Clarification steps may include, but are not limited to centrifugation and filtration. During clarification, centrifugation may be carried out at low speeds to remove larger debris only. Similarly, filtration may be carried out using filters with larger pore sizes so that only larger debris is removed. In some cases, tangential flow filtration may be used during clarification. Objectives of viral clarification include high throughput processing of cell lysates and to optimize ultimate viral recovery. Advantages of including a clarification step include scalability for processing of larger volumes of lysate. In some embodiments, clarification may be carried out according to any of the methods presented in U.S. Pat. Nos. 8,524,446, 5,756,283, 6,258,595, 6,261,551, 6,270,996, 6,281,010, 6,365,394, 6,475,769, 6,482,634, 6,485,966, 6,943,019, 6,953,690, 7,022,519, 7,238,526, 7,291,498, 7,491,508, US Publication Nos, US2013/0045186, US2011/0263027, US2011/0151434, US2003/0138772, and International Publication Nos. WO2002012455, WO 1996039530, WO 1998010088, WO 1999014354, WO 1999015685, WO 1999047691, WO2000055342, WO02000075353 and WO2001023597, the contents of each of which are herein incorporated by reference in their entirety.

[0870] Methods of cell lysate clarification by filtration are well understood in the art and may be carried out according to a variety of available methods including, but not limited to passive filtration and flow filtration. Filters used may comprise a variety of materials and pore sizes. For example, cell lysate filters may comprise pore sizes of from about 1 μM to about 5 μM, from about 0.5 μM to about 2 μM, from about 0.1 μM to about 1 μM, from about 0.05 μM to about 0.05 μM and from about 0.001 μM to about 0.1 μM. Exemplary pore sizes for cell lysate filters may include, but are not limited to, 2.0, 1.9, 1.8, 1.7, 1.6, 1.5, 1.4, 1.3, 1.2, 1.1, 1, 0.9, 0.8, 0.7, 0.6, 0.5, 0.4, 0.3, 0.2, 0.1, 0.95, 0.9, 0.85, 0.8, 0.75, 0.7, 0.65, 0.6, 0.55, 0.5, 0.45, 0.4, 0.35, 0.3, 0.25, 0.2, 0.15, 0.1, 0.05, 0.22, 0.21, 0.20, 0.19, 0.18, 0.17, 0.16, 0.15, 0.14, 0.13, 0.12, 0.11, 0.1, 0.09, 0.08, 0.07, 0.06, 0.05, 0.04, 0.03, 0.02, 0.01, 0.02, 0.019, 0.018, 0.017, 0.016, 0.015, 0.014, 0.013, 0.012, 0.011, 0.01, 0.009, 0.008, 0.007, 0.006, 0.005, 0.004, 0.003, 0.002, 0.001 and 0.001 μM. In one embodiment, clarification may comprise filtration through a filter with 2.0 μM pore size to remove large debris, followed by passage through a filter with 0.45 μM pore size to remove intact cells.

[0871] Filter materials may be composed of a variety of materials. Such materials may include, but are not limited to polymeric materials and metal materials (e.g. sintered metal and pored aluminum.) Exemplary materials may include, but are not limited to nylon, cellulose materials (e.g. cellulose acetate), polyvinylidene fluoride (PVDF), polyethersulfone, polyamide, polysulfone, polypropylene, and polyethylene terephthalate. In some cases, filters useful for clarification of cell lysates may include, but are not limited to ULTIPLEAT PROFILE™ filters (Pall Corporation, Port Washington, N.Y.), SUPOR™ membrane filters (Pall Corporation, Port Washington, N.Y.)

[0872] In some cases, flow filtration may be carried out to increase filtration speed and/or effectiveness. In some cases, flow filtration may comprise vacuum filtration. According to such methods, a vacuum is created on the side of the filter opposite that of cell lysate to be filtered. In some cases, cell lysates may be passed through filters by centrifugal forces. In some cases, a pump is used to force cell lysate through clarification filters. Flow rate of cell lysate through one or more filters may be modulated by adjusting one of channel size and/or fluid pressure.

[0873] According to some embodiments, cell lysates may be clarified by centrifugation. Centrifugation may be used to pellet insoluble particles in the lysate. During clarification, centrifugation strength [expressed in terms of gravitational units (g), which represents multiples of standard gravitational force] may be lower than in subsequent purification steps. In some cases, centrifugation may be carried out on cell lysates at from about 200 g to about 800 g, from about 500 g to about 1500 g, from about 1000 g to about 5000 g, from about 1200 g to about 10000 g or from about 8000 g to about 15000 g. In some embodiments, cell lysate centrifugation is carried out at 8000 g for 15 minutes. In some cases, density gradient centrifugation may be carried out in order to partition particulates in the cell lysate by sedimentation rate. Gradients used according to methods of the present disclosure may include, but are not limited to cesium chloride gradients and iodixanol step gradients.

### Purification: Chromatography

[0874] In some cases, AAV particles may be purified from clarified cell lysates by one or more methods of chromatography. Chromatography refers to any number of methods known in the art for separating out one or more elements from a mixture. Such methods may include, but are not limited to ion exchange chromatography (e.g. cation exchange chromatography and anion exchange chromatography), immunoaffinity chromatography and size-exclusion chromatography. In some embodiments, methods of viral chromatography may include any of those taught in U.S. Pat. Nos. 5,756,283, 6,258,595, 6,261,551, 6,270,996, 6,281,010, 6,365,394, 6,475,769, 6,482,634, 6,485,966, 6,943,019, 6,953,690, 7,022,519, 7,238,526, 7,291,498 and 7,491,508 or International Publication Nos, WO1996039530, WO1998010088, WO 1999014354, WO 1999015685, WO 1999047691, WO2000055342, WO2000075353 and WO2001023597, the contents of each of which are herein incorporated by reference in their entirety.

[0875] In some embodiments, ion exchange chromatography may be used to isolate viral particles. Ion exchange chromatography is used to bind viral particles based on charge-charge interactions between capsid proteins and charged sites present on a stationary phase, typically a column through which viral preparations (e.g. clarified lysates) are passed. After application of viral preparations, bound viral particles may then be eluted by applying an elution solution to disrupt the charge-charge interactions. Elution solutions may be optimized by adjusting salt concentration and/or pH to enhance recovery of bound viral particles. Depending on the charge of viral capsids being isolated, cation or anion exchange chromatography methods may be selected. Methods of ion exchange chromatography may include, but are not limited to any of those taught in U.S. Pat. Nos. 7,419,817, 6,143,548, 7,094,604, 6,593,123, 7,015,026 and 8,137,948, the contents of each of which are herein incorporated by reference in their entirety.

[0876] In some embodiments, immunoaffinity chromatography may be used. Immunoaffinity chromatography is a form of chromatography that utilizes one or more immune compounds (e.g. antibodies or antibody-related structures) to retain viral particles. Immune compounds may bind specifically to one or more structures on viral particle surfaces, including, but not limited to one or more viral coat protein. In some cases, immune compounds may be specific for a particular viral variant. In some cases, immune compounds may bind to multiple viral variants. In some embodiments, immune compounds may include recombinant single-chain antibodies. Such recombinant single chain antibodies may include those described in Smith, R. H. et al., 2009. Mol. Ther. 17(11): 1888-96, the contents of which are herein incorporated by reference in their entirety. Such immune compounds are capable of binding to several AAV capsid variants, including, but not limited to AAV1, AAV2, AAV6 and AAV8.

[0877] In some embodiments, size-exclusion chromatography (SEC) may be used. SEC may comprise the use of a gel to separate particles according to size. In viral particle purification, SEC filtration is sometimes referred to as “polishing.” In some cases. SEC may be carried out to generate a final product that is near-homogenous. Such final products may in some cases be used in pre-clinical studies and/or clinical studies (Kotin, R. M. 2011. Human Molecular Genetics. 20(1):R2-R6, the contents of which are herein incorporated by reference in their entirety.) In some cases, SEC may be carried out according to any of the methods taught in U.S. Pat. Nos. 6,143,548, 7,015,026, 8,476,418, 6,410,300, 8,476,418, 7,419,817, 7,094,604, 6,593,123, and 8,137,948, the contents of each of which are herein incorporated by reference in their entirety.

[0878] In one embodiment, the compositions comprising at least one AAV particle may be isolated or purified using the methods described in U.S. Pat. No. 6,146,874, the contents of which are herein incorporated by reference in its entirety.

[0879] In one embodiment, the compositions comprising at least one AAV particle may be isolated or purified using the methods described in U.S. Pat. No. 6,660,514, the contents of which are herein incorporated by reference in its entirety.

[0880] In one embodiment, the compositions comprising at least one AAV particle may be isolated or purified using the methods described in U.S. Pat. No. 8,283,151, the contents of which are herein incorporated by reference in its entirety.

[0881] In one embodiment, the compositions comprising at least one AAV particle may be isolated or purified using the methods described in U.S. Pat. No. 8,524,446, the contents of which are herein incorporated by reference in its entirety.

### II. Formulation and Delivery

### Pharmaceutical Compositions and Formulation

[0882] In addition to the pharmaceutical compositions (AAV particles comprising a modulatory polynucleotide sequence encoding the siRNA molecules), provided herein are pharmaceutical compositions which are suitable for administration to humans, it will be understood by the skilled artisan that such compositions are generally suitable for administration to any other animal, e.g., to non-human animals, e.g. non-human mammals. Modification of pharmaceutical compositions suitable for administration to humans in order to render the compositions suitable for administration to various animals is well understood, and the ordinarily skilled veterinary pharmacologist can design and/or perform such modification with merely ordinary, if any, experimentation. Subjects to which administration of the pharmaceutical compositions is contemplated include, but are not limited to, humans and/or other primates; mammals, including commercially relevant mammals such as cattle, pigs, horses, sheep, cats, dogs, mice, and/or rats; and/or birds, including commercially relevant birds such as poultry, chickens, ducks, geese, and/or turkeys.

[0883] In some embodiments, compositions are administered to humans, human patients or subjects. For the purposes of the present disclosure, the phrase “active ingredient” generally refers either to the synthetic siRNA duplexes, the modulatory polynucleotide encoding the siRNA duplex, or the AAV particle comprising a modulatory polynucleotide encoding the siRNA duplex described herein.

[0884] Formulations of the pharmaceutical compositions described herein may be prepared by any method known or hereafter developed in the art of pharmacology. In general, such preparatory methods include the step of bringing the active ingredient into association with an excipient and/or one or more other accessory ingredients, and then, if necessary and/or desirable, dividing, shaping and/or packaging the product into a desired single- or multi-dose unit.

[0885] Relative amounts of the active ingredient, the pharmaceutically acceptable excipient, and/or any additional ingredients in a pharmaceutical composition in accordance with the invention will vary, depending upon the identity, size, and/or condition of the subject treated and further depending upon the route by which the composition is to be administered.

[0886] The AAV particles comprising the modulatory polynucleotide sequence encoding the siRNA molecules of the present invention can be formulated using one or more excipients to: (1) increase stability; (2) increase cell transfection or transduction; (3) permit the sustained or delayed release; or (4) alter the biodistribution (e.g., target the AAV particle to specific tissues or cell types such as brain and neurons),

[0887] Formulations of the present invention can include, without limitation, saline, lipidoids, liposomes, lipid nanoparticles, polymers, lipoplexes, core-shell nanoparticles, peptides, proteins, cells transfected with AAV particles (e.g., for transplantation into a subject), nanoparticle mimics and combinations thereof. Further, the AAV particles of the present invention may be formulated using self-assembled nucleic acid nanoparticles.

[0888] Formulations of the pharmaceutical compositions described herein may be prepared by any method known or hereafter developed in the art of pharmacology. In general, such preparatory methods include the step of associating the active ingredient with an excipient and/or one or more other accessory ingredients.

[0889] A pharmaceutical composition in accordance with the present disclosure may be prepared, packaged, and/or sold in bulk, as a single unit dose, and/or as a plurality of single unit doses. As used herein, a “unit dose” refers to a discrete amount of the pharmaceutical composition comprising a predetermined amount of the active ingredient. The amount of the active ingredient is generally equal to the dosage of the active ingredient which would be administered to a subject and/or a convenient fraction of such a dosage such as, for example, one-half or one-third of such a dosage.

[0890] Relative amounts of the active ingredient, the pharmaceutically acceptable excipient, and/or any additional ingredients in a pharmaceutical composition in accordance with the present disclosure may vary, depending upon the identity, size, and/or condition of the subject being treated and further depending upon the route by which the composition is to be administered. For example, the composition may comprise between 0.1% and 99% (w/w) of the active ingredient. By way of example, the composition may comprise between 0.1% and 100%, e.g., between 0.5 and 50%, between 1-30%, between 5-80%, at least 80% (w/w) active ingredient.

[0891] In some embodiments, a pharmaceutically acceptable excipient may be at least 95%, at least 96%, at least 97%, at least 98%, at least 99%, or 100% pure. In some embodiments, an excipient is approved for use for humans and for veterinary use. In some embodiments, an excipient may be approved by United States Food and Drug Administration. In some embodiments, an excipient may be of pharmaceutical grade. In some embodiments, an excipient may meet the standards of the United States Pharmacopoeia (USP), the European Pharmacopoeia (EP), the British Pharmacopoeia, and/or the International Pharmacopoeia.

[0892] Excipients, which, as used herein, includes, but is not limited to, any and all solvents, dispersion media, diluents, or other liquid vehicles, dispersion or suspension aids, surface active agents, isotonic agents, thickening or emulsifying agents, preservatives, and the like, as suited to the particular dosage form desired. Various excipients for formulating pharmaceutical compositions and techniques for preparing the composition are known in the art (see Remington: The Science and Practice of Pharmacy, 21^{st} Edition, A. R. Gennaro, Lippincott, Williams & Wilkins, Baltimore, Md., 2006; incorporated herein by reference in its entirety). The use of a conventional excipient medium may be contemplated within the scope of the present disclosure, except insofar as any conventional excipient medium may be incompatible with a substance or its derivatives, such as by producing any undesirable biological effect or otherwise interacting in a deleterious manner with any other component(s) of the pharmaceutical composition.

[0893] Exemplary diluents include, but are not limited to, calcium carbonate, sodium carbonate, calcium phosphate, dicalcium phosphate, calcium sulfate, calcium hydrogen phosphate, sodium phosphate lactose, sucrose, cellulose, microcrystalline cellulose, kaolin, mannitol, sorbitol, inositol, sodium chloride, dry starch, cornstarch, powdered sugar, etc., and/or combinations thereof.

[0894] In some embodiments, the formulations may comprise at least one inactive ingredient. As used herein, the term “inactive ingredient” refers to one or more inactive agents included in formulations. In some embodiments, all, none or some of the inactive ingredients which may be used in the formulations of the present invention may be approved by the US Food and Drug Administration (FDA).

[0895] Formulations of vectors comprising the nucleic acid sequence for the siRNA molecules of the present invention may include cations or anions. In one embodiment, the formulations include metal cations such as, but not limited to, Zn2+, Ca2+, Cu2+, Mg+ and combinations thereof.

[0896] As used herein, “pharmaceutically acceptable salts” refers to derivatives of the disclosed compounds wherein the parent compound is modified by converting an existing acid or base moiety to its salt form (e.g., by reacting the free base group with a suitable organic acid). Examples of pharmaceutically acceptable salts include, but are not limited to, mineral or organic acid salts of basic residues such as amines; alkali or organic salts of acidic residues such as carboxylic acids; and the like. Representative acid addition salts include acetate, acetic acid, adipate, alginate, ascorbate, aspartate, benzenesulfonate, benzene sulfonic acid, benzoate, bisulfate, borate, butyrate, camphorate, camphorsulfonate, citrate, cyclopentanepropionate, digluconate, dodecylsulfate, ethanesulfonate, fumarate, glucoheptonate, glycerophosphate, hemisulfate, heptonate, hexanoate, hydrobromide, hydrochloride, hydroiodide, 2-hydroxy-ethanesulfonate, lactobionate, lactate, laurate, lauryl sulfate, malate, maleate, malonate, methanesulfonate, 2-naphthalenesulfonate, nicotinate, nitrate, oleate, oxalate, palmitate, pamoate, pectinate, persulfate, 3-phenylpropionate, phosphate, picrate, pivalate, propionate, stearate, succinate, sulfate, tartrate, thiocyanate, toluenesulfonate, undecanoate, valerate salts, and the like. Representative alkali or alkaline earth metal salts include sodium, lithium, potassium, calcium, magnesium, and the like, as well as nontoxic ammonium, quaternary ammonium, and amine cations, including, but not limited to ammonium, tetramethylammonium, tetraethylammonium, methylamine, dimethylamine, trimethylamine, triethylamine, ethylamine, and the like. The pharmaceutically acceptable salts of the present disclosure include the conventional non-toxic salts of the parent compound formed, for example, from non-toxic inorganic or organic acids. The pharmaceutically acceptable salts of the present disclosure can be synthesized from the parent compound which contains a basic or acidic moiety by conventional chemical methods. Generally, such salts can be prepared by reacting the free acid or base forms of these compounds with a stoichiometric amount of the appropriate base or acid in water or in an organic solvent, or in a mixture of the two; generally, nonaqueous media like ether, ethyl acetate, ethanol, isopropanol, or acetonitrile are preferred. Lists of suitable salts are found in Remington's Pharmaceutical Sciences, 17^{th} ed., Mack Publishing Company, Easton, Pa., 1985, p. 1418, Pharmaceutical Salts: Properties, Selection, and Use, P. H. Stahl and C. G. Wermuth (eds.), Wiley-VCH, 2008, and Berge et al., Journal of Pharmaceutical Science, 66, 1-19 (1977); the content of each of which is incorporated herein by reference in their entirety.

[0897] The term “pharmaceutically acceptable solvate,” as used herein, means a compound of the invention wherein molecules of a suitable solvent are incorporated in the crystal lattice. A suitable solvent is physiologically tolerable at the dosage administered. For example, solvates may be prepared by crystallization, recrystallization, or precipitation from a solution that includes organic solvents, water, or a mixture thereof. Examples of suitable solvents are ethanol, water (for example, mono-, di-, and tri-hydrates), N-methylpyrrolidinone (NMP), dimethyl sulfoxide (DMSO), N,N′-dimethylformamide (DMF), N,N′-dimethylacetamide (DMAC), 1,3-dimethyl-2-imidazolidinone (DMEU), 1,3-dimethyl-3,4,5,6-tetrahydro-2-(1H)-pyrimidinone (DMPU), acetonitrile (ACN), propylene glycol, ethyl acetate, benzyl alcohol, 2-pyrrolidone, benzyl benzoate, and the like. When water is the solvent, the solvate is referred to as a “hydrate.”

[0898] According to the present invention, the AAV particle comprising the modulatory polynucleotide sequence encoding for the siRNA molecules may be formulated for CNS delivery. Agents that cross the brain blood barrier may be used. For example, some cell penetrating peptides that can target siRNA molecules to the brain blood barrier endothelium may be used to formulate the siRNA duplexes targeting the gene of interest.

### Inactive Ingredients

[0899] In some embodiments, formulations may comprise at least one excipient which is an inactive ingredient. As used herein, the term “inactive ingredient” refers to one or more inactive agents included in formulations. In some embodiments, all, none or some of the inactive ingredients which may be used in the formulations of the present disclosure may be approved by the US Food and Drug Administration (FDA).

[0900] Formulations of AAV particles described herein may include cations or anions. In one embodiment, the formulations include metal cations such as, but not limited to, Zn2+. Ca2+, Cu2+. Mg+ and combinations thereof. As a non-limiting example, formulations may include polymers and compositions described herein complexed with a metal cation (See e.g., U.S. Pat. Nos. 6,265,389 and 6,555,525, each of which is herein incorporated by reference in its entirety),

### Delivery

[0901] In one embodiment, the AAV particles described herein may be administered or delivered using the methods for the delivery of AAV virions described in European Patent Application No. EP1857552, the contents of which are herein incorporated by reference in its entirety.

[0902] In one embodiment, the AAV particles described herein may be administered or delivered using the methods for delivering proteins using AAV particles described in European Patent Application No. EP2678433, the contents of which are herein incorporated by reference in its entirety.

[0903] In one embodiment, the AAV particle described herein may be administered or delivered using the methods for delivering DNA molecules using AAV particles described in U.S. Pat. No. 5,858,351, the contents of which are herein incorporated by reference in its entirety.

[0904] In one embodiment, the AAV particle described herein may be administered or delivered using the methods for delivering DNA to the bloodstream described in U.S. Pat. No. 6,211,163, the contents of which are herein incorporated by reference in its entirety.

[0905] In one embodiment, the AAV particle described herein may be administered or delivered using the methods for delivering AAV virions described in U.S. Pat. No. 6,325,998, the contents of which are herein incorporated by reference in its entirety.

[0906] In one embodiment, the AAV particle described herein may be administered or delivered using the methods for delivering a payload to the central nervous system described in U.S. Pat. No. 7,588,757, the contents of which are herein incorporated by reference in its entirety.

[0907] In one embodiment, the AAV particle described herein may be administered or delivered using the methods for delivering a payload described in U.S. Pat. No. 8,283,151, the contents of which are herein incorporated by reference in its entirety.

[0908] In one embodiment, the AAV particle described herein may be administered or delivered using the methods for delivering a payload using a glutamic acid decarboxylase (GAD) delivery vector described in International Patent Publication No. WO2001089583, the contents of which are herein incorporated by reference in its entirety.

[0909] In one embodiment, the AAV particle described herein may be administered or delivered using the methods for delivering a payload to neural cells described in International Patent Publication No. WO2012057363, the contents of which are herein incorporated by reference in its entirety.

### Delivery to Cells

[0910] The present disclosure provides a method of delivering to a cell or tissue any of the above-described AAV polynucleotides or AAV genomes, comprising contacting the cell or tissue with said AAV polynucleotide or AAV genomes or contacting the cell or tissue with a particle comprising said AAV polynucleotide or AAV genome, or contacting the cell or tissue with any of the described compositions, including pharmaceutical compositions. The method of delivering the AAV polynucleotide or AAV genome to a cell or tissue can be accomplished in vitro, ex vivo, or in vivo.

Introduction into Cells—Synthetic dsRNA

[0911] To ensure the chemical and biological stability of siRNA molecules (e.g., siRNA duplexes and dsRNA), it is important to deliver siRNA molecules inside the target cells. In some embodiments, the cells may include, but are not limited to, cells of mammalian origin, cells of human origins, embryonic stem cells, induced pluripotent stem cells, neural stem cells, and neural progenitor cells.

[0912] Nucleic acids, including siRNA, carry a net negative charge on the sugar-phosphate backbone under normal physiological conditions. In order to enter the cell, a siRNA molecule must come into contact with a lipid bilayer of the cell membrane, whose head groups are also negatively charged.

[0913] The siRNA duplexes can be complexed with a carrier that allows them to traverse cell membranes such as package particles to facilitate cellular uptake of the siRNA. The package particles may include, but are not limited to, liposomes, nanoparticles, cationic lipids, polyethylenimine derivatives, dendrimers, carbon nanotubes and the combination of carbon-made nanoparticles with dendrimers. Lipids may be cationic lipids and/or neutral lipids. In addition to well established lipophilic complexes between siRNA molecules and cationic carriers, siRNA molecules can be conjugated to a hydrophobic moiety, such as cholesterol (e.g., U.S. Patent Publication No. 20110110937; the content of which is herein incorporated by reference in its entirety). This delivery method holds a potential of improving in vitro cellular uptake and in vivo pharmacological properties of siRNA molecules. The siRNA molecules of the present invention may also be conjugated to certain cationic cell-penetrating peptides (CPPs), such as MPG, transportan or penctratin covalently or non-covalently (e.g., U.S. Patent Publication No. 20110086425; the content of which is herein incorporated by reference in its entirety).

Introduction into Cells—AAV Particles

[0914] The siRNA molecules (e.g., siRNA duplexes) of the present invention may be introduced into cells using any of a variety of approaches such as, but not limited to, AAV particles. These AAV particles are engineered and optimized to facilitate the entry of siRNA molecule into cells that are not readily amendable to transfection. Also, some synthetic AAV particles possess an ability to integrate the shRNA into the cell genome, thereby leading to stable siRNA expression and long-term knockdown of a target gene. In this manner, AAV particles are engineered as vehicles for specific delivery while lacking the deleterious replication and/or integration features found in wild-type virus.

[0915] In some embodiments, the siRNA molecules of the present invention are introduced into a cell by contacting the cell with an AAV particle comprising a modulatory polynucleotide sequence encoding a siRNA molecule, and a lipophilic carrier. In other embodiments, the siRNA molecule is introduced into a cell by transfecting or infecting the cell with an AAV particle comprising a nucleic acid sequence capable of producing the siRNA molecule when transcribed in the cell. In some embodiments, the siRNA molecule is introduced into a cell by injecting into the cell an AAV particle comprising a nucleic acid sequence capable of producing the siRNA molecule when transcribed in the cell.

[0916] In some embodiments, prior to transfection, an AAV particle comprising a nucleic acid sequence encoding the siRNA molecules of the present invention may be transfected into cells.

[0917] In other embodiments, the AAV particles comprising the nucleic acid sequence encoding the siRNA molecules of the present invention may be delivered into cells by electroporation (e.g. U.S. Patent Publication No. 20050014264; the content of which is herein incorporated by reference in its entirety).

[0918] Other methods for introducing AAV particles comprising the nucleic acid sequence encoding the siRNA molecules described herein may include photochemical internalization as described in U. S. Patent publication No. 20120264807; the content of which is herein incorporated by reference in its entirety.

[0919] In some embodiments, the formulations described herein may contain at least one AAV particle comprising the nucleic acid sequence encoding the siRNA molecules described herein. In one embodiment, the siRNA molecules may target the gene of interest at one target site. In another embodiment, the formulation comprises a plurality of AAV particles, each AAV particle comprising a nucleic acid sequence encoding a siRNA molecule targeting the gene of interest at a different target site. The gene of interest may be targeted at 2, 3, 4, 5 or more than 5 sites.

[0920] In one embodiment, the AAV particles from any relevant species, such as, but not limited to, human, dog, mouse, rat or monkey may be introduced into cells.

[0921] In one embodiment, the AAV particles may be introduced into cells which are relevant to the disease to be treated. As a non-limiting example, the disease is HD and the target cells are neurons and astrocytes. As another non-limiting example, the disease is HD and the target cells are medium spiny neurons, cortical neurons and astrocytes.

[0922] In one embodiment, the AAV particles may be introduced into cells which are relevant to the disease to be treated. As a non-limiting example, the disease is ALS and the target cells are neurons and astrocytes. As another non-limiting example, the disease is ALS and the target cells are medium spiny neurons, cortical neurons and astrocytes.

[0923] In one embodiment, the AAV particles may be introduced into cells which have a high level of endogenous expression of the target sequence.

[0924] In another embodiment, the AAV particles may be introduced into cells which have a low level of endogenous expression of the target sequence.

[0925] In one embodiment, the cells may be those which have a high efficiency of AAV transduction.

### Delivery to Subjects

[0926] The present disclosure additionally provides a method of delivering to a subject, including a mammalian subject, any of the above-described AAV polynucleotides or AAV genomes comprising administering to the subject said AAV polynucleotide or AAV genome, or administering to the subject a particle comprising said AAV polynucleotide or AAV genome, or administering to the subject any of the described compositions, including pharmaceutical compositions.

[0927] The pharmaceutical compositions of AAV particles described herein may be characterized by one or more of bioavailability, therapeutic window and/or volume of distribution.

### III. Administration and Dosing

### Administration

[0928] The AAV particles comprising a nucleic acid sequence encoding the siRNA molecules of the present invention may be administered by any route which results in a therapeutically effective outcome. These include, but are not limited to, within the parenchyma of an organ such as, but not limited to, a brain (e.g., intraparenchymal), corpus striatum (intrastriatal), enteral (into the intestine), gastroenteral, epidural, oral (by way of the mouth), transdermal, peridural, intracerebral (into the cerebrum), intracerebroventricular (into the cerebral ventricles), subpial (under the pia), epicutaneous (application onto the skin), intradermal, (into the skin itself), subcutaneous (under the skin), nasal administration (through the nose), intravenous (into a vein), intravenous bolus, intravenous drip, intraarterial (into an artery), intramuscular (into a muscle), intracardiac (into the heart), intraosseous infusion (into the bone marrow), intrathecal (into the spinal canal), intraganglionic (into the ganglion), intraperitoneal, (infusion or injection into the peritoneum), intravesical infusion, intravitreal, (through the eye), intracavemous injection (into a pathologic cavity) intracavitary (into the base of the penis), intravaginal administration, intrauterine, extra-amniotic administration, transdermal (diffusion through the intact skin for systemic distribution), transmucosal (diffusion through a mucous membrane), transvaginal, insufflation (snorting), sublingual, sublabial, enema, eye drops (onto the conjunctiva), in ear drops, auricular (in or by way of the ear), buccal (directed toward the cheek), conjunctival, cutaneous, dental (to a tooth or teeth), electro-osmosis, endocervical, endosinusial, endotracheal, extracorporeal, hemodialysis, infiltration, interstitial, intra-abdominal, intra-amniotic, intra-articular, intrabiliary, intrabronchial, intrabursal, intracartilaginous (within a cartilage), intracaudal (within the cauda equine), intracistemal (within the cistema magna cerebellomedularis), intracomeal (within the comea), dental intracornal, intracoronary (within the coronary arteries), intracorporus cavemosum (within the dilatable spaces of the corporus cavernosa of the penis), intradiscal (within a disc), intraductal (within a duct of a gland), intraduodenal (within the duodenum), intradural (within or beneath the dura), intraepidermal (to the epidermis), intraesophageal (to the esophagus), intragastric (within the stomach), intragingival (within the gingivae), intraileal (within the distal portion of the small intestine), intralesional (within or introduced directly to a localized lesion), intraluminal (within a lumen of a tube), intralymphatic (within the lymph), intramedullary (within the marrow cavity of a bone), intrameningeal (within the meninges), intraocular (within the eye), intraovarian (within the ovary), intrapericardial (within the pericardium), intrapleural (within the pleura), intraprostatic (within the prostate gland), intrapulmonary (within the lungs or its bronchi), intrasinal (within the nasal or periorbital sinuses), intraspinal (within the vertebral column), intrasynovial (within the synovial cavity of a joint), intratendinous (within a tendon), intratesticular (within the testicle), intrathecal (within the cerebrospinal fluid at any level of the cerebrospinal axis), intrathoracic (within the thorax), intratubular (within the tubules of an organ), intratumor (within a tumor), intrat vnpanic (within the aurus media), intravascular (within a vessel or vessels), intraventricular (within a ventricle), iontophoresis (by means of electric current where ions of soluble salts migrate into the tissues of the body), irrigation (to bathe or flush open wounds or body cavities), laryngeal (directly upon the larynx), nasogastric (through the nose and into the stomach), occlusive dressing technique (topical route administration which is then covered by a dressing which occludes the area), ophthalmic (to the extemal eye), oropharyngeal (directly to the mouth and pharynx), parenteral, percutaneous, periarticular, peridural, perincural, periodontal, rectal, respiratory (within the respiratory tract by inhaling orally or nasally for local or systemic effect), retrobulbar (behind the pons or behind the eyeball), soft tissue, subarachnoid, subconjunctival, submucosal, topical, transplacental (through or across the placenta), transtracheal (through the wall of the trachea), transtympanic (across or through the tympanic cavity), ureteral (to the ureter), urethral (to the urethra), vaginal, caudal block, diagnostic, nerve block, biliary perfusion, cardiac perfusion, photopheresis or spinal.

[0929] In specific embodiments, compositions of AAV particles comprising a nucleic acid sequence encoding the siRNA molecules of the present invention may be administered in a way which facilitates the vectors or siRNA molecule to enter the central nervous system and penetrate into medium spiny and/or cortical neurons and/or astrocytes.

[0930] In some embodiments, the AAV particles comprising a nucleic acid sequence encoding the siRNA molecules of the present invention may be administered by intramuscular injection.

[0931] In one embodiment, the AAV particles comprising a nucleic acid sequence encoding the siRNA molecules of the present invention may be administered via intraparenchymal injection.

[0932] In one embodiment, the AAV particles comprising a nucleic acid sequence encoding the siRNA molecules of the present invention may be administered via intraparenchymal injection and intrathecal injection.

[0933] In one embodiment, the AAV particles comprising a nucleic acid sequence encoding the siRNA molecules of the present invention may be administered via intrastriatal injection.

[0934] In one embodiment, the AAV particles comprising a nucleic acid sequence encoding the siRNA molecules of the present invention may be administered via intrastriatal injection and another route of administration described herein.

[0935] In some embodiments, AAV particles that express siRNA duplexes of the present invention may be administered to a subject by peripheral injections (e.g., intravenous) and/or intranasal delivery. It was disclosed in the art that the peripheral administration of AAV particles for siRNA duplexes can be transported to the central nervous system, for example, to the neurons (e.g., U.S. Patent Publication Nos. 20100240739; and 20100130594; the content of each of which is incorporated herein by reference in their entirety).

[0936] In other embodiments, compositions comprising at least one AAV particle comprising a nucleic acid sequence encoding the siRNA molecules of the present invention may be administered to a subject by intracranial delivery (See, e.g., U.S. Pat. No. 8,119,611; the content of which is incorporated herein by reference in its entirety).

[0937] The AAV particle comprising a nucleic acid sequence encoding the siRNA molecules of the present invention may be administered in any suitable form, either as a liquid solution or suspension, as a solid form suitable for liquid solution or suspension in a liquid solution. The siRNA duplexes may be formulated with any appropriate and pharmaceutically acceptable excipient.

[0938] The AAV particle comprising a nucleic acid sequence encoding the siRNA molecules of the present invention may be administered in a “therapeutically effective” amount, i.e., an amount that is sufficient to alleviate and/or prevent at least one symptom associated with the disease, or provide improvement in the condition of the subject.

[0939] In one embodiment, the AAV particle may be administered to the CNS in a therapeutically effective amount to improve function and/or survival for a subject with Huntington's Disease (HD). As a non-limiting example, the vector may be administered by direct infusion into the striatum.

[0940] In one embodiment, the AAV particle may be administered to a subject (e.g., to the CNS of a subject via intrathecal administration) in a therapeutically effective amount for the siRNA duplexes or dsRNA to target the medium spiny neurons, cortical neurons and/or astrocytes. As a non-limiting example, the siRNA duplexes or dsRNA may target HTT and reduce the expression of HTT protein or mRNA. As another non-limiting example, the siRNA duplexes or dsRNA target HTT and can suppress HTT and reduce HTT mediated toxicity. The reduction of HTT protein and/or mRNA as well as HTT mediated toxicity may be accomplished with almost no enhanced inflammation.

[0941] In one embodiment, the AAV particle may be administered to a subject (e.g., to the CNS of a subject) in a therapeutically effective amount to slow the functional decline of a subject (e.g., determined using a known evaluation method such as the unified Huntington's disease rating scale (UHDRS)). As a non-limiting example, the vector may be administered via intraparenchymal injection.

[0942] In one embodiment, the AAV particle may be administered to the cistema magna in a therapeutically effective amount to transduce medium spiny neurons, cortical neurons and/or astrocytes. As a non-limiting example, the vector may be administered intrathecally.

[0943] In one embodiment, the AAV particle may be administered using intrathecal infusion in a therapeutically effective amount to transduce medium spiny neurons, cortical neurons and/or astrocytes. As a non-limiting example, the vector may be administered intrathecally.

[0944] In one embodiment, the AAV particle may be administered to the cistema magna in a therapeutically effective amount to transduce medium spiny neurons, cortical neurons and/or astrocytes. As a non-limiting example, the vector may be administered by intraparenchymal injection.

[0945] In one embodiment, the AAV particle comprising a modulatory polynucleotide may be formulated. As a non-limiting example the baricity and/or osmolality of the formulation may be optimized to ensure optimal drug distribution in the central nervous system or a region or component of the central nervous system.

[0946] In one embodiment, the AAV particle comprising a modulatory polynucleotide may be delivered to a subject via a single route administration.

[0947] In one embodiment, the AAV particle comprising a modulatory polynucleotide may be delivered to a subject via a multi-site route of administration. A subject may be administered the AAV particle comprising a modulatory polynucleotide at 2, 3, 4, 5 or more than 5 sites.

[0948] In one embodiment, a subject may be administered the AAV particle comprising a modulatory polynucleotide described herein using a bolus injection.

[0949] In one embodiment, a subject may be administered the AAV particle comprising a modulatory polynucleotide described herein using sustained delivery over a period of minutes, hours or days. The infusion rate may be changed depending on the subject, distribution, formulation or another delivery parameter.

[0950] In one embodiment, the AAV particle described herein is administered via putamen and caudate infusion. As a non-limiting example, the dual infusion provides a broad striatal distribution as well as a frontal and temporal cortical distribution.

[0951] In one embodiment, the AAV particle is AAV-DJ8 which is administered via unilateral putamen infusion. As a non-limiting example, the distribution of the administered AAV-DJ8 is similar to the distribution of AAV1 delivered via unilateral putamen infusion.

[0952] In one embodiment, the AAV particle described herein is administered via intrathecal (IT) infusion at Cl. The infusion may be for 1, 2, 3, 4, 6, 7, 8, 9, 10, 11, 12, 13, 14, 15 or more than 15 hours.

[0953] In one embodiment, the selection of subjects for administration of the AAV particle described herein and/or the effectiveness of the dose, route of administration and/or volume of administration may be evaluated using imaging of the perivascular spaces (PVS) which are also known as Virchow-Robin spaces. PVS surround the arterioles and venules as they perforate brain parenchyma and are filled with cerebrospinal fluid (CSF)/interstitial fluid. PVS are common in the midbrain, basal ganglia, and centrum semiovale. While not wishing to be bound by theory, PVS may play a role in the normal clearance of metabolites and have been associated with worse cognition and several disease states including Parkinson's disease. PVS are usually are normal in size but they can increase in size in a number of disease states. Potter et al. (Cerebrovasc Dis. 2015 January; 39(4): 224-231; the contents of which are herein incorporated by reference in its entirety) developed a grading method where they studied a full range of PVS and rated basal ganglia, centrum semiovale and midbrain PVS. They used the frequency and range of PVS used by Mac and Lullich et al. (J Neurol Neurosurg Psychiatry. 2004 November; 75(11): 1519-23; the contents of which are herein incorporated by reference in its entirety) and Potter et al. gave 5 ratings to basal ganglia and centrum semiovale PVS: 0 (none), 1 (1-10), 2 (11-20), 3 (21-40) and 4 (>40) and 2 ratings to midbrain PVS: 0 (non visible) or 1 (visible). The user guide for the rating system by Potter et al. can be found at: www.sbirc.ed.ac.uk/documents/epvs-rating-scale-user-guide.pdf.

### Dosing

[0954] The pharmaceutical compositions of the present invention may be administered to a subject using any amount effective for reducing, preventing and/or treating a disease and/or disorder. The exact amount required will vary from subject to subject, depending on the species, age, and general condition of the subject, the severity of the disease, the particular composition, its mode of administration, its mode of activity, and the like.

[0955] The compositions of the present invention are typically formulated in unit dosage form for ease of administration and uniformity of dosage. It will be understood, however, that the total daily usage of the compositions of the present invention may be decided by the attending physician within the scope of sound medical judgment. The specific therapeutic effectiveness for any particular patient will depend upon a variety of factors including the disorder being treated and the severity of the disorder; the activity of the specific compound employed; the specific composition employed; the age, body weight, general health, sex and diet of the patient, the time of administration, route of administration, and rate of excretion of the siRNA duplexes employed; the duration of the treatment; drugs used in combination or coincidental with the specific compound employed; and like factors well known in the medical arts.

[0956] In one embodiment, the age and sex of a subject may be used to determine the dose of the compositions of the present invention. As a non-limiting example, a subject who is older may receive a larger dose (e.g., 5-10%, 10-20%, 15-30%,20-50%, 25-50% or at least 1%, 2%, 3%, 4%, 5%, 10%, 20%, 30%, 40%, 50%, 60%, 70%, 80%, 90% or more than 90% more) of the composition as compared to a younger subject. As another non-limiting example, a subject who is younger may receive a larger dose (e.g., 5-10%, 10-20%, 15-30%, 20-50%, 25-50% or at least 1%, 2%, 3%, 4%, 5%, 10%, 20%, 30%, 40%, 50%, 60%, 70%, 80%, 90% or more than 90% more) of the composition as compared to an older subject. As yet another non-limiting example, a subject who is female may receive a larger dose (e.g., 5-10%, 10-20%, 15-30%,20-50%, 25-50% or at least 1%, 2%, 3%, 4%, 5%, 10%, 20%, 30%, 40%, 50%, 60%, 70%, 80%, 90% or more than 90% more) of the composition as compared to a male subject. As yet another non-limiting example, a subject who is male may receive a larger dose (e.g., 5-10%, 10-20%, 15-30%, 20-50%, 25-50% or at least 1%, 2%, 3%, 4%, 5%, 10%, 20%, 30%, 40%, 50%, 60%, 70%, 80%, 90% or more than 90% more) of the composition as compared to a female subject

[0957] In some specific embodiments, the doses of AAV particles for delivering siRNA duplexes of the present invention may be adapted depending on the disease condition, the subject and the treatment strategy.

[0958] In one embodiment, delivery of the compositions in accordance with the present invention to cells comprises a rate of delivery defined by [VG/hour=mL/hour*VG/mL] wherein VG is viral genomes, VG/mL is composition concentration, and mL/hour is rate of prolonged delivery.

[0959] In one embodiment, delivery of compositions in accordance with the present invention to cells may comprise a total concentration per subject between about 1×10⁶ VG and about 1×10¹⁶ VG. In some embodiments, delivery may comprise a composition concentration of about 1×10⁶, 2×10⁶, 3×10⁶, 4×10⁶, 5×10⁶, 6×10⁶, 7×10⁶, 8×10⁶, 9×10⁶, 1×10⁷, 2×10⁷, 3×10⁷, 4×10⁷, 5×10⁷, 6×10⁷, 7×10⁷, 8×10⁷, 9×10⁷, 1×10⁸, 2×10⁸, 3×10⁸, 4×10⁸, 5×10⁸, 6×10⁹, 7×10⁸, 8×10⁸, 9×10⁸, 1×10⁹, 2×10⁹, 3×10⁹, 4×10⁹, 5×10⁹, 6×10⁹, 7×10⁹, 8×10⁹, 9×10⁹, 1×10¹⁰, 2×10¹⁰, 3×10⁰, 4×10¹¹, 5×10¹⁰, 6×10¹⁰, 7×10¹⁰, 8×10¹⁰, 9×10¹⁰, 1×10¹¹, 1.1×10¹¹, 1.2×10¹¹, 1.3×10¹¹, 1.4×10¹¹, 1.5×10¹¹, 1.6×10¹¹, 1.7×10¹¹, 1.8×10¹¹, 1.9×10¹¹, 2×10¹¹, 2.1×10¹¹, 2.2×10¹¹, 2.3×10¹¹, 2.4×10¹¹, 2.5×10¹¹, 2.6×10¹¹, 2.7×10¹¹, 2.8×10¹¹, 2.9×10¹¹, 3×10¹¹, 4×10¹¹, 5×10¹¹, 6×10¹¹, 7×10¹¹, 7.1×10¹¹, 7.2×10¹¹, 7.3×10¹¹, 7.4×10¹¹, 7.5×10¹¹, 7.6×10¹¹, 7.7×10¹¹, 7.8×10¹¹, 7.9×10¹¹, 8×10¹¹, 9×10¹¹, 1×10¹², 1.1×10², 1.2×10¹², 1.3×10¹², 1.4×10¹², 1.5×10¹², 1.6×10¹², 1.7×10¹², 1.8×10¹¹, 1.9×10¹², 2×10¹², 2.1×10¹², 2.2×10¹², 2.3×10¹², 2.4×10¹², 2.5×10¹², 2.6×10¹², 2.7×10¹², 2.8×10¹², 2.9×10¹², 3×10¹², 3.1×10¹², 3.2×10¹², 3.3×10¹², 3.4×10¹², 3.5×10², 3.6×10¹², 3.7×10¹², 3.8×10¹², 3.9×10¹², 4×10¹², 4.1×10¹², 4.2×10¹², 4.3×10¹², 4.4×10¹², 4.5×10¹², 4.6×10¹², 4.7×10¹², 4.8×10¹², 4.9×10¹², 5×10¹², 6×10¹², 6.1×10¹², 6.2×10¹², 6.3×10¹², 6.4×10¹², 6.5×10¹², 6.6×10¹², 6.7×10¹², 6.8×10¹², 6.9×10¹², 7×10¹², 8×10¹², 8.1×10¹², 8.2×10¹², 8.3×10¹², 8.4×10¹², 8.5×10¹², 8.6×10¹², 8.7×10¹², 8.8×10¹², 8.9×10¹², 9×10¹², 1×10¹³, 1.1×10¹³, 1.2×10¹³, 1.3×10¹³, 1.4×10¹³, 1.5×10¹³, 1.6×10¹³, 1.7×10¹³, 1.8×10¹³, 1.9×10¹³, 2×10¹³, 3×10¹³, 4×10¹³, 5×10¹³, 6×10¹³, 6.7×10¹³, 7×10¹³, 8×10¹³, 9×10¹³, 1×10¹⁴, 2×10¹⁴, 3×10¹⁴, 4×10¹⁴, 5×10¹⁴, 6×10¹⁴, 7×10¹⁴, 8×10¹⁴, 9×10¹⁴, 1×10¹⁴, 2×10¹⁵, 3×10¹⁵, 4×10¹⁵, 5×10¹⁵, 6×10¹⁵, 7×10¹, 8×10¹⁵, 9×10¹⁵, or 1×10¹⁶ VG/subject.

[0960] In one embodiment, delivery of compositions in accordance with the present invention to cells may comprise a total concentration per subject between about 1×10⁶ VG/kg and about 1×10¹⁶ VG/kg. In some embodiments, delivery may comprise a composition concentration of about 1×10⁶, 2×10⁶, 3×10⁶, 4×10⁶, 5×10⁶, 6×10⁶, 7×10⁶, 8×10⁶, 9×10, 1×10⁷, 2×10⁷, 3×10⁷, 4×10⁷, 5×10⁷, 6×10⁷, 7×10⁷, 8×10⁷, 9×10⁷, 1×10⁸, 2×10⁸, 3×10⁸, 4×10⁸, 5×10⁸, 6×10⁸, 7×10⁸, 8×10⁸, 9×10⁸, 1×10⁹, 2×10⁹, 3×10⁹, 4×10⁹, 5×10⁹, 6×10⁹, 7×10⁹, 8×10⁹, 9×10⁹, 1×10¹⁰, 2×10¹⁰, 3×10¹⁰, 4×10¹⁰, 5×10¹⁰, 6×10¹⁰, 7×10¹⁰, 8×10¹⁰, 9×10¹⁰, 1×¹⁰, 1.1×10¹¹, 1.2×10¹¹, 1.3×10¹¹, 1.4×10¹¹, 1.5×10¹¹, 1.6×10¹¹, 1.7×10¹¹, 1.8×10¹¹, 1.9×10¹¹, 2×10¹¹, 2.1×10¹¹, 2.2×10¹¹, 2.3×10¹¹, 2.4×10¹¹, 2.5×10¹¹, 2.6×10¹¹, 2.7×10¹¹, 2.8×10¹¹, 2.9×10¹¹, 3×10¹¹, 4×10¹¹, 5×10¹¹, 6×10¹¹, 7×10¹¹, 7.1×10¹¹, 7.2×10¹¹, 7.3×10¹¹, 7.4×10¹¹, 7.5×10¹¹, 7.6×10¹¹, 7.7×10¹¹, 7.8×10¹¹, 7.9×10¹¹, 8×10¹¹, 9×10¹¹, 1×10¹², 1.1×10¹², 1.2×10¹², 1.3×10¹², 1.4×10¹², 1.5×10¹², 1.6×10¹², 1.7×10¹², 1.8×10¹², 1.9×10¹², 2×10¹², 2.1×10¹², 2.2×10¹², 2.3×10¹², 2.4×10¹², 2.5×10¹², 2.6×10¹², 2.7×10¹², 2.8×10¹², 2.9×10¹², 3×10¹², 3.1×10¹², 3.2×10¹², 3.3×10¹², 3.4×10¹², 3.5×10¹², 3.6×10¹², 3.7×10¹², 3.8×10¹², 3.9×10¹², 4×10¹², 4.1×10¹², 4.2×10¹², 4.3×10¹², 4.4×10¹², 4.5×10¹², 4.6×10¹², 4.7×10¹², 4.8×10¹², 4.9×10¹², 5×10¹², 6×10¹², 6.1×10¹², 6.2×10¹², 6.3×10¹², 6.4×10¹², 6.5×10¹², 6.6×10¹², 6.7×10¹², 6.8×10¹², 6.9×10¹², 7×10¹², 8×10¹², 8.1×10¹², 8.2×10¹², 8.3×10¹², 8.4×10¹², 8.5×10¹², 1.5×10¹³, 1.6×10¹³, 1.7×10¹³, 1.8×10¹³, 1.9×10¹³, 2×10¹³, 3×10¹³, 4×10¹³, 5×10¹³, 6×10¹³, 6.7×10¹³, 7×10¹³, 8×10¹³, 9×10¹³, 1×10¹⁴, 2×10¹⁴, 3×10¹⁴, 4×10¹⁴, 5×10¹⁴, 6×10¹⁴, 7×10¹⁴, 8×10¹⁴, 9×10¹⁴, 1×10¹⁵, 2×10¹⁵, 3×10¹⁵, 4×10¹⁵, 5×10¹⁵, 6×10¹³, 7×10¹⁵, 8×10¹⁵, 9×10¹⁵, or 1×10¹⁶ VG/kg.

[0961] In one embodiment, about 10⁵ to 10⁶ viral genome (unit) may be administered per dose.

[0962] In one embodiment, delivery of the compositions in accordance with the present invention to cells may comprise a total concentration between about 1×10⁶ VG/mL and about 1×10¹⁶ VG/mL. In some embodiments, delivery may comprise a composition concentration of about 1×10⁶, 2×10⁶, 3×10⁶, 4×10⁶, 5×10⁶, 6×10⁶, 7×10⁶, 8×10⁶, 9×10⁶, 1×10⁷, 2×10⁷, 3×10⁷, 4×10⁷, 5×10⁷, 6×10⁷, 7×10⁷, 8×10⁷, 9×10⁷, 1×10⁸, 2×10⁸, 3×10⁸, 4×10⁸, 5×10⁸, 6×10⁸, 7×10⁸, 8×10⁸, 9×10⁸, 1×10⁹, 2×10⁹, 3×10⁹, 4×10⁹, 5×10⁹, 6×10⁹, 7×10⁹, 8×10⁹, 9×10⁹, 1×10¹⁰, 2×10¹⁰, 1.4×10¹¹, 1.5×10¹¹, 1.6×10¹¹, 1.7×10¹¹, 1.8×10¹¹, 1.9×10¹¹, 2×10¹¹, 3×10¹¹, 4×10¹¹, 5×10¹¹, 6×10¹¹, 7×10¹¹, 8×10¹¹, 9×10¹¹, 1×10¹², 1.1×10¹², 1.2×10¹², 1.3×10¹², 1.4×10¹², 1.5×10¹², 1.6×10¹², 1.7×10¹², 1.8×10¹², 1.9×10¹², 2×10¹², 2.1×10¹², 2.2×10¹², 2.3×10¹², 2.4×10¹², 2.5×10¹², 2.6×10¹², 2.7×10¹², 2.8×10¹², 2.9×10¹², 3×10¹², 3.1×10¹², 3.2×10¹², 3.3×10¹², 3.4×10¹², 3.5×10¹², 3.6×10¹², 3.7×10¹², 3.8×10¹², 3.9×10¹², 4×10¹², 4.1×10¹², 4.2×10¹², 4.3×10¹², 4.4×10¹², 4.5×10¹², 4.6×10¹², 4.7×10¹², 4.8×10¹², 4.9×10¹², 5×10¹², 6×10¹², 6.1×10¹², 6.2×10¹², 6.3×10¹², 6.4×10¹², 6.5×10¹², 6.6×10¹², 6.7×10¹², 6.8×10¹², 6.9×10¹², 7×10¹², 8×10¹², 9×10¹², 1×10¹³, 1.1×10¹³, 1.2×10¹³, 1.3×10¹³, 1.4×10¹³, 1.5×10¹³, 1.6×10¹³, 1.7×10¹³, 1.8×10¹³, 1.9×10¹³, 2×10¹³, 3×10¹³, 4×10¹³, 5×10¹³, 6×10¹³, 6.7×10¹³, 7×10¹³, 8×10¹³, 9×10¹³, 1×10¹⁴, 2×10¹⁴, 3×10¹⁴, 4×10¹⁴, 5×10¹⁴, 6×10¹⁴, 7×10¹⁴, 8×10¹⁴, 9×10¹⁴, 1×10¹⁵, 2×10¹⁵, 3×10¹⁵, 4×10¹⁵, 5×10¹⁵, 6×10¹⁵, 7×10¹⁵, 8×10¹⁵, 9×10¹⁵, or 1×10¹⁶ VG/mL.

[0963] In certain embodiments, the desired siRNA duplex dosage may be delivered using multiple administrations (e.g., two, three, four, five, six, seven, eight, nine, ten, eleven, twelve, thirteen, fourteen, or more administrations). When multiple administrations are employed, split dosing regimens such as those described herein may be used. As used herein, a “split dose” is the division of single unit dose or total daily dose into two or more doses, e.g., two or more administrations of the single unit dose. As used herein, a “single unit dose” is a dose of any modulatory polynucleotide therapeutic administered in one dose/at one time/single route/single point of contact, i.e., single administration event. As used herein, a “total daily dose” is an amount given or prescribed in a 24 hour period. It may be administered as a single unit dose. In one embodiment, the AAV particles comprising the modulatory polynucleotides of the present invention are administered to a subject in split doses. They may be formulated in buffer only or in a formulation described herein.

[0964] In one embodiment, the dose, concentration and/or volume of the composition described herein may be adjusted depending on the contribution of the caudate or putamen to cortical and subcortical distribution after administration. The administration may be intracerebroventricular, intraputamenal, intrathalamic, intraparenchymal, subpial, and/or intrathecal administration.

[0965] In one embodiment, the dose, concentration and/or volume of the composition described herein may be adjusted depending on the cortical and neuraxial distribution following administration by intracerebroventricular, intraputamenal, intrathalamic, intraparenchymal, subpial, and/or intrathecal delivery.

### IV. Methods and Uses of the Compositions of the Invention

### Huntington's Disease (HD)

[0966] Huntington's Disease (HD) is a monogenic fatal neurodegenerative disease characterized by progressive chorea, neuropsychiatric and cognitive dysfunction. Huntington's disease is known to be caused by an autosomal dominant triplet (CAG) repeat expansion in the huntingtin (HTT) gene, which encodes poly-glutamine at the N-terminus of the HTT protein. This repeat expansion results in a toxic gain of function of HTT and ultimately leads to striatal neurodegeneration which progresses to widespread brain atrophy. Medium spiny neurons of the striatum appear to be especially vulnerable in HD with up to 95% loss, whereas interneurons are largely spared.

[0967] Huntington's Disease has a profound impact on quality of life. Symptoms typically appear between the ages of 35-44 and life expectancy subsequent to onset is 10-25 years. In a small percentage of the HD population (˜6%), disease onset occurs prior to the age of 21 with appearance of an akinetic-rigid syndrome. These cases tend to progress faster than those of the later onset variety and have been classified as juvenile or Westphal variant HD. It is estimated that approximately 35,000-70,000 patients are currently suffering from HD in the US and Europe. Currently, only symptomatic relief and supportive therapies are available for treatment of HD, with a cure yet to be identified. Ultimately, individuals with HD succumb to pneumonia, heart failure or other complications such as physical injury from falls.

[0968] While not wishing to be bound by theory, the function of the wild type HTT protein may serve as a scaffold to coordinate complexes of other proteins. HTT is a very large protein (67 exons, 3144 amino acids, ˜350 kDa) that undergoes extensive post-translational modification and has numerous sites for interaction with other proteins, particularly at its N-terminus (coincidentally the region that carries the repeats in HD), HTT localizes primarily to the cytoplasm but has been shown to shuttle into the nucleus where it may regulate gene transcription. It has also been suggested that HTT has a role in vesicular transport and regulating RNA trafficking.

[0969] As a non-limiting example, the HTT nucleic acid sequence is SEQ ID NO: 1163 (NCBI NM_002111.7).

[0970] The mechanisms by which CAG-expanded HTT disrupts normal HTT function and results in neurotoxicity were initially thought to be a disease of haploinsufficiency, this theory was disproven when terminal deletion of the HTT gene in man did not lead to development of HD, suggesting that fully expressed HTT protein is not critical to survival. However, conditional knockout of HTT in mouse led to neurodegeneration, indicating that some amount of HTT is necessary for cell survival. Huntingtin protein is expressed in all cells, though its concentration is highest in the brain where large aggregates of abnormal HTT are found in neuronal nuclei. In the brains of HD patients, HTT aggregates into abnormal nuclear inclusions. It is now believed that it is this process of misfolding and aggregating along with the associated protein intermediates (i.e. the soluble species and toxic N-terminal fragments) that result in neurotoxicity. In fact, HD belongs to a family of nine additional human genetic disorders all of which are characterized by CAG-expanded genes and resultant polyglutamine (poly-Q) protein products with subsequent formation of intraneuronal aggregates. Interestingly, in all of these diseases the length of the expansion correlates with both age of onset and rate of disease progression, with longer expansions linked to greater severity of disease.

[0971] Hypotheses on the molecular mechanisms underlying the neurotoxicity of CAG-expanded HTT and its resultant aggregates have been wide ranging, but include, caspase activation, dysregulation of transcriptional pathways, increased production of reactive oxygen species, mitochondrial dysfunction, disrupted axonal transport and/or inhibition of protein degradation systems within the cell. CAG-expanded HTT may not only have a toxic gain of function, but also exert a dominant negative effect by interfering with the normal function of other cellular proteins and processes. HTT has also been implicated in non-cell autonomous neurotoxicity, whereby a cell hosting HTT spreads the HTT to other neurons nearby.

[0972] In one embodiment, a subject has fully penetrant HD where the HTT gene has 41 or more CAG repeats (e.g., 41, 42, 43, 44, 45, 46, 47, 48, 49, 50, 51, 52, 53, 54, 55, 56, 57, 58, 59, 60, 61, 62, 63, 64, 65, 66, 67, 68, 69, 70, 71, 72, 73, 74, 75, 76, 77, 78, 79, 80, 81, 82, 83, 84, 85, 86, 87, 88, 89, 90 or more than 90 CAG repeats).

[0973] In one embodiment, a subject has incomplete penetrance where the HTT gene has between 36 and 40 CAG repeats (e.g., 36, 37, 38, 39 and 40 CAG repeats).

[0974] Symptoms of HD may include features attributed to CNS degeneration such as, but are not limited to, chorea, dystonia, bradykinesia, incoordination, irritability and depression, problem solving difficulties, reduction in the ability of a person to function in their normal day to day life, diminished speech, and difficulty swallowing, as well as features not attributed to CNS degeneration such as, but not limited to, weight loss, muscle wasting, metabolic dysfunction and endocrine disturbances.

[0975] Model systems for studying Huntington's Disease which may be used with the modulatory polynucleotides and AAV particles described herein include, but are not limited to, cell models (e.g., primary neurons and induced pluripotent stem cells), invertebrate models (e.g., drosophila or Caenorhabditis elegans), mouse models (e.g., YAC128 mouse model; R6/2 mouse model; BAC, YAC and knock-in mouse model), rat models (e.g., BAC) and large mammal models (e.g., pigs, sheep or monkeys).

[0976] Studies in animal models of HD have suggested that phenotypic reversal is feasible, for example, subsequent to gene shut off in regulated-expression models. In a mouse model allowing shut off of expression of a 94-polyglutamine repeat HTT protein, not only was the clinical syndrome reversed but also the intracellular aggregates were resolved. Further, animal models in which silencing of HTT was tested, demonstrated promising results with the therapy being both well tolerated and showing potential therapeutic benefit.

[0977] Such siRNA mediated HTT expression inhibition may be used for treating HD. According to the present invention, methods for treating and/or ameliorating HD in a patient comprises administering to the patient an effective amount of AAV particles comprising a nucleic acid sequence encoding the siRNA molecules of the present invention into cells. The administration of the AAV particles comprising such a nucleic acid sequence will encode the siRNA molecules which cause the inhibition/silence of HTT gene expression.

[0978] In one embodiment, the AAV particles described herein may be used to reduce the amount of HTT in a subject in need thereof and thus provides a therapeutic benefit as described herein.

[0979] In certain aspects, the symptoms of HD include behavioral difficulties and symptoms such as, but not limited to, apathy or lack of initiative, dysphoria, irritability, agitation or anxiety, poor self-care, poor judgment, inflexibility, disinhibition, depression, suicidal ideation euphoria, aggression, delusions, compulsions, hypersexuality, hallucinations, speech deterioration, slurred speech, difficulty swallowing, weight loss, cognitive dysfunction which impairs executive functions (e.g., organizing, planning, checking or adapting alternatives, and delays in the acquisition of new motor skills), unsteady gait and involuntary movements (chorea). In other aspects, the composition of the present invention is applied to one or both of the brain and the spinal cord. In one embodiment, the survival of the subject is prolonged by treating any of the symptoms of HD described herein.

[0980] Disclosed in the present invention are methods for treating Huntington's Disease (HD) associated with HTT protein in a subject in need of treatment. The method optionally comprises administering to the subject a therapeutically effective amount of a composition comprising at least AAV particles comprising a nucleic acid sequence encoding the siRNA molecules of the present invention. As a non-limiting example, the siRNA molecules can silence HTT gene expression, inhibit HTT protein production, and reduce one or more symptoms of HD in the subject such that HD is therapeutically treated.

### Methods of Treatment of Huntington's Disease

[0981] The present invention provides AAV particles comprising modulatory polynucleotides encoding siRNA molecules targeting the HTT gene, and methods for their design and manufacture. While not wishing to be bound by a single theory of operability, the invention provides modulatory polynucleotides, including siRNAs, that interfere with HTT expression, including HTT mutant and/or wild-type HTT gene expression. Particularly, the present invention employs viral genomes such as adeno-associated viral (AAV) viral genomes comprising modulatory polynucleotide sequences encoding the siRNA molecules of the present invention. The AAV particles comprising the modulatory polynucleotides encoding the siRNA molecules of the present invention may increase the delivery of active agents into neurons of interest such as medium spiny neurons of the striatum and cortical neurons. The siRNA duplexes or encoded dsRNA targeting the HTT gene may be able to inhibit HTT gene expression (e.g., mRNA level) significantly inside cells, therefore, reducing HTT expression induced stress inside the cells such as aggregation of protein and formation of inclusions, increased free radicals, mitochondrial dysfunction and RNA metabolism.

[0982] Provided in the present invention are methods for introducing the AAV particles comprising a modulatory polynucleotide sequence encoding the siRNA molecules of the present invention into cells, the method comprising introducing into said cells any of the AAV particles in an amount sufficient for degradation of target HTT mRNA to occur, thereby activating target-specific RNAi in the cells. In some aspects, the cells may be stem cells, neurons such as medium spiny or cortical neurons, muscle cells and glial cells such as astrocytes.

[0983] In some embodiments, the present invention provides methods for treating or ameliorating Huntington's Disease (HD) by administering to a subject in need thereof a therapeutically effective amount of a plasmid or AAV particle described herein.

[0984] In some embodiments, the AAV particles comprising modulatory polynucleotides encoding the siRNA molecules of the present invention may be used to treat and/or ameliorate for HD.

[0985] In one embodiment, the AAV particles comprising modulatory polynucleotides encoding the siRNA molecules of the present invention may be used to reduce the cognitive and/or motor decline of a subject with HD, where the amount of decline is determined by a standard evaluation system such as, but not limited to, Unified Huntington's Disease Ratings Scale (UHDRS) and subscores, and cognitive testing.

[0986] In one embodiment, the AAV particles comprising modulatory polynucleotides encoding the siRNA molecules of the present invention may be used to reduce the decline of functional capacity and activities of daily living as measured by a standard evaluation system such as, but not limited to, the total functional capacity (TFC) scale.

[0987] In some embodiments, the present invention provides methods for treating, or ameliorating Huntington's Disease associated with HTT gene and/or HTT protein in a subject in need of treatment, the method comprising administering to the subject a pharmaceutically effective amount of AAV particles comprising modulatory polynucleotides encoding at least one siRNA duplex targeting the HTT gene, inhibiting HTT gene expression and protein production, and ameliorating symptoms of HD in the subject.

[0988] In one embodiment, the AAV particles of the present invention may be used as a method of treating Huntington's disease in a subject in need of treatment. Any method known in the art for defining a subject in need of treatment may be used to identify said subject(s). A subject may have a clinical diagnosis of Huntington's disease, or may be pre-symptomatic. Any known method for diagnosing HD may be utilized, including, but not limited to, cognitive assessments and/or neurological or neuropsychiatric examinations, motor tests, sensory tests, psychiatric evaluations, brain imaging, family history and/or genetic testing.

[0989] In one embodiment, HD subject selection is determined with the use of the Prognostic Index for Huntington's Disease, or a derivative thereof (Long J D et al., Movement Disorders, 2017, 32(2), 256-263, the contents of which are herein incorporated by reference in their entirety). This prognostic index uses four components to predict probability of motor diagnosis, (1) total motor score (TMS) from the Unified Huntington's Disease Rating Scale (UHDRS), (2) Symbol Digit Modality Test (SDMT), (3) base-line age, and (4) cytosine-adenine-guanine (CAG) expansion.

[0990] In one embodiment, the prognostic index for Huntington's Disease is calculated with the following formula: PI_{HD}=51×TMS+(−34)×SDMT+7×Age×(CAG-34), wherein larger values for PI_{HD} indicate greater risk of diagnosis or onset of symptoms.

[0991] In another embodiment, the prognostic index for Huntington's Disease is calculated with the following normalized formula that gives standard deviation units to be interpreted in the context of 50% 10-year survival: PIN_{HD}=(PI_{HD}−883)/1044, wherein PIN_{HD}<0 indicates greater than 50% 10-year survival, and PIN_{HD}>0 suggests less than 50% 10-year survival.

[0992] In one embodiment, the prognostic index may be used to identify subjects whom will develop symptoms of HD within several years, but that do not yet have clinically diagnosable symptoms. Further, these asymptomatic patients may be selected for and receive treatment using the AAV particles and compositions of the present invention during the asymptomatic period.

[0993] In one embodiment, the AAV particles may be administered to a subject who has undergone biomarker assessment. Potential biomarkers in blood for premanifest and early progression of HD include, but are not limited to, 8-OhdG oxidative stress marker, metabolic markers (e.g., creatine kinase, branched-chain amino acids), cholesterol metabolites (e.g., 24-OH cholesterol), immune and inflammatory proteins (e.g., clusterin, complement components, interleukins 6 and 8), gene expression changes (e.g., transcriptomic markers), endocrine markers (e.g., cortisol, ghrcelin and leptin), BDNF, adenosine 2A receptors. Potential biomarkers for brain imaging for premanifest and early progression of HD include, but are not limited to, striatal volume, subcortical white-matter volume, cortical thickness, whole brain and ventricular volumes, functional imaging (e.g., functional MRI), PET (e.g., with fluorodeoxyglucose), and magnetic resonance spectroscopy (e.g., lactate). Potential biomarkers for quantitative clinical tools for premanifest and early progression of HD include, but are not limited to, quantitative motor assessments, motor physiological assessments (e.g., transcranial magnetic stimulation), and quantitative eye movement measurements. Non-limiting examples of quantitative clinical biomarker assessments include tongue force variability, metronome-guided tapping, grip force, oculomotor assessments and cognitive tests. Non-limiting examples of multicenter observational studies include PREDICT-HD and TRACK-HD. A subject may have symptoms of HD, diagnosed with HD or may be asymptomatic for HD.

[0994] In one embodiment, the AAV particles may be administered to a subject who has undergone biomarker assessment using neuroimaging. A subject may have symptoms of HD, diagnosed with HD or may be asymptomatic for HD.

[0995] In one embodiment, the AAV particles may be administered to a subject who is asymptomatic for HD. A subject may be asymptomatic but may have undergone predictive genetic testing or biomarker assessment to determine if they are at risk for HD and/or a subject may have a family member (e.g., mother, father, brother, sister, aunt, uncle, grandparent) who has been diagnosed with HD.

[0996] In one embodiment, the AAV particles may be administered to a subject who is in the early stages of HD. In the early stage a subject has subtle changes in coordination, some involuntary movements (chorea), changes in mood such as irritability and depression, problem solving difficulties, reduction in the ability of a person to function in their normal day to day life.

[0997] In one embodiment, the AAV particles may be administered to a subject who is in the middle stages of HD. In the middle stage a subject has an increase in the movement disorder, diminished speech, difficulty swallowing, and ordinary activities will become harder to do. At this stage a subject may have occupational and physical therapists to help maintain control of voluntary movements and a subject may have a speech language pathologist.

[0998] In one embodiment, the AAV particles may be administered to a subject who is in the late stages of HD. In the late stage, a subject with HD is almost completely or completely dependent on others for care as the subject can no longer walk and is unable to speak. A subject can generally still comprehend language and is aware of family and friends but choking is a major concern.

[0999] In one embodiment, the AAV particles may be used to treat a subject who has the juvenile form of HD which is the onset of HD before the age of 20 years and as early as 2 years.

[1000] In one embodiment, the AAV particles may be used to treat a subject with HD who has fully penetrant HD where the HTT gene has 41 or more CAG repeats (e.g., 41, 42, 43, 44, 45, 46, 47, 48, 49, 50, 51, 52, 53, 54, 55, 56, 57, 58, 59, 60, 61, 62, 63, 64, 65, 66, 67, 68, 69, 70, 71, 72, 73, 74, 75, 76, 77, 78, 79, 80, 81, 82, 83, 84, 85, 86, 87, 88, 89, 90 or more than 90 CAG repeats).

[1001] In one embodiment, the AAV particles may be used to treat a subject with HD who has incomplete penetrance where the HTT gene has between 36 and 40 CAG repeats (e.g., 36, 37, 38, 39 and 40 CAG repeats).

[1002] In some embodiments, the composition comprising the AAV particles comprising modulatory polynucleotides encoding the siRNA molecules of the present invention is administered to the central nervous system of the subject. In other embodiments, the composition comprising the AAV particles comprising modulatory polynucleotides encoding the siRNA molecules of the present invention is administered to a tissue of a subject (e.g., brain of the subject).

[1003] In one embodiment, the AAV particles comprising modulatory polynucleotides encoding the siRNA molecules of the present invention may be delivered into specific types of targeted cells, including, but not limited to, neurons including medium spiny or cortical neurons; glial cells including oligodendrocytes, astrocytes and microglia; and/or other cells surrounding neurons such as T cells.

[1004] In one embodiment, the AAV particles comprising modulatory polynucleotides encoding the siRNA molecules of the present invention may be delivered to neurons in the striatum and/or neurons of the cortex.

[1005] In some embodiments, the composition of the present invention for treating HD is administered to the subject in need intravenously, intramuscularly, subcutaneously, intraperitoneally, intraparenchymally, subpially, intrathecally and/or intraventricularly, allowing the siRNA molecules or vectors comprising the siRNA molecules to pass through one or both the blood-brain barrier and the blood spinal cord barrier, or directly access the brain and/or spinal cord. In some aspects, the method includes administering (e.g., intraparenchymal administration, subpial administration, intraventricular administration and/or intrathecal administration) directly to the central nervous system (CNS) of a subject (using, e.g., an infusion pump and/or a delivery scaffold) a therapeutically effective amount of a composition comprising AAV particles encoding the nucleic acid sequence for the siRNA molecules of the present invention. The vectors may be used to silence or suppress HT gene expression, and/or reducing one or more symptoms of HD in the subject such that HD is therapeutically treated.

[1006] In some embodiments, the siRNA molecules or the AAV particles comprising such siRNA molecules may be introduced directly into the central nervous system of the subject, for example, by infusion to the white matter a subject. While not wishing to be bound by theory, distribution via direct white matter infusion may be independent of axonal transport mechanisms which may be impaired in subjects with Huntington's Disease which means white matter infusion may allow for more transport of the AAV particles.

[1007] In one embodiment, the composition comprising the AAV particles comprising modulatory polynucleotides encoding the siRNA molecules of the present invention is administered to the central nervous system of the subject via intraparenchymal injection.

[1008] In one embodiment, the AAV particle composition comprising modulatory polynucleotides encoding the siRNA molecules of the present invention is administered to the central nervous system of the subject via intraparenchymal injection and intrathecal injection.

[1009] In one embodiment, the AAV particle composition comprising modulatory polynucleotides encoding the siRNA molecules of the present invention is administered to the central nervous system of the subject via intraparenchymal injection and intracerebroventricular injection.

[1010] In some embodiments, the composition of the present invention for treating HD is administered to the subject in need by intraparenchymal administration.

[1011] In some embodiments, the AAV particle composition comprising modulatory polynucleotides encoding the siRNA molecules of the present invention may be introduced directly into the central nervous system of the subject, for example, by infusion into the putamen.

[1012] In some embodiments, the AAV particle composition comprising modulatory polynucleotides encoding the siRNA molecules of the present invention may be introduced directly into the central nervous system of the subject, for example, by infusion into the thalamus of a subject. While not wishing to be bound by theory, the thalamus is an area of the brain which is relatively spared in subjects with Huntington's Disease which means it may allow for more widespread cortical transduction via axonal transport of the AAV particles.

[1013] In some embodiments, the AAV particle composition comprising modulatory polynucleotides encoding the siRNA molecules of the present invention may be introduced indirectly into the central nervous system of the subject, for example, by intravenous administration.

### Modulate HTT Expression

[1014] In one embodiment, administration of the AAV particles to a subject will reduce the expression of HTT in a subject and the reduction of expression of the HTT will reduce the effects of HD in a subject.

[1015] In one embodiment, the encoded dsRNA once expressed and contacts a cell expressing HTT protein, inhibits the expression of HTT protein by at least 10%, at least 20%, at least 25%, at least 30%, at least 35% or at least 40% or more, such as when assayed by a method as described herein.

[1016] In one embodiment, administration of the AAV particles comprising a modulatory polynucleotide sequence encoding a siRNA of the invention, to a subject may lower HTT (e.g., mutant HTT, wild-type HTT and/or mutant and wild-type HT) in a subject. In one embodiment, administration of the AAV particles to a subject may lower wild-type HTT in a subject. In yet another embodiment, administration of the AAV particles to a subject may lower both mutant HTT and wild-type HTT in a subject. The mutant and/or wild-type HTT may be lowered by about 20%, 30%, 40%, 50%, 60%, 70%, 80%, 85%, 90%, 95% and 100%, or at least 20-30&% 20-40%, 20-50%, 20-60%, 20-70%, 20-80%, 20-90%, 20-95%, 20-100%, 30-40%, 30-50%, 30-60%, 30-70%, 30-80%, 30-90%, 30-95%, 30-100%, 40-50%, 40-60%, 40-70%, 40-80%, 40-90%, 40-95%, 40-100%, 50-60%, 50-70%, 50-80%, 50-90%, 50-95%, 50-100%, 60-70%, 60-80%, 60-90%, 60-95%, 60-100%, 70-80%, 70-90%, 70-95%, 70-100%, 80-90%, 80-95%, 80-100%, 90-95%, 90-100% or 95-100% in a subject such as, but not limited to, the CNS, a region of the CNS, or a specific cell of the CNS of a subject. The mutant HTT may be lowered by about 20%, 30%, 40%, 50%, 60%, 70%, 80%, 85%, 90%, 95% and 100%, or at least 20-30%, 20-40%, 20-50%, 20-60%, 20-70%, 20-80%, 20-90%, 20-95%, 20-100%, 30-40%, 30-50%, 30-60%, 30-70%, 30-80%, 30-90%, 30-95%, 30-100%, 40-50%, 40-60%, 40-70%, 40-80%, 40-90%, 40-95%, 40-100%, 50-60%, 50-70%, 50-80%, 50-90%, 50-95%, 50-100%, 60-70%, 60-80%, 60-90%, 60-95%, 60-100%, 70-80%, 70-90%, 70-95%, 70-100%, 80-90%, 80-95%, 80-100%, 90-95%, 90-100% or 95-100% in a subject such as, but not limited to, the CNS, a region of the CNS, or a specific cell of the CNS of a subject. The wild-type HTT may be lowered by about 20%, 30%, 40%, 50%, 60%, 70%, 80%, 85%, 90%, 95% and 100%, or at least 20-30%, 20-40%, 20-50%, 20-60%, 20-70%, 20-80%, 20-90%, 20-95%, 20-100%, 30-40%, 30-50%, 30-60%, 30-70%, 30-80%, 30-90%, 30-95%, 30-100%, 40-50%, 40-60%, 40-70%, 40-80%, 40-90%, 40-95%, 40-100%, 50-60%, 50-70%, 50-80%, 50-90%, 50-95%, 50-100%, 60-70%, 60-80%, 60-90%, 60-95%, 60-100%, 70-80%, 70-90%, 70-95%, 70-100%, 80-90%, 80-95%, 80-100%, 90-95%, 90-100% or 95-100% in a subject such as, but not limited to, the CNS, a region of the CNS, or a specific cell of the CNS of a subject. The mutant and wild-type HTT may be lowered by about 20%, 30%, 40%, 50%, 60%, 70%, 80%, 85%, 90%, 95% and 100%, or at least 20-30%, 20-40%, 20-50%, 20-60%, 20-70%, 20-80%, 20-90%, 20-95%, 20-100%, 30-40%, 30-50%, 30-60%, 30-70%, 30-80%, 30-90%, 30-95%, 30-100%, 40-50%, 40-60%, 40-70%, 40-80%, 40-90%, 40-95%, 40-100%, 50-60%, 50-70%, 50-80%, 50-90%, 50-95%, 50-100%, 60-70%, 60-80%, 60-90%, 60-95%, 60-100%, 70-80%, 70-90%, 70-95%, 70-100%, 80-90%, 80-95%, 80-100%, 90-95%, 90-100% or 95-100% in a subject such as, but not limited to, the CNS, a region of the CNS, or a specific cell of the CNS of a subject. As a non-limiting example, the AAV particles may lower the expression of HTT by at least 50% in the medium spiny neurons. As a non-limiting example, the AAV particles may lower the expression of HTT by at least 40% in the medium spiny neurons. As a non-limiting example, the AAV particles may lower the expression of HTT by at least 40% in the medium spiny neurons of the putamen. As a non-limiting example, the AAV particles may lower the expression of HTT by at least 30% in the medium spiny neurons of the putamen. As yet another non-limiting example, the AAV particles may lower the expression of HT in the putamen and cortex by at least 40%. As yet another non-limiting example, the AAV particles may lower the expression of HTT in the putamen and cortex by at least 30%. As yet another non-limiting example, the AAV particles may lower the expression of HTT in the putamen by at least 30%. As yet another non-limiting example, the AAV particles may lower the expression of HTT in the putamen by at least 30% and cortex by at least 15%.

[1017] In one embodiment, the AAV particles may be used to reduce the expression of HTT protein by at least about 30%, 31%, 32%, 33%, 34%, 35%, 36%, 37%, 38%, 39%, 40%, 41%, 42%, 43%, 44%, 45%, 46%, 47%, 48%, 49%, 50%, 51%, 52%, 53%, 54%, 55%, 56%, 57%, 58%, 59%, 60%, 61%, 62%, 63%, 64%, 65%, 66%, 67%, 68%, 69%, 70%, 71%, 72%, 73%, 74%, 75%, 76%, 77%, 78%, 79%, 80%, 85%, 90%, 95% and 100%, or at least 20-30%, 20-40%, 20-50%, 20-60%, 20-70%, 20-80%, 20-90%, 20-95%, 20-100%, 30-40%, 30-50%, 30-60%, 30-70%, 30-80%, 30-90%, 30-95%, 30-100%, 40-50%, 40-60%, 40-70%, 40-80%, 40-90%, 40-95%, 40-100%, 50-60%, 50-70%, 50-80%, 50-90%, 50-95%, 50-100%, 55-60%, 55-70%, 55-80%, 55-90%, 55-95%, 55-100%, 60-70%, 60-80%, 60-90%, 60-95%, 60-100%, 70-80%, 70-90%, 70-95%, 70-100%, 80-90%, 80-95%, 80-100%, 90-95%, 90-100% or 95-100%. As a non-limiting example, the expression of HTT protein expression may be reduced by 50-90%. As a non-limiting example, the expression of HTT protein expression may be reduced by 30-70%.

[1018] In one embodiment, the siRNA duplexes or encoded dsRNA may be used to reduce the expression of HTT mRNA by at least about 30%, 31%, 32%, 33%, 34%, 35%, 36%, 37%, 38%, 39%, 40%, 41%, 42%, 43%, 44%, 45%, 46%, 47%, 48%, 49%, 50%, 51%, 52%, 53%, 54%, 55%, 56%, 57%, 58%, 59%, 60%, 61%, 62%, 63%, 64%, 65%, 66%, 67%, 68%, 69%, 70%, 71%, 72%, 73%, 74%, 75%, 76%, 77%, 78%, 79%, 80%, 85%, 90%, 95% and 100%, or at least 20-30%, 20-40%, 20-50%, 20-60%, 20-70%, 20-80%, 20-90%, 20-95%, 20-100%, 30-40%, 30-50%, 30-60%, 30-70%, 30-80%, 30-90%, 30-95%, 30-100%, 40-50%, 40-60%, 40-70%, 40-80%, 40-90%, 40-95%, 40-100%, 50-60%, 50-70%, 50-80%, 50-90%, 50-95%, 50-100%, 55-60%, 55-70%, 55-80%, 55-90%, 55-95%, 55-100%, 60-70%, 60-80%, 60-90%, 60-95%, 60-100%, 70-80%, 70-90%, 70-95%, 70-100%, 80-90%, 80-95%, 80-100%, 90-95%, 90-100% or 95-100%. As a non-limiting example, the expression of HTT mRNA may be reduced 50-90%.

[1019] In one embodiment, the AAV particles may be used to decrease HTT protein in a subject. The decrease may independently be 5%, 10%, 15%, 20%, 25%, 30%, 35%, 40%, 45%, 50%, 55%, 60%, 65%, 70%, 75%, 80%, 85%, 90%, 95%, or more than 95%, 5-15%, 5-20%, 5-25%, 5-30%, 5-35%, 5-40%, 5-45%, 5-50%, 5-55%, 5-60%, 5-65%, 5-70%, 5-75%, 5-80%, 5-85%, 5-90%, 5-95%, 10-20%, 10-25%, 10-30%, 10-35%, 10-40%, 10-45%, 10-50%, 10-55%, 10-60%, 10-65%, 10-70%, 10-75%, 10-80%, 10-85%, 10-90%, 10-95%, 15-25%, 15-30%, 15-35%, 15-40%, 15-45%, 15-50%, 15-55%, 15-60%, 15-65%, 15-70%, 15-75%, 15-80%, 15-85%, 15-90%, 15-95%, 20-30%, 20-35%, 20-40%, 20-45%, 20-50%, 20-55%, 20-60%, 20-65%, 20-70%, 20-75%, 20-80%, 20-85%, 20-90%, 20-95%, 25-35%, 25-40%, 25-45%, 25-50%, 25-55%, 25-60%, 25-65%, 25-70%, 25-75%, 25-80%, 25-85%, 25-90%, 25-95%, 30-40%, 30-45%, 30-50%, 30-55%, 30-60%, 30-65%, 30-70%, 30-75%, 30-80%, 30-85%, 30-90%, 30-95%, 3545%, 35-50%, 35-55%, 35-60%, 35-65%, 35-70%, 35-75%, 35-80%, 35-85%, 35-90%, 35-95%, 40-50%, 40-55%, 40-60%, 40-65%, 40-70%, 40-75%, 40-80%, 40-85%, 40-90%, 40-95%, 45-55%, 45-60%, 45-65%, 45-70%, 45-75%, 45-80%, 45-85%, 45-90%, 45-95%, 50-60%, 50-65%, 50-70%, 50-75%, 50-80%, 50-85%, 50-90%, 50-95%, 55-65%, 55-70%, 55-75%, 55-80%, 55-85%, 55-90%, 55-95%, 60-70%, 60-75%, 60-80%, 60-85%, 60-90%, 60-95%, 65-75%, 65-80%, 65-85%, 65-90%, 65-95%, 70-80%, 70-85%, 70-90%, 70-95%, 75-85%, 75-90%, 75-95%, 80-90%, 80-95%, or 90-95%. As a non-limiting example, a subject may have a 50% decrease of HTT protein. As a non-limiting example, a subject may have a decrease of 70% of HT protein and a decrease of 10% of wild type HTT protein. As a non-limiting example, the decrease of HTT in the medium spiny neurons of the putamen may be about 40%. As a non-limiting example, the decrease of HTT in the putamen and cortex may be about 40%. As a non-limiting example, the decrease of HTT in the medium spiny neurons of the putamen may be between 40%-70%. As a non-limiting example, the decrease of HTT in the putamen and cortex may be between 40%-70%.

[1020] In one embodiment, the AAV particles may be used to decrease wild type HTT protein in a subject. The decrease may independently be 5%, 10%, 15%, 20%, 25%, 30%, 35%, 40%, 45%, 50%, 55%, 60%, 65%, 70%, 75%, 80%, 85%, 90%, 95%, or more than 95%, 5-15%, 5-20%, 5-25%, 5-30%, 5-35%, 5-40%, 5-45%, 5-50%, 5-55%, 5-60%, 5-65%, 5-70%, 5-75%, 5-80%, 5-85%, 5-90%, 5-95%, 10-20%, 10-25%, 10-30%, 10-35%, 10-40%, 10-45%, 10-50%, 10-55%, 10-60%, 10-65%, 10-70%, 10-75%, 10-80%, 10-85%, 10-90%, 10-95%, 15-25%, 15-30%, 15-35%, 15-40%, 15-45%, 15-50%, 15-55%, 15-60%, 15-65%, 15-70%, 15-75%, 15-80%, 15-85%, 15-90%, 15-95%, 20-30%, 20-35%, 20-40%, 20-45%, 20-50%, 20-55%, 20-60%, 20-65%, 20-70%, 20-75%, 20-80%, 20-85%, 20-90%, 20-95%, 25-35%, 25-40%, 25-45%, 25-50%, 25-55%, 25-60%, 25-65%, 25-70%, 25-75%, 25-80%, 25-85%, 25-90%, 25-95%, 30-40%, 30-45%, 30-50%, 30-55%, 30-60%, 30-65%, 30-70%, 30-75%, 30-80%, 30-85%, 30-90%, 30-95%, 35-45%, 35-50%, 35-55%, 35-60%, 35-65%, 35-70%, 35-75%, 35-80%, 35-85%, 35-90%, 35-95%, 40-50%, 40-55%, 40-60%,40-65%, 40-70%, 40-75%, 40-80%, 40-85%, 40-90%, 40-95%, 45-55%, 45-60%, 45-65%, 45-70%, 45-75%, 45-80%, 45-85%, 45-90%, 45-95%, 50-60%, 50-65%, 50-70%, 50-75%, 50-80%, 50-85%, 50-90%, 50-95%, 55-65%, 55-70%, 55-75%, 55-80%, 55-85%, 55-90%, 55-95%, 60-70%, 60-75%, 60-80%, 60-85%, 60-90%, 60-95%, 65-75%, 65-80%, 65-85%, 65-90%, 65-95%, 70-80%, 70-85%, 70-90%, 70-95%, 75-85%, 75-90%, 75-95%, 80-90%, 80-95%, or 90-95%. As a non-limiting example, a subject may have a 50% decrease of wild type HT protein. As a non-limiting example, the decrease of wild type HTT in the medium spiny neurons of the putamen may be about 40%. As a non-limiting example, the decrease of wild type HT in the putamen and cortex may be about 40%. As a non-limiting example, the decrease of wild type HTT in the medium spiny neurons of the putamen may be between 40%-70%. As a non-limiting example, the decrease of wild type HTT in the putamen and cortex may be between 40%-70%.

[1021] In one embodiment, the AAV particles may be used to decrease mutant HTT protein in a subject. The decrease may independently be 5%, 10%, 15%, 20%, 25%, 30%, 35%, 40%, 45%, 50%, 55%, 60%, 65%, 70%, 75%, 80%, 85%, 90%, 95%, or more than 95%, 5-15%, 5-20%, 5-25%, 5-30%, 5-35%, 5-40%, 5-45%, 5-50%, 5-55%, 5-60%, 5-65%, 5-70%, 5-75%, 5-80%, 5-85%, 5-90%, 5-95%, 10-20%, 10-25%, 10-30%, 10-35%, 10-40%, 10-45%, 10-50%, 10-55%, 10-60%, 10-65%, 10-70%, 10-75%, 10-80%, 10-85%, 10-90%, 10-95%, 15-25%, 15-30%, 15-35%, 15-40%, 15-45%, 15-50%, 15-55%, 15-60%, 15-65%, 15-70%, 15-75%, 15-80%, 15-85%, 15-90%, 15-95%, 20-30%, 20-35%, 20-40%, 20-45%, 20-50%, 20-55%, 20-60%, 20-65%, 20-70%, 20-75%, 20-80%, 20-85%, 20-90%, 20-95%, 25-35%, 25-40%, 25-45%, 25-50%, 25-55%, 25-60%, 25-65%, 25-70%, 25-75%, 25-80%, 25-85%, 25-90%, 25-95%, 30-40%, 30-45%, 30-50%, 30-55%, 30-60%, 30-65%, 30-70%, 30-75%, 30-80%, 30-85%, 30-90%, 30-95%, 35-45%, 35-50%, 35-55%, 35-60%, 35-65%, 35-70%, 35-75%, 35-80%, 35-85%, 35-90%, 35-95%, 40-50%, 40-55%, 40-60%, 40-65%, 40-70%, 40-75%, 40-80%, 40-85%, 40-90%, 40-95%, 45-55%, 45-60%, 45-65%, 45-70%, 45-75%, 45-80%, 45-85%, 45-90%, 45-95%, 50-60%, 50-65%, 50-70%, 50-75%, 50-80%, 50-85%, 50-90%, 50-95%, 55-65%, 55-70%, 55-75%, 55-80%, 55-85%, 55-90%, 55-95%, 60-70%, 60-75%, 60-80%, 60-85%, 60-90%, 60-95%, 65-75%, 65-80%, 65-85%, 65-90%, 65-95%, 70-80%, 70-85%, 70-90%, 70-95%, 75-85%, 75-90%, 75-95%, 80-90%, 80-95%, or 90-95%. As a non-limiting example, a subject may have a 50% decrease of mutant HTT protein. As a non-limiting example, the decrease of mutant HTT in the medium spiny neurons of the putamen may be about 40%. As a non-limiting example, the decrease of mutant HTT in the putamen and cortex may be about 40%. As a non-limiting example, the decrease of mutant HTT in the medium spiny neurons of the putamen may be between 40%-70%. As a non-limiting example, the decrease of mutant HTT in the putamen and cortex may be between 40%-70%.

[1022] In some embodiments, the present invention provides methods for inhibiting/silencing HTT gene expression in a cell. Accordingly, the siRNA duplexes or encoded dsRNA can be used to substantially inhibit HTT gene expression in a cell, in particular in a neuron. In some aspects, the inhibition of HTT gene expression refers to an inhibition by at least about 20%, such as by at least about 30%, 31%, 32%, 33%, 34%, 35%, 36%, 37%, 38%, 39%, 40%, 41%, 42%, 43%, 44%, 45%, 46%, 47%, 48%, 49%, 50%, 51%, 52%, 53%, 54%, 55%, 56%, 57%, 58%, 59%, 60%, 61%, 62%, 63%, 64%, 65%, 66%, 67%, 68%, 69%, 70%, 71%, 72%, 73%, 74%, 75%, 76%, 77%, 78%, 79%, 80%, 85%, 90%, 95% and 100%, or at least 20-30%, 20-40%, 20-50%, 20-60%, 20-70%, 20-80%, 20-90%, 20-95%, 20-100%, 30-40%, 30-50%, 30-60%, 30-70%, 30-80%, 30-90%, 30-95%, 30-100%, 40-50%, 40-60%, 40-70%, 40-80%, 40-90%, 40-95%, 40-100%, 50-60%, 50-70%, 50-80%, 50-90%, 50-95%, 50-100%, 55-60%, 55-70%, 55-80%, 55-90%, 55-95%, 55-100%, 60-70%, 60-80%, 60-90%, 60-95%, 60-100%, 70-80%, 70-90%, 70-95%, 70-100%, 80-90%, 80-95%, 80-100%, 90-95%, 90-100% or 95-100%. Accordingly, the protein product of the targeted gene may be inhibited by at least about 20%, preferably by at least about 30%, 31%, 32%, 33%, 34%, 35%, 36%, 37%, 38%, 39%, 40%, 41%, 42%, 43%, 44%, 45%, 46%, 47%, 480%, 49%, 50%, 51%, 52%, 53%, 54%, 55%, 56%, 57%, 58%, 59%, 60%, 61%, 62%, 63%, 64%, 65%, 66%, 67%, 68%, 69%, 70%, 71%, 72%, 73%, 74%, 75%, 76%, 77%, 78%, 79%, 80%, 85%, 90%, 95% and 100%, or at least 20-30%, 20-40%, 20-50%, 20-60%, 20-70%, 20-80%, 20-90%, 20-95%, 20-100%, 30-40%, 30-50%, 30-60%, 30-70%, 30-80%, 30-90%, 30-95%, 30-100%, 40-50%, 40-60%, 40-70%, 40-80%, 40-90%, 40-95%, 40-100%, 50-60%, 50-70%, 50-80%, 50-90%, 50-95%, 50-100%, 60-70%, 60-80%, 60-90%, 60-95%, 60-100%, 70-80%, 70-90%, 70-95%, 70-100%, 80-90%, 80-95%, 80-100%, 90-95%, 90-100% or 95-100%.

[1023] In some embodiments, the present invention provides methods for inhibiting/silencing HTT gene expression in a cell, in particular in a medium spiny neuron. In some aspects, the inhibition of HTT gene expression refers to an inhibition by at least about 20%, such as by at least about 30%, 31%, 32%, 33%, 34%, 35%, 36%, 37%, 38%, 39%, 40%, 41%, 42%, 43%, 44%, 45%, 46%, 47%, 48%, 49%, 50%, 51%, 52%, 53%, 54%, 55%, 56%, 57%, 58%, 59%, 60%, 61%, 62%, 63%, 64%, 65%, 66%, 67%, 68%, 69%, 70%, 71%, 72%, 73%, 74%, 750% 76%, 77%, 78%, 79%, 80%, 85%, 90%, 95% and 100%, or at least 20-30%, 20-40%, 20-50%, 20-60%, 20-70%, 20-80%, 20-90%, 20-95%, 20-100%, 30-40%, 30-50%, 30-60%, 30-70%, 30-80%, 30-90%, 30-95%, 30-100%, 40-50%, 40-60%, 40-70%, 40-80%, 40-90%, 40-95%, 40-100%, 50-60%, 50-70%, 50-80%, 50-90%, 50-95%, 50-100%, 55-60%, 55-70%, 55-80%, 55-90%, 55-95%, 55-100%, 60-70%, 60-80%, 60-90%, 60-95%, 60-100%, 70-80%, 70-90%, 70-95%, 70-100%, 80-90%, 80-95%, 80-100%, 90-95%, 90-100% or 95-100%. Accordingly, the protein product of the targeted gene may be inhibited by at least about 20%, preferably by at least about 30%, 31%, 32%, 33%, 34%, 35%, 36%, 37%, 38%, 39%, 40%, 41%, 42%, 43%, 44%, 45%, 46%, 47%, 48%, 49%, 50%, 51%, 52%, 53%, 54%, 55%, 56%, 57%, 58%, 59%, 60%, 61%, 62%, 63%, 64%, 65%, 66%, 67%, 68%, 69%, 70%, 71%, 72%, 73%, 74%, 75%, 76%, 77%, 78%, 79%, 80%, 85%, 90%, 95% and 100%, or at least 20-30%, 20-40%, 20-50%, 20-60%, 20-70%, 20-80%, 20-90%, 20-95%, 20-100%, 30-40%, 30-50%, 30-60%, 30-70%, 30-80%, 30-90%, 30-95%, 30-100%, 40-50%, 40-60%, 40-70%, 40-800%, 40-900%, 40-95%, 40-100%, 50-60%, 50-70%, 50-80%, 50-90%, 50-95%, 50-100%, 55-60%, 55-70%, 55-80%, 55-90%, 55-95%, 55-100%, 60-70%, 60-80%, 60-90%, 60-95%, 60-100%, 70-80%, 70-90%, 70-95%, 70-100%, 80-90%, 80-95%, 80-100%, 90-95%, 90-100% or 95-100%.

[1024] In some embodiments, the present invention provides methods for inhibiting/silencing HTT gene expression in a cell, in particular in an astrocyte. In some aspects, the inhibition of HTT gene expression refers to an inhibition by at least about 20%, such as by at least about 30%, 31%, 32%, 33%, 34%, 35%, 36%, 37%, 38%, 39%, 40%, 41%, 42%, 43%, 44%, 45%, 46%, 47%, 48%, 49%, 50%, 51%, 52%, 53%, 54%, 55%, 56%, 57%, 58%, 59%, 60%, 61%, 62%, 63%, 64%, 65%, 66%, 67%, 68%, 69%, 70%, 71%, 72%, 73%, 74%, 75%, 76%, 77%, 78%, 79%, 80%, 85%, 90%, 95% and 100%, or at least 20-30%, 20-40%, 20-50%, 20-60%, 20-70%, 20-80%, 20-90%, 20-95%, 20-100%, 30-40%, 30-50%, 30-60%, 30-70%, 30-80%, 30-90%, 30-95%, 30-100%, 40-50%, 40-60%, 40-70%, 40-80%, 40-90%, 40-95%, 40-100%, 50-60%, 50-70%, 50-80%, 50-90%, 50-95%, 50-100%, 55-60%, 55-70%, 55-80%, 55-90%, 55-95%, 55-100%, 60-70%, 60-80%, 60-90%, 60-95%, 60-100%, 70-80%, 70-90%, 70-95%, 70-100%, 80-90%, 80-95%, 80-100%, 90-95%, 90-100% or 95-100%. Accordingly, the protein product of the targeted gene may be inhibited by at least about 20%, preferably by at least about 30%, 31%, 32%, 33%, 34%, 35%, 36%, 37%, 38%, 39%, 40%, 41%, 42%, 43%, 44%, 45%, 46%, 47%, 48%, 49%, 50%, 51%, 52%, 53%, 54%, 55%, 56%, 57%, 58%, 59%, 60%, 61%, 62%, 63%, 64%, 65%, 66%, 67%, 68%, 69%, 70%, 71%, 72%, 73%, 74%, 75%, 76%, 77%, 78%, 79%, 80%, 85%, 90%, 95% and 100%, or at least 20-30%, 20-40%, 20-50%, 20-60%, 20-70%, 20-80%, 20-90%, 20-95%, 20-100%, 30-40%, 30-50%, 30-60%, 30-70%, 30-80%, 30-90%, 30-95%, 30-100%, 40-50%, 40-60%, 40-70%, 40-80%, 40-90%, 40-95%, 40-100%, 50-60%, 50-70%, 50-80%, 50-90%, 50-95%, 50-100%, 55-60%, 55-70%, 55-80%, 55-90%, 55-95%, 55-100%, 60-70%, 60-80%, 60-90%, 60-95%, 60-100%, 70-80%, 70-90%, 70-95%, 70-100%, 80-90%, 80-95%, 80-100%, 90-95%, 90-100% or 95-100%.

[1025] In one embodiment, the siRNA duplexes or encoded dsRNA may be used to reduce the expression of HTT protein and/or mRNA in at least one region of the CNS such as, but not limited to the midbrain. The expression of HTT protein and/or mRNA is reduced by at least about 30%, 31%, 32%, 33%, 34%, 35%, 36%, 37%, 38%, 39%, 40%, 41%, 42%, 43%, 44%, 45%, 46%, 47%, 48%, 49%, 50%, 51%, 52%, 53%, 54%, 55%, 56%, 57%, 58%, 59%, 60%, 61%, 62%, 63%, 64%, 65%, 66%, 67%, 68%, 69%, 70%, 71%, 72%, 73%, 74%, 75%, 76%, 77%, 78%, 79%, 80%, 85%, 90%, 95% and 100%, or at least 20-30%, 20-40%, 20-50%, 20-60%, 20-70%, 20-80%, 20-90%, 20-95%, 20-100%, 30-40%, 30-50%, 30-60%, 30-70%, 30-80%, 30-90%, 30-95%, 30-100%, 40-50%, 40-60%, 40-70%, 40-80%, 40-90%, 40-95%, 40-100%, 50-60%, 50-70%, 50-80%, 50-90%, 50-95%, 50-100%, 55-60%, 55-70%, 55-80%, 55-90%, 55-95%, 55-100%, 60-70%, 60-80%, 60-90/6, 60-95%, 60-100%, 70-80%, 70-90%, 70-95%, 70-100%, 80-90%, 80-95%, 80-100%, 90-95%, 90-100% or 95-100% in at least one region of the CNS. As a non-limiting example, the expression of HTT protein and mRNA in the striatum and/or cortex is reduced by 50-90%. As a non-limiting example, the expression of HTT protein and mRNA in the striatum is reduced by 40-50%. As a non-limiting example, the expression of HTT protein and mRNA in the cortex is reduced by 40-50%. As a non-limiting example, the expression of HTT protein and mRNA in the cortex is reduced by 30-70%. As a non-limiting example, the expression of HTT protein and mRNA in the striatum and/or cortex is reduced by 40-70%. As a non-limiting example, the expression of HTT protein and mRNA in the striatum and/or cortex is reduced by 40-50%. As a non-limiting example, the expression of HTT protein and mRNA in the striatum and/or cortex is reduced by 50-70%. As a non-limiting example, the expression of HTT protein and mRNA in the striatum and/or cortex is reduced by 50-60%. As a non-limiting example, the expression of HTT protein and mRNA in the striatum and/or cortex is reduced by 50%. As a non-limiting example, the expression of HTT protein and mRNA in the striatum and/or cortex is reduced by 51%. As a non-limiting example, the expression of HTT protein and mRNA in the striatum and/or cortex is reduced by 52%. As a non-limiting example, the expression of HTT protein and mRNA in the striatum and/or cortex is reduced by 53%. As a non-limiting example, the expression of HTT protein and mRNA in the striatum and/or cortex is reduced by 54%. As a non-limiting example, the expression of HTT protein and mRNA in the striatum and/or cortex is reduced by 55%. As a non-limiting example, the expression of HTT protein and mRNA in the striatum and/or cortex is reduced by 56%. As a non-limiting example, the expression of HT protein and mRNA in the striatum and/or cortex is reduced by 57%. As a non-limiting example, the expression of HTT protein and mRNA in the striatum and/or cortex is reduced by 58%. As a non-limiting example, the expression of HTT protein and mRNA in the striatum and/or cortex is reduced by 59%. As a non-limiting example, the expression of HT protein and mRNA in the striatum and/or cortex is reduced by 60%.

[1026] In one embodiment, the siRNA duplexes or encoded dsRNA may be used to reduce the expression of HTT protein and/or mRNA in at least one region of the CNS such as, but not limited to the forebrain. The expression of HTT protein and/or mRNA is reduced by at least about 30%, 31%, 32%, 33%, 34%, 35%, 36%, 37%, 38%, 39%, 40%, 41%, 42%, 43%, 44%, 45%, 46%, 47%, 48%, 49%, 50%, 51%, 52%, 53%, 54%, 55%, 56%, 57%, 58%, 59%, 60%, 61%, 62%, 63%, 64%, 65%, 66%, 67%, 68%, 69%, 70%, 71%, 72%, 73%, 74%, 75%, 76%, 77%, 78%, 79%, 80%, 85%, 90%, 95% and 100%, or at least 20-30%, 20-40%, 20-50%, 20-60%, 20-70%, 20-80%, 20-90%, 20-95%, 20-100%, 30-40%, 30-50%, 30-60%, 30-70%, 30-80%, 30-90%, 30-95%, 30-100%, 40-50%, 40-60%, 40-70%, 40-80%, 40-90%, 40-95%, 40-100%, 50-60%, 50-70%, 50-80%, 50-90%, 50-95%, 50-100%, 55-60%, 55-70%, 55-80%, 55-90%, 55-95%, 55-100%, 60-70%, 60-80%, 60-90%, 60-95%, 60-100%, 70-80%, 70-90%, 70-95%, 70-100%, 80-90%, 80-95%, 80-100%, 90-95%, 90-100% or 95-100% in at least one region of the CNS. As a non-limiting example, the expression of HTT protein and mRNA in the putamen is reduced by 50-90%. As a non-limiting example, the expression of HTT protein and mRNA in the striatum is reduced by 40-50%. As a non-limiting example, the expression of HTT protein and mRNA in the cortex is reduced by 40-50%. As a non-limiting example, the expression of HTT protein and mRNA in the cortex is reduced by 30-70%. As a non-limiting example, the expression of HTT protein and mRNA in the striatum and/or cortex is reduced by 40-70%. As a non-limiting example, the expression of HTT protein and mRNA in the striatum and/or cortex is reduced by 40-50%. As a non-limiting example, the expression of HTT protein and mRNA in the striatum and/or cortex is reduced by 50-70%. As a non-limiting example, the expression of HTT protein and mRNA in the striatum and/or cortex is reduced by 50-60%. As a non-limiting example, the expression of HTT protein and mRNA in the striatum and/or cortex is reduced by 50%. As a non-limiting example, the expression of HTT protein and mRNA in the striatum and/or cortex is reduced by 51%. As a non-limiting example, the expression of HTT protein and mRNA in the striatum and/or cortex is reduced by 52%. As a non-limiting example, the expression of HT protein and mRNA in the striatum and/or cortex is reduced by 53%. As a non-limiting example, the expression of HTT protein and mRNA in the striatum and/or cortex is reduced by 54%. As a non-limiting example, the expression of HTT protein and mRNA in the striatum and/or cortex is reduced by 55%. As a non-limiting example, the expression of HTT protein and mRNA in the striatum and/or cortex is reduced by 56%. As a non-limiting example, the expression of HTT protein and mRNA in the striatum and/or cortex is reduced by 57%. As a non-limiting example, the expression of HTT protein and mRNA in the striatum and/or cortex is reduced by 58%. As a non-limiting example, the expression of HT protein and mRNA in the striatum and/or cortex is reduced by 59%. As a non-limiting example, the expression of HTT protein and mRNA in the striatum and/or cortex is reduced by 60%.

[1027] In one embodiment, the siRNA duplexes or encoded dsRNA may be used to reduce the expression of HTT protein and/or mRNA in the striatum. The expression of HTT protein and/or mRNA is reduced by at least about 30%, 31%, 32%, 33%, 34%, 35%, 36%, 37%, 38%, 39%, 40%, 41%, 42%, 43%, 44%, 45%, 46%, 47%, 48%, 49%, 50%, 51%, 52%, 53%, 54%, 55%, 56%, 57%, 58%, 59%, 60%, 61%, 62%, 63%, 64%, 65%, 66%, 67%, 68%, 69%, 70%, 71%, 72%, 73%, 74%, 75%, 76%, 77%, 78%, 79%, 80%, 85%, 90%, 95% and 100%, or at least 20-30%, 20-40%, 20-50%, 20-60%, 20-70%, 20-80%, 20-90%, 20-95%, 20-100%, 30-40%, 30-50%, 30-60%, 30-70%, 30-80%, 30-90%, 30-95%, 30-100%, 40-50%, 40-60%, 40-70%, 40-80%, 40-90%, 40-95%, 40-100%, 50-60%, 50-70%, 50-80%, 50-90%, 50-95%, 50-100%, 60-70%, 60-80%, 60-90%, 60-95%, 60-100%, 70-80%, 70-90%, 70-95%, 70-100%, 80-90%, 80-95%, 80-100%, 90-95&% 90-100% or 95-100%. As a non-limiting example, the expression of HTT protein and mRNA in the striatum is reduced by 40-50%. As a non-limiting example, the expression of HTT protein and mRNA in the striatum is reduced by 30-70%. As a non-limiting example, the expression of HTT protein and mRNA in the striatum is reduced by at least 30%. As a non-limiting example, the expression of HTT protein and mRNA in the striatum is reduced by 40-70%. As a non-limiting example, the expression of HTT protein and mRNA in the striatum is reduced by 40-50%. As a non-limiting example, the expression of HTT protein and mRNA in the striatum is reduced by 50-70%. As a non-limiting example, the expression of HTT protein and mRNA in the striatum is reduced by 50-60%. As a non-limiting example, the expression of HTT protein and mRNA in the striatum is reduced by 50%. As a non-limiting example, the expression of HTT protein and mRNA in the striatum is reduced by 51%. As a non-limiting example, the expression of HTT protein and mRNA in the striatum is reduced by 52%. As a non-limiting example, the expression of HTT protein and mRNA in the striatum is reduced by 53° 6. As a non-limiting example, the expression of HTT protein and mRNA in the striatum is reduced by 54%. As a non-limiting example, the expression of HTT protein and mRNA in the striatum is reduced by 55%. As a non-limiting example, the expression of HTT protein and mRNA in the striatum is reduced by 56%. As a non-limiting example, the expression of HTT protein and mRNA in the striatum is reduced by 57%. As a non-limiting example, the expression of HTT protein and mRNA in the striatum is reduced by 58%. As a non-limiting example, the expression of HTT protein and mRNA in the striatum is reduced by 59%. As a non-limiting example, the expression of HTT protein and mRNA in the striatum is reduced by 60%.

[1028] In some embodiments, the AAV particles comprising modulatory polynucleotides encoding the siRNA molecules of the present invention may be used to suppress HTT protein in neurons and/or astrocytes of the striatum and/or the cortex. As a non-limiting example, the suppression of HTT protein is in medium spiny neurons of the striatum and/or neurons of the cortex.

[1029] In some embodiments, the AAV particles comprising modulatory polynucleotides encoding the siRNA molecules of the present invention may be used to suppress HTT protein in neurons and/or astrocytes of the striatum and/or the cortex and reduce associated neuronal toxicity. The suppression of HTT protein in the neurons and/or astrocytes of the striatum and/or the cortex may be, independently, suppressed by 5%, 10%, 15%, 20%, 25%, 30%, 35%, 40%, 45%, 50%, 55%, 60%, 65%, 70%, 75%, 80%, 85%, 90%, 95%, or more than 95%, 5-15%, 5-20%, 5-25%, 5-30%, 5-35%, 5-40%, 5-45%, 5-50%, 5-55%, 5-60%, 5-65%, 5-70%, 5-75%, 5-80%, 5-85%, 5-90%, 5-95%, 10-20%, 10-25%, 10-30%, 10-35%, 10-40%, 10-45%, 10-50%, 10-55%, 10-60%, 10-65%, 10-70%, 10-75%, 10-80%, 10-85%, 10-90%, 10-95%, 15-25%, 15-30%, 15-35%, 15-40%, 15-45%, 15-50%, 15-55%, 15-60%, 15-65%, 15-70%, 15-75%, 15-80%, 15-85%, 15-90%, 15-95%, 20-30%, 20-35%, 20-40%, 20-45%, 20-50%, 20-55%, 20-60%, 20-65%, 20-70%, 20-75%, 20-80%, 20-85%, 20-90%, 20-95%, 25-35%, 25-40%, 25-45%, 25-50%, 25-55%, 25-60%, 25-65%, 25-70%, 25-75%, 25-80%, 25-85%, 25-90%, 25-95%, 30-40%, 30-45%, 30-50%, 30-55%, 30-60%, 30-65%, 30-70%, 30-75%, 30-80%, 30-85%, 30-90%, 30-95%, 35-45%, 35-50%, 35-55%, 35-60%, 35-65%, 35-70%, 35-75%, 35-80%, 35-85%, 35-90%, 35-95%, 40-50%, 40-55%, 40-60%, 40-65%, 40-70%, 40-75%, 40-80%, 40-85%, 40-90%, 40-95%, 45-55%, 45-60%, 45-65%, 45-70%, 45-75%, 45-80%, 45-85%, 45-90%, 45-95%, 50-60%, 50-65%, 50-70%, 50-75%, 50-80%, 50-85%, 50-90%, 50-95%, 55-65%, 55-70%, 55-75%, 55-80%, 55-85%, 55-90%, 55-95%, 60-70%, 60-75%, 60-80%, 60-85%, 60-90%, 60-95%, 65-75%, 65-80%, 65-85%, 65-90%, 65-95%, 70-80%, 70-85%, 70-90%, 70-95%, 75-85%, 75-90%, 75-95%, 80-90%, 80-95%, or 90-95%. The reduction of associated neuronal toxicity may be 5%, 10%, 15%, 20%, 25%, 30%, 35%, 40%, 45%, 50%, 55%, 60%, 65%, 70%, 75%, 80%, 85%, 90%, 95%, or more than 95%, 5-15%, 5-20%, 5-25% 5-30%, 5-35%, 5-40% 5-45%, 5-50%, 5-55%, 5-60%, 5-65%, 5-70%, 5-75%, 5-80%, 5-85%, 5-90%, 5-95%, 10-20%, 10-25%, 10-30%, 10-35%, 10-40%, 10-45%, 10-50%, 10-55%, 10-60%, 10-65%, 10-70%, 10-75%, 10-80%, 10-85%, 10-90%, 10-95%, 15-25%, 15-30%, 15-35%, 15-40%, 15-45%, 15-50%, 15-550%, 15-60%, 15-65%, 15-70%, 15-75%, 15-80%, 15-85%, 15-90%, 15-95%, 20-30%, 20-35%, 20-40%, 20-45%, 20-50%, 20-55%, 20-60%, 20-65%, 20-70%, 20-75%, 20-80%, 20-85%, 20-90%, 20-95%, 25-35%, 25-40%, 25-45%, 25-50%, 25-55%, 25-60%, 25-65%, 25-70%, 25-75%, 25-80%, 25-85%, 25-90%, 25-95%, 30-40%, 30-45%, 30-50%, 30-55%, 30-60%, 30-65%, 30-70%, 30-75%, 30-80%, 30-85%, 30-90%, 30-95%, 35-45%, 35-50%, 35-55%, 35-60%, 35-65%, 35-70%, 35-75%, 35-80%, 35-85%, 35-90%, 35-95%, 40-50%, 40-55%, 40-60%, 40-65%, 40-70%, 40-75%, 40-80%, 40-85%, 40-90%, 40-95%, 45-55%, 45-60%, 45-65%, 45-70%, 45-75%, 45-80%, 45-85%, 45-90%, 45-95%, 50-60%, 50-65%, 50-70%, 50-750%, 50-800%, 50-85%, 50-90%, 50-95%, 55-65%, 55-70%, 55-75%, 55-80%, 55-85%, 55-90%, 55-95%, 60-70%, 60-75%, 60-80%, 60-85%, 60-90%, 60-95%, 65-75%, 65-80%, 65-85%, 65-90%, 65-95%, 70-80%, 70-85%, 70-90%, 70-95%, 75-85%, 75-90%, 75-95%, 80-90%, 80-95%, or 90-95%.

[1030] In one embodiment, the siRNA duplexes or encoded dsRNA may be used to reduce the expression of HTT protein and/or mRNA in the cortex. The expression of HTT protein and/or mRNA is reduced by at least about 30%, 31%, 32%, 33%, 34%, 35%, 36%, 37%, 38%, 39%, 40%, 41%, 42%, 43%, 44%, 45%, 46%, 47%, 48%, 49%, 50%, 51%, 52%, 53%, 54%, 55%, 56%, 57%, 58%, 59%, 60%, 61%, 62%, 63%, 64%, 65%, 66%, 67%, 68%, 69%, 70%, 71%, 72%, 73%, 74%, 75%, 76%, 77%, 78%, 79%, 80%, 85%, 90%, 95% and 100%, or at least 20-30%, 20-40%, 20-50%, 20-60%, 20-70%, 20-80%, 20-90%, 20-95%, 20-100%, 30-40%, 30-50%, 30-60, 30-70%, 30-80%, 30-90%, 30-95%, 30-100%, 40-50%, 40-60%, 40-70%, 40-80%, 40-90%, 40-95%, 40-100%, 50-60%, 50-70%, 50-80%, 50-90%, 50-95%, 50-100%, 60-70%, 60-80%, 60-90%, 60-95%, 60-100%, 70-80%, 70-90%, 70-95%, 70-100%, 80-90%, 80-95%, 80-100%, 90-95%, 90-100% or 95-100%. As a non-limiting example, the expression of HTT protein and mRNA in the cortex is reduced by 40-50%. As a non-limiting example, the expression of HTT protein and mRNA in the cortex is reduced by 30-70%. As a non-limiting example, the expression of HTT protein and mRNA in the cortex is reduced by at least 30%. As a non-limiting example, the expression of HTT protein and mRNA in the cortex is reduced by 40-70%. As a non-limiting example, the expression of HTT protein and mRNA in the cortex is reduced by 40-50%. As a non-limiting example, the expression of HTT protein and mRNA in the cortex is reduced by 50-70%. As a non-limiting example, the expression of HTT protein and mRNA in the cortex is reduced by 50-60%. As a non-limiting example, the expression of HTT protein and mRNA in the cortex is reduced by 50%. As a non-limiting example, the expression of HTT protein and mRNA in the cortex is reduced by 51%. As a non-limiting example, the expression of HTT protein and mRNA in the cortex is reduced by 52%. As a non-limiting example, the expression of HTT protein and mRNA in the cortex is reduced by 53%. As a non-limiting example, the expression of HTT protein and mRNA in the cortex is reduced by 54%. As a non-limiting example, the expression of HTT protein and mRNA in the cortex is reduced by 55%. As a non-limiting example, the expression of HTT protein and mRNA in the cortex is reduced by 56%. As a non-limiting example, the expression of HTT protein and mRNA in the cortex is reduced by 57%. As a non-limiting example, the expression of HTT protein and mRNA in the cortex is reduced by 58%. As a non-limiting example, the expression of HTT protein and mRNA in the cortex is reduced by 59%. As a non-limiting example, the expression of HTT protein and mRNA in the cortex is reduced by 60%.

[1031] In one embodiment, the siRNA duplexes or encoded dsRNA may be used to reduce the expression of HTT protein and/or mRNA in the motor cortex. The expression of HTT protein and/or mRNA is reduced by at least about 30%, 31%, 32%, 33%, 34%, 35%, 36%, 37%, 38%, 39%, 40%, 41%, 42%, 43%, 44%, 45%, 46%, 47%, 48%, 49%, 50%, 51%, 52%, 53%, 54%, 55%, 56%, 57%, 58%, 59%, 60%, 61%, 62%, 63%, 64%, 65%, 66%, 67%, 68%, 69%, 70%, 71%, 72%, 73&% 74%, 75%, 76&% 77%, 78%, 79%, 80%, 85%, 90&% 95% and 100%, or at least 20-30%, 20-40%, 20-50%, 20-60%, 20-70%, 20-80%, 20-90%, 20-95%, 20-100%, 30-40%, 30-50%, 30-60%, 30-70%, 30-80%, 30-90%, 30-95%, 30-100%, 40-50%, 40-60%, 40-70%, 40-80%, 40-90%, 40-95%, 40-100%, 50-60%, 50-70%, 50-80%, 50-90%, 50-95%, 50-100%, 60-70%, 60-80%, 60-90%, 60-95%, 60-100%, 70-80%, 70-90%, 70-95%, 70-100%, 80-90%, 80-95%, 80-100%, 90-95%, 90-100% or 95-100%. As a non-limiting example, the expression of HTT protein and mRNA in the motor cortex is reduced by 40-50%. As a non-limiting example, the expression of HTT protein and mRNA in the motor cortex is reduced by 30-70%. As a non-limiting example, the expression of HTT protein and mRNA in the motor cortex is reduced by at least 30%. As a non-limiting example, the expression of HTT protein and mRNA in the motor cortex is reduced by 40-70%. As a non-limiting example, the expression of HTT protein and mRNA in the motor cortex is reduced by 40-50%. As a non-limiting example, the expression of HTT protein and mRNA in the motor cortex is reduced by 50-70%. As a non-limiting example, the expression of HTT protein and mRNA in the motor cortex is reduced by 50-60%. As a non-limiting example, the expression of HTT protein and mRNA in the motor cortex is reduced by 50%. As a non-limiting example, the expression of HTT protein and mRNA in the motor cortex is reduced by 510%. As a non-limiting example, the expression of HTT protein and mRNA in the motor cortex is reduced by 52%. As a non-limiting example, the expression of HTT protein and mRNA in the motor cortex is reduced by 53%. As a non-limiting example, the expression of HTT protein and mRNA in the motor cortex is reduced by 54%. As a non-limiting example, the expression of HT protein and mRNA in the motor cortex is reduced by 55%. As a non-limiting example, the expression of HTT protein and mRNA in the motor cortex is reduced by 56%. As a non-limiting example, the expression of HT protein and mRNA in the motor cortex is reduced by 57%. As a non-limiting example, the expression of HTT protein and mRNA in the motor cortex is reduced by 58%. As a non-limiting example, the expression of HTT protein and mRNA in the motor cortex is reduced by 59%. As a non-limiting example, the expression of HTT protein and mRNA in the motor cortex is reduced by 60%.

[1032] In one embodiment, the siRNA duplexes or encoded dsRNA may be used to reduce the expression of HTT protein and/or mRNA in the somatosensory cortex. The expression of HTT protein and/or mRNA is reduced by at least about 30%, 31%, 32%, 33%, 34%, 35%, 36%, 37%, 38%, 39%, 40%, 41%, 42%, 43%, 44%, 45%, 46%, 47%, 48%, 49%, 50%, 51%, 52%, 53%, 54%, 55%, 56%, 57%, 58%, 59%, 60%, 61%, 62%, 63%, 64%, 65%, 66%, 67%, 68%, 69%, 70%, 71%, 72%, 73%, 74%, 75%, 76%, 77%, 78%, 79%, 80%, 85%, 90%, 95% and 100%, or at least 20-30%, 20-40%, 20-50%, 20-60%, 20-70%, 20-80%, 20-90%, 20-95%, 20-100%, 30-40%, 30-50%, 30-60%, 30-70%, 30-80%, 30-90%, 30-95%, 30-100%, 40-50%, 40-60%, 40-70%, 40-80%, 40-90%, 40-95%, 40-100%, 50-60%, 50-70%, 50-80%, 50-90%, 50-95%, 50-100%, 60-70%, 60-80%, 60-90%, 60-95%, 60-100%, 70-80%, 70-90%, 70-95%, 70-100%, 80-90%, 80-95%, 80-100%, 90-95%, 90-100% or 95-100%. As a non-limiting example, the expression of HT protein and mRNA in the somatosensory cortex is reduced by 40-50%. As a non-limiting example, the expression of HT protein and mRNA in the somatosensory cortex is reduced by 30-70%. As a non-limiting example, the expression of HTT protein and mRNA in the somatosensory cortex is reduced by at least 30%. As a non-limiting example, the expression of HTT protein and mRNA in the somatosensory cortex is reduced by 40-70%. As a non-limiting example, the expression of HTT protein and mRNA in the somatosensory cortex is reduced by 40-50%. As a non-limiting example, the expression of HTT protein and mRNA in the somatosensory cortex is reduced by 50-70%. As a non-limiting example, the expression of HTT protein and mRNA in the somatosensory cortex is reduced by 50-60%. As a non-limiting example, the expression of HTT protein and mRNA in the somatosensory cortex is reduced by 50%. As a non-limiting example, the expression of HTT protein and mRNA in the somatosensory cortex is reduced by 51%. As a non-limiting example, the expression of HTT protein and mRNA in the somatosensory cortex is reduced by 52%. As a non-limiting example, the expression of HTT protein and mRNA in the somatosensory cortex is reduced by 53%. As a non-limiting example, the expression of HTT protein and mRNA in the somatosensory cortex is reduced by 54%. As a non-limiting example, the expression of HTT protein and mRNA in the somatosensory cortex is reduced by 55%. As a non-limiting example, the expression of HTT protein and mRNA in the somatosensory cortex is reduced by 56%. As a non-limiting example, the expression of HTT protein and mRNA in the somatosensory cortex is reduced by 57%. As a non-limiting example, the expression of HTT protein and mRNA in the somatosensory cortex is reduced by 58%. As a non-limiting example, the expression of HT protein and mRNA in the somatosensory cortex is reduced by 59%. As a non-limiting example, the expression of HTT protein and mRNA in the somatosensory cortex is reduced by 60%.

[1033] In one embodiment, the siRNA duplexes or encoded dsRNA may be used to reduce the expression of HTT protein and/or mRNA in the temporal cortex. The expression of HTT protein and/or mRNA is reduced by at least about 30%, 31%, 32%, 33%, 34%, 35%, 36%, 37%, 38%, 39%, 40%, 41%, 42%, 43%, 44%, 45%, 46%, 47%, 48%, 49%, 50%, 51%, 52%, 53%, 54%, 55%, 56%, 57%, 58%, 59%, 60%, 61%, 62%, 63%, 64%, 65%, 66%, 67%, 68%, 69%, 70%, 71%, 72%, 73%, 74%, 75%, 76%, 77%, 78%, 79%, 80%, 85%, 90%, 95% and 100%, or at least 20-30%, 20-40%, 20-50%, 20-60%, 20-70%, 20-80%, 20-90%, 20-95%, 20-100%, 30-40%, 30-50%, 30-60%, 30-70%, 30-80%, 30-90%, 30-95%, 30-100%, 40-50%, 40-60%, 40-70%, 40-80%, 40-90%, 40-95%, 40-100%, 50-60%, 50-70%, 50-80%, 50-90%, 50-95%, 50-100%, 60-70%, 60-80%, 60-90%, 60-95%, 60-100%, 70-80%, 70-90%, 70-95%, 70-100%, 80-90%, 80-95%, 80-100%, 90-95%, 90-100% or 95-100%. As a non-limiting example, the expression of HTT protein and mRNA in the temporal cortex is reduced by 40-50%. As a non-limiting example, the expression of HTT protein and mRNA in the temporal cortex is reduced by 30-70%. As a non-limiting example, the expression of HTT protein and mRNA in the temporal cortex is reduced by at least 30%. As a non-limiting example, the expression of HTT protein and mRNA in the temporal cortex is reduced by 40-70%. As a non-limiting example, the expression of HT protein and mRNA in the temporal cortex is reduced by 40-50%. As a non-limiting example, the expression of HTT protein and mRNA in the temporal cortex is reduced by 50-70%. As a non-limiting example, the expression of HTT protein and mRNA in the temporal cortex is reduced by 50-60%. As a non-limiting example, the expression of HTT protein and mRNA in the temporal cortex is reduced by 50%. As a non-limiting example, the expression of HTT protein and mRNA in the temporal cortex is reduced by 51%. As a non-limiting example, the expression of HTT protein and mRNA in the temporal cortex is reduced by 52%. As a non-limiting example, the expression of HTT protein and mRNA in the temporal cortex is reduced by 53%. As a non-limiting example, the expression of HT protein and mRNA in the temporal cortex is reduced by 54%. As a non-limiting example, the expression of HTT protein and mRNA in the temporal cortex is reduced by 55%. As a non-limiting example, the expression of HTT protein and mRNA in the temporal cortex is reduced by 56%. As a non-limiting example, the expression of HT protein and mRNA in the temporal cortex is reduced by 57%. As a non-limiting example, the expression of HTT protein and mRNA in the temporal cortex is reduced by 58%. As a non-limiting example, the expression of HTT protein and mRNA in the temporal cortex is reduced by 59%. As a non-limiting example, the expression of HTT protein and mRNA in the temporal cortex is reduced by 60%.

[1034] In one embodiment, the siRNA duplexes or encoded dsRNA may be used to reduce the expression of HTT protein and/or mRNA in the putamen. The expression of HTT protein and/or mRNA is reduced by at least about 30%, 31%, 32%, 33%, 34%, 35%, 36%, 37%, 38%, 39%, 40%, 41%, 42%, 43%, 44%, 45%, 46%, 47%, 48%, 49%, 50%, 51%, 52%, 53%, 54%, 55%, 56%, 57%, 58%, 59%, 60%, 61%, 62%, 63%, 64%, 65%, 66%, 67%, 68%, 69%, 70%, 71%, 72%, 73%, 74%, 75%, 76%, 77%, 78%, 79%, 80%, 85%, 90%, 95% and 100%, or at least 20-30%, 20-40%, 20-50%, 20-60%, 20-70%, 20-80%, 20-90%, 20-95%, 20-100%, 30-40%, 30-50%, 30-60%, 30-70%, 30-80%, 30-90%, 30-95%, 30-100%, 40-50%, 40-60%, 40-70%, 40-80%, 40-90%, 40-95%, 40-100%, 50-60%, 50-70%, 50-80%, 50-90%, 50-95%, 50-100%, 55-60%, 55-70%, 55-80%, 55-90%, 55-95%, 55-100%, 60-70%, 60-80%, 60-90%, 60-95%, 60-100%, 70-80%, 70-90%, 70-95%, 70-100%, 80-90%, 80-95%, 80-100%, 90-95%, 90-100% or 95-100% in at least one region of the CNS. As a non-limiting example, the expression of HTT protein and mRNA in the putamen is reduced by 40-70%. As a non-limiting example, the expression of HT protein and mRNA in the putamen is reduced by 40-50%. As a non-limiting example, the expression of HTT protein and mRNA in the putamen is reduced by 50-70%. As a non-limiting example, the expression of HTT protein and mRNA in the putamen is reduced by 50-60%. As a non-limiting example, the expression of HTT protein and mRNA in the putamen is reduced by 50%. As a non-limiting example, the expression of HTT protein and mRNA in the putamen is reduced by 51%. As a non-limiting example, the expression of HTT protein and mRNA in the putamen is reduced by 52%. As a non-limiting example, the expression of HTT protein and mRNA in the putamen is reduced by 53%. As a non-limiting example, the expression of HTT protein and mRNA in the putamen is reduced by 54%. As a non-limiting example, the expression of HTT protein and mRNA in the putamen is reduced by 55%. As a non-limiting example, the expression of HTT protein and mRNA in the putamen is reduced by 56%. As a non-limiting example, the expression of HTT protein and mRNA in the putamen is reduced by 57%. As a non-limiting example, the expression of HTT protein and mRNA in the putamen is reduced by 58%. As a non-limiting example, the expression of HTT protein and mRNA in the putamen is reduced by 59%. As a non-limiting example, the expression of HTT protein and mRNA in the putamen is reduced by 60%.

### Solo and Combination Therapy

[1035] In some embodiments, the present composition is administered as a solo therapeutic or combination therapeutics for the treatment of HD.

[1036] In some embodiments, the pharmaceutical composition of the present invention is used as a solo therapy. In other embodiments, the pharmaceutical composition of the present invention is used in combination therapy. The combination therapy may be in combination with one or more neuroprotective agents such as small molecule compounds, growth factors and hormones which have been tested for their neuroprotective effect on neuron degeneration.

[1037] The AAV particles encoding siRNA duplexes targeting the HTT gene may be used in combination with one or more other therapeutic agents. By “in combination with,” it is not intended to imply that the agents must be administered at the same time and/or formulated for delivery together, although these methods of delivery are within the scope of the present disclosure. Compositions can be administered concurrently with, prior to, or subsequent to, one or more other desired therapeutics or medical procedures. In general, each agent will be administered at a dose and/or on a time schedule determined for that agent.

[1038] Therapeutic agents that may be used in combination with the AAV particles encoding the nucleic acid sequence for the siRNA molecules of the present invention can be small molecule compounds which are antioxidants, anti-inflammatory agents, anti-apoptosis agents, calcium regulators, antiglutamatergic agents, structural protein inhibitors, compounds involved in muscle function, and compounds involved in metal ion regulation.

[1039] Compounds tested for treating HD which may be used in combination with the vectors described herein include, but are not limited to, dopamine-depleting agents (e.g., tetrabenazine for chorea), benzodiazepines (e.g., clonazepam for myoclonus, chorea, dystonia, rigidity, and/or spasticity), anticonvulsants (e.g., sodium valproate and levetiracetam for myoclonus), amino acid precursors of dopamine (e.g., levodopa for rigidity which is particularly associate with juvenile HD or young adult-onset parkinsonian phenotype), skeletal muscle relaxants (e.g., baclofen, tizanidine for rigidity and/or spasticity), inhibitors for acetycholine release at the neuromuscular junction to cause muscle paralysis (e.g., botulinum toxin for bruxism and/or dystonia), atypical neuroleptics (e.g., olanzapine and quetiapine for psychosis and/or irritability, risperidone, sulpiride and haloperidol for psychosis, chorea and/or irritability, clozapine for treatment-resistant psychosis, aripiprazole for psychosis with prominent negative symptoms), agents to increase ATP/cellular energetics (e.g., creatine), selective scrotonin reuptake inhibitors (SSRIs) (e.g., citalopram, fluoxetine, paroxetine, sertraline, mirtazapine, venlafaxine for depression, anxiety, obsessive compulsive behavior and/or irritability), hypnotics (e.g., xopiclone and/or zolpidem for altered sleep-wake cycle), anticonvulsants (e.g., sodium valproate and carbamazepine for mania or hypomania) and mood stabilizers (e.g., lithium for mania or hypomania).

[1040] Neurotrophic factors may be used in combination therapy with the AAV particles encoding the nucleic acid sequence for the siRNA molecules of the present invention for treating HD. Generally, a neurotrophic factor is defined as a substance that promotes survival, growth, differentiation, proliferation and/or maturation of a neuron, or stimulates increased activity of a neuron. In some embodiments, the present methods further comprise delivery of one or more trophic factors into the subject in need of treatment. Trophic factors may include, but are not limited to, IGF-I, GDNF, BDNF, CTNF, VEGF, Colivelin, Xaliproden, Thyrotrophin-releasing hormone and ADNF, and variants thereof.

[1041] In one aspect, the AAV particles comprising modulatory polynucleotides encoding the siRNA duplex targeting the HTT gene may be co-administered with AAV particles expressing neurotrophic factors such as AAV-IGF-I (See e.g., Vincent t al., Neuromolecular medicine, 2004, 6, 79-85; the content of which is incorporated herein by reference in its entirety) and AAV-GDNF (See e.g., Wang et al., J Neurosci., 2002, 22, 6920-6928; the content of which is incorporated herein by reference in its entirety).

### Amyotrophic Lateral Sclerosis (ALS)

### Amyotrophic Lateral Sclerosis (ALS)

[1042] Amyotrophic lateral sclerosis (ALS), an adult-onset neurodegenerative disorder, is a progressive and fatal disease characterized by the selective death of motor neurons in the motor cortex, brainstem and spinal cord. The incidence of ALS is about 1.9 per 100,000. Patients diagnosed with ALS develop a progressive muscle phenotype characterized by spasticity, hyperreflexia or hyporeflexia, fasciculations, muscle atrophy and paralysis. These motor impairments are caused by the denervation of muscles due to the loss of motor neurons. The major pathological features of ALS include degeneration of the corticospinal tracts and extensive loss of lower motor neurons (LMNs) or anterior horn cells (Ghatak et al., J Neuropathol Exp Neurol., 1986, 45, 385-395), degeneration and loss of Betz cells and other pyramidal cells in the primary motor cortex (Udaka et al., Acta Neuropathol, 1986, 70, 289-295; Mackawa et al., Brain, 2004, 127, 1237-1251) and reactive gliosis in the motor cortex and spinal cord (Kawamata et al., Am J Pathol., 1992, 140,691-707; and Schiffer et al., J Neurol Sci., 1996, 139, 27-33), ALS is usually fatal within 3 to 5 years after the diagnosis due to respiratory defects and/or inflammation (Rowland L P and Shneibder N A, N Engl. J. Med., 2001, 344, 1688-1700).

[1043] A cellular hallmark of ALS is the presence of proteinaceous, ubiquitinated, cytoplasmic inclusions in degenerating motor neurons and surrounding cells (e.g., astrocytes). Ubiquitinated inclusions (i.e., Lewy body-like inclusions or Skein-like inclusions) are the most common and specific type of inclusion in ALS and are found in LMNs of the spinal cord and brainstem, and in corticospinal upper motor neurons (UMNs) (Matsumoto et al., J Neurol Sci., 1993, 115, 208-213; and Sasak and Maruyama. Acta Neuropathol., 1994, 87, 578-585). A few proteins have been identified to be components of the inclusions, including ubiquitin. Cu/Zn superoxide dismutase 1 (SOD1), peripherin and Dorfin. Neurofilamentous inclusions are often found in hyaline conglomerate inclusions (HCIs) and axonal ‘spheroids’ in spinal cord motor neurons in ALS. Other types and less specific inclusions include Bunina bodies (cystatin C-containing inclusions) and Crescent shaped inclusions (SCIs) in upper layers of the cortex. Other neuropathological features seen in ALS include fragmentation of the Golgi apparatus, mitochondrial vacuolization and ultrastructural abnormalities of synaptic terminals (Fujita et al., Acta Neuropathol. 2002, 103, 243-247).

[1044] In addition, in frontotemporal dementia ALS (FTD-ALS) cortical atrophy (including the frontal and temporal lobes) is also observed, which may cause cognitive impairment in FTD-ALS patients.

[1045] ALS is a complex and multifactorial disease and multiple mechanisms hypothesized as responsible for ALS pathogenesis include, but are not limited to, dysfunction of protein degradation, glutamate excitotoxicity, mitochondrial dysfunction, apoptosis, oxidative stress, inflammation, protein misfolding and aggregation, aberrant RNA metabolism, and altered gene expression.

[1046] About 10%-15% of ALS cases have family history of the disease, and these patients are referred to as familial ALS (fALS) or inherited patients, commonly with a Mendelian dominant mode of inheritance and high penetrance. The remainder (approximately 85%-95%) is classified as sporadic ALS (sALS), as they are not associated with a documented family history, but instead are thought to be due to other risk factors including, but not limited to environmental factors, genetic polymorphisms, somatic mutations, and possibly gene-environmental interactions. In most cases, familial (or inherited) ALS is inherited as autosomal dominant disease, but pedigrees with autosomal recessive and X-linked inheritance and incomplete penetrance exist. Sporadic and familial forms are clinically indistinguishable suggesting a common pathogenesis. The precise cause of the selective death of motor neurons in ALS remains elusive. Progress in understanding the genetic factors in fALS may shed light on both forms of the disease.

[1047] 1 Recently, an explosion to genetic causes of ALS has discovered mutations in more than 10 different genes that are known to cause fALS. The most common ones are found in the genes encoding Cu/Zn superoxide dismutase 1 (SOD1; ˜20%) (Rosen D R et al., Nature, 1993, 362, 59-62), fused in sarcoma/translated in liposarcoma (FUS/TLS; 1-5%) and TDP-43 (TARDBP; 1-5%). Recently, a hexanucleotide repeat expansion (GGGGCC)ₙ in the C9orF72 gene was identified as the most frequent cause of fALS (˜40%) in the Western population (reviewed by Renton et al., Nat. Neurosci., 2014, 17, 17-23). Other genes mutated in ALS include alsin (ALS2), senataxin (SETX), vesicle-associated membrane protein (VAPB), and angiogenin (ANG), fALS genes control different cellular mechanisms, suggesting that the pathogenesis of ALS is complicated and may be related to several different processes finally leading to motor neuron degeneration.

[1048] SOD1 is one of the three human superoxide dismutases identified and characterized in mammals: copper-zinc superoxide dismutase (Cu/ZnSOD or SOD1), manganese superoxide dismutase (MnSOD or SOD2), and extracellular superoxide dismutase (ECSOD or SOD3), SOD1 is a 32 kDa homodimer of a 153-residue polypeptide with one copper- and one zinc-binding site per subunit, which is encoded by the SOD1 gene (GeneBank access No.: NM_000454.4 SEQ ID NO: 1502) on human chromosome 21. SOD1 catalyzes the reaction of superoxide anion (O²⁻) into molecular oxygen (O₂) and hydrogen peroxide (H₂O₂) at a bound copper ion. The intracellular concentration of SOD1 is high (ranging from 10 to 100 μM), accounting for 1% of the total protein content in the central nervous system (CNS). The protein is localized not only in the cytoplasm but also in the nucleus, lysosomes, peroxisomes, and mitochondrial intermembrane spaces in eukaryotic cells (Lindenau J et al., Glia, 2000, 29, 25-34).

[1049] Mutations in the SOD1 gene are carried by 15-20% of fALS patients and by 1-2% of all ALS cases. Currently, at least 170 different mutations distributed throughout the 153-amino acid SOD1 polypeptide have been found to cause ALS, and an updated list can be found at the ALS online Genetic Database (ALSOD) (Wroe R et al., Amyotroph Lateral Scler., 2008, 9, 249-250). Table 46 lists some examples of mutations in SOD1 in ALS. These mutations are predominantly single amino acid substitutions (i.e. missense mutations) although deletions, insertions, and C-terminal truncations also occur. Different SOD1 mutations display different geographic distribution patterns. For instance, 40-50% of all Americans with ALS caused by SOD1 gene mutations have a particular mutation Ala4Val (or A4V). The A4V mutation is typically associated with more severe signs and symptoms and the survival period is typically 2-3 years. The I113T mutation is by far the most common mutation in the United Kingdom. The most prevalent mutation in Europe is D90A substitute and the survival period is usually greater than 10 years.

TABLE 46
Examples of SOD1 mutations in ALS

| Location | Mutations |
|---|---|
| Exon1 | Q22L; E21K, G; F20C; N19S; |
| (220 bp) | G16A, S; V14M, S; G12R; G10G, V, R; |
| | L8Q, V; V7E; C6G, F; V5L; A4T, V, S |
| Exon2 | T54R; E49K; H48R, Q; |
| (97 bp) | V47F, A; H46R; F45C; H43R; G41S, D; |
| | G37R; V29, insA |
| Exon3 | D76Y, V; G72S, C; L67R; |
| (70 bp) | P66A; N65S; S59I, S |
| Exon4 | D124G, V; |
| (118 bp) | V118L, InsAAAAC; L117V; T116T; |
| | R115G; G114A; I113T, F; I112M, T; |
| | G108V; L106V, F; S106L, delTCACTC; |
| | I104F; D101G, Y, H, N; E100G, K; I99V; |
| | V97L, M; D96N, V; A95T, V; |
| | G93S, V, A, C, R, D; D90V, A; A89T, V; |
| | T88delACTGCTGAC; V87A, M; |
| | N86I, S, D, K; G85R, S; L84V, F; H80R |
| Exon5 | I151T, S; I149T; V148I, G; |
| (461 bp) | G147D, R; C146R, stop; A145T, G; |
| | L144F, S; G141E, stop; A140A, G; |
| | N139D, K, H, N; G138E; T137R; |
| | S134N; E133V, delGAA, insTT; |
| | E132insTT; G127R, InsTGGG; |
| | L126S, delITT, stop; D126, delTT |

[1050] To investigate the mechanism of neuronal death associated with SOD1 gene defects, several rodent models of SOD1-linked ALS were developed in the art, which express the human SOD1 gene with different mutations, including missense mutations, small deletions or insertions. Non-limiting examples of ALS mouse models include SOD1^{G93A}, SOD1^{A4V}, SOD1^{G37R}, SOD1^{G85R}, SOD1^{D90A}, SOD1^{L84V}, SOD1^{I113T}, SOD1^{H36R/H48Q}, SOD1^{G127X}, SOD1^{L126X} and SOD1^{L126deITT}. There are two transgenic rat models carrying two different human SOD1 mutations: SOD1^{H46R} and SOD1^{G93R}. These rodent ALS models can develop muscle weakness similar to human ALS patients and other pathogenic features that reflect several characteristics of the human disease, in particular, the selective death of spinal motor neurons, aggregation of protein inclusions in motor neurons and microglial activation. It is well known in the art that the transgenic rodents are good models of human SOD1-associated ALS disease and provide models for studying disease pathogenesis and developing disease treatment.

[1051] Studies in animal and cellular models showed that SOD1 pathogenic variants cause ALS by gain of function. That is to say, the superoxide dismutase enzyme gains new but harmful properties when altered by SOD1 mutations. For example, some SOD1 mutated variants in ALS increase oxidative stress (e.g., increased accumulation of toxic superoxide radicals) by disrupting the redox cycle. Other studies also indicate that some SOD1 mutated variants in ALS might acquire toxic properties that are independent of its normal physiological function (such as abnormal aggregation of misfolded SOD1 variants. In the aberrant redox chemistry model, mutant SOD1 is unstable and through aberrant chemistry interacts with nonconventional substrates causing overproduction of reactive oxygen species (ROS). In the protein toxicity model, unstable, misfolded SOD1 aggregates into cytoplasmic inclusion bodies, sequestering proteins crucial for cellular processes. These two hypotheses are not mutually exclusive. It has been shown that oxidation of selected histidine residues that bind metals in the active site mediates SOD1 aggregation.

[1052] The aggregated mutant SOD1 protein may also induce mitochondrial dysfunction (Vehvilainen P et al., Front Cell Neurosci., 2014, 8, 126), impairment of axonal transport, aberrant RNA metabolism, glial cell pathology and glutamate excitotoxicity. In some sporadic ALS cases, misfolded wild-type SOD1 protein is found in diseased motor neurons which forms a “toxic conformation” that is similar to that which is seen with familial ALS-linked SOD1 variants (Rotunno M S and Bosco D A, Front Cell Neurosci., 2013, 16, 7, 253). Such evidence suggests that ALS is a protein folding diseases analogous to other neurodegenerative diseases such as Alzheimer's disease and Parkinson's disease.

[1053] Currently, no curative treatments are available for patients suffering from ALS. The only FDA approved drug Riluzole, an inhibitor of glutamate release, has a moderate effect on ALS, only extending survival by 2-3 months if it is taken for 18 months. Unfortunately, patients taking riluzole do not experience any slowing in disease progression or improvement in muscle function. Therefore, riluzole does not present a cure, or even an effective treatment. Researchers continue to search for better therapeutic agents.

[1054] Therapeutic approaches that may prevent or ameliorate SOD1 aggregation have been tested previously. For example, arimoclomol, a hydroxylamine derivative, is a drug that targets heat shock proteins, which are cellular defense mechanisms against these aggregates. Studies demonstrated that treatment with arimoclomol improved muscle function in SOD1 mouse models. Other drugs that target one or more cellular defects in ALS may include AMPA antagonists such as talampanel, beta-lactam antibiotics, which may reduce glutamate-induced excitotoxicity to motor neurons; Bromocriptine that may inhibit oxidative induced motor neuron death (e.g. U.S. Patent publication No. 20110105517; the content of which is incorporated herein by reference in its entirety); 1,3-diphenylurea derivative or multikinase inhibitor which may reduce SOD1 gene expression (e.g., U.S. Patent Publication No. 20130225642; the content of which is incorporated herein by reference in its entirety); dopamine agonist pramipexole and its anantiomer dexpramipexole, which may ameliorate the oxidative response in mitochondria; nimesulide, which inhibits cyclooxygenase enzyme (e.g., U.S. Patent Publication No. 20060041022; the content of which is incorporated herein by reference in its entirety); drugs that act as free radical scavengers (e.g. U.S. Pat. No. 6,933,310 and PCT Patent Publication No.: WO2006075434; the content of each of which is incorporated herein by reference in their entirety).

[1055] Another approach to inhibit abnormal SOD1 protein aggregation is to silence/inhibit SOD1 gene expression in ALS. It has been reported that small interfering RNAs for specific gene silencing of the mutated allele are therapeutically beneficial for the treatment of fALS (e.g., Ralgh G S et al., Nat. Medicine, 2005, 11(4), 429-433; and Raoul C et al., Nat. Medicine, 2005, 11(4), 423-428; and Maxwell M M et al., PNAS, 2004, 101(9), 3178-3183; and Ding H et al., Chinese Medical J., 2011, 124(1), 106-110; and Scharz D S et al., Plos Genet., 2006, 2(9), e140; the content of each of which is incorporated herein by reference in their entirety).

[1056] Many other RNA therapeutic agents that target the SOD1 gene and modulate SOD1 expression in ALS are taught in the art. Such RNA based agents include antisense oligonucleotides and double stranded small interfering RNAs. See, e.g., Wang H et al., J Biol. Chem., 2008, 283(23), 15845-15852); U.S. Pat. Nos. 7,498,316; 7,632,938; 7,678,895; 7,951,784; 7,977,314; 8,183,219; 8,309,533 and 8, 586, 554; and U.S. Patent publication Nos. 2006/0229268 and 2011/0263680; the content of each of which is herein incorporated by reference in their entirety.

[1057] The present invention provides AAV particles comprising modulatory polynucleotides comprising sequences encoding siRNA molecules targeting the SOD1 gene and methods for their design and manufacture. The AAV particles comprising the nucleic acid sequence encoding the siRNA molecules of the present invention may increase the delivery of active agents into motor neurons. The siRNA duplexes or encoding dsRNA targeting the SOD1 gene may be able to inhibit SOD1 gene expression (e.g., mRNA level) significantly inside cells; therefore, ameliorating SOD1 expression induced stress inside the cells such as aggregation of protein and formation of inclusions, increased free radicals, mitochondrial dysfunction and RNA metabolism.

[1058] Such siRNA mediated SOD1 expression inhibition may be used for treating ALS. According to the present invention, methods for treating and/or ameliorating ALS in a patient comprises administering to the patient an effective amount of AAV particle comprising a nucleic acid sequence encoding the siRNA molecules of the present invention into cells. The administration of the AAV particle comprising such a nucleic acid sequence will encode the siRNA molecules which cause the inhibition/silence of SOD1 gene expression.

[1059] In one embodiment, the AAV particle comprising the modulatory polynucleotide, reduce the expression of mutant SOD1 in a subject. The reduction of mutant SOD1 can also reduce the formation of toxic aggregates which can cause mechanisms of toxicity such as, but not limited to, oxidative stress, mitochondrial dysfunction, impaired axonal transport, aberrant RNA metabolism, glial cell pathology and/or glutamate excitotoxicity.

[1060] In one embodiment, the vector, e.g., AAV particles, reduces the amount of SOD in a subject in need thereof and thus provides a therapeutic benefit as described herein.

### Methods of Treatment of ALS

[1061] Provided in the present invention are methods for introducing the AAV particles comprising modulatory polynucleotides comprising sequences comprising a nucleic acid sequence encoding the siRNA molecules of the present invention into cells, the method comprising introducing into said cells any of the vectors in an amount sufficient for degradation of target SOD1 mRNA to occur, thereby activating target-specific RNAi in the cells. In some aspects, the cells may be stem cells, neurons such as motor neurons, muscle cells and glial cells such as astrocytes.

[1062] Disclosed in the present invention are methods for treating ALS associated with abnormal SOD1 function in a subject in need of treatment. The method optionally comprises administering to the subject a therapeutically effective amount of a composition comprising at least AAV particles comprising modulatory polynucleotides comprising a nucleic acid sequence encoding the siRNA molecules of the present invention. As a non-limiting example, the siRNA molecules can silence SOD1 gene expression, inhibit SOD1 protein production, and reduce one or more symptoms of ALS in the subject such that ALS is therapeutically treated.

[1063] In some embodiments, the composition comprising the AAV particles comprising modulatory polynucleotides comprising a nucleic acid sequence encoding the siRNA molecules of the present invention is administered to the central nervous system of the subject. In other embodiments, the composition comprising the AAV particles comprising modulatory polynucleotides comprising a nucleic acid sequence encoding the siRNA molecules of the present invention is administered to the muscles of the subject

[1064] In particular, the AAV particles comprising modulatory polynucleotides comprising a nucleic acid sequence encoding the siRNA molecules of the present invention may be delivered into specific types of targeted cells, including motor neurons; glial cells including oligodendrocyte, astrocyte and microglia; and/or other cells surrounding neurons such as T cells. Studies in human ALS patients and animal SOD1 ALS models implicate glial cells as playing an early role in the dysfunction and death of motor neurons. Normal SOD1 in the surrounding, protective glial cells can prevent the motor neurons from dying even though mutant SOD1 is present in motor neurons (e.g., reviewed by Philips and Rothstein, Exp. Neurol., 2014, May 22. pii: S0014-4886(14)00157-5; the content of which is incorporated herein by reference in its entirety),

[1065] In some specific embodiments, the AAV particles comprising modulatory polynucleotides comprising a nucleic acid sequence encoding the siRNA molecules of the present invention may be used as a therapy for ALS.

[1066] In some embodiments, the present composition is administered as a solo therapeutics or combination therapeutics for the treatment of ALS.

[1067] The AAV particles comprising modulatory polynucleotides comprising a nucleic acid sequence encoding the siRNA molecules targeting the SOD1 gene may be used in combination with one or more other therapeutic agents. By “in combination with,” it is not intended to imply that the agents must be administered at the same time and/or formulated for delivery together, although these methods of delivery are within the scope of the present disclosure. Compositions can be administered concurrently with, prior to, or subsequent to, one or more other desired therapeutics or medical procedures. In general, each agent will be administered at a dose and/or on a time schedule determined for that agent.

[1068] Therapeutic agents that may be used in combination with the AAV particles comprising modulatory polynucleotides comprising a nucleic acid sequence encoding the siRNA molecules of the present invention can be small molecule compounds which are antioxidants, anti-inflammatory agents, anti-apoptosis agents, calcium regulators, antiglutamatergic agents, structural protein inhibitors, and compounds involved in metal ion regulation.

[1069] Compounds tested for treating ALS which may be used in combination with the vectors described herein include, but are not limited to, antiglutamatergic agents: Riluzole, Topiramate, Talampanel, Lamotrigine, Dextromethorphan, Gabapentin and AMPA antagonist; Anti-apoptosis agents: Minocycline, Sodium phenylbutyrate and Arimoclomol; Anti-inflammatory agent: ganglioside, Celecoxib, Cyclosporine, Azathioprine, Cyclophosphamide, Plasmaphoresis, Glatiramer acetate and thalidomide; Ceftriaxone (Berry et al., Plos One, 2013, 8(4)); Beat-lactam antibiotics: Pramipexole (a dopamine agonist) (Wang et al., Amyotrophic Lateral Scler., 2008, 9(1), 50-58); Nimesulide in U.S. Patent Publication No. 20060074991; Diazoxide disclosed in U.S. Patent Publication No. 20130143873); pyrazolone derivatives disclosed in US Patent Publication No. 20080161378; free radical scavengers that inhibit oxidative stress-induced cell death, such as bromocriptine (US. Patent Publication No. 20110105517); phenyl carbamate compounds discussed in PCT Patent Publication No. 2013100571; neuroprotective compounds disclosed in U.S. Pat. Nos. 6,933,310 and 8,399,514 and US Patent Publication Nos. 20110237907 and 20140038927; and glycopeptides taught in U.S. Patent Publication No. 20070185012; the content of each of which is incorporated herein by reference in their entirety.

[1070] Therapeutic agents that may be used in combination therapy with the AAV particles comprising modulatory polynucleotides comprising a nucleic acid sequence encoding the siRNA molecules of the present invention may be hormones or variants that can protect neuronal loss, such as adrenocorticotropic hormone (ACTH) or fragments thereof (e.g., U.S. Patent Publication No. 20130259875); Estrogen (e.g., U.S. Pat. Nos. 6,334,998 and 6,592,845); the content of each of which is incorporated herein by reference in their entirety.

[1071] Neurotrophic factors may be used in combination therapy with the AAV particles comprising modulatory polynucleotides comprising a nucleic acid sequence encoding the siRNA molecules of the present invention for treating ALS. Generally, a neurotrophic factor is defined as a substance that promotes survival, growth, differentiation, proliferation and/or maturation of a neuron, or stimulates increased activity of a neuron. In some embodiments, the present methods further comprise delivery of one or more trophic factors into the subject in need of treatment. Trophic factors may include, but are not limited to, IGF-I, GDNF, BDNF, CTNF, VEGF, Colivelin, Xaliproden, Thyrotrophin-releasing hormone and ADNF, and variants thereof.

[1072] In one aspect, the vector, e.g., AAV particle, encoding the nucleic acid sequence for the at least one siRNA duplex targeting the SOD1 gene may be co-administered with AAV particles expressing neurotrophic factors such as AAV-IGF-I (Vincent et al., Neuromolecular medicine, 2004, 6, 79-85; the content of which is incorporated herein by reference in its entirety) and AAV-GDNF (Wang et al., J Neurosci., 2002, 22, 6920-6928; the content of which is incorporated herein by reference in its entirety).

[1073] In some embodiments, the composition of the present invention for treating ALS is administered to the subject in need intravenously, intramuscularly, subcutaneously, intraperitoneally, intrathecally and/or intraventricularly, allowing the siRNA molecules or vectors comprising the siRNA molecules to pass through one or both the blood-brain barrier and the blood spinal cord barrier. In some aspects, the method includes administering (e.g., intraventricularly administering and/or intrathecally administering) directly to the central nervous system (CNS) of a subject (using, e.g., an infusion pump and/or a delivery scaffold) a therapeutically effective amount of a composition comprising AAV particles comprising modulatory polynucleotides comprising a nucleic acid sequence encoding the siRNA molecules of the present invention. The vectors may be used to silence or suppress SOD1 gene expression, and/or reducing one or more symptoms of ALS in the subject such that ALS is therapeutically treated.

[1074] In certain aspects, the symptoms of ALS include, but are not limited to, motor neuron degeneration, muscle weakness, muscle atrophy, the stiffness of muscle, difficulty in breathing, slurred speech, fasciculation development, frontotemporal dementia and/or premature death are improved in the subject treated. In other aspects, the composition of the present invention is applied to one or both of the brain and the spinal cord. In other aspects, one or both of muscle coordination and muscle function are improved. In other aspects, the survival of the subject is prolonged.

[1075] In one embodiment, administration of the AAV particles comprising modulatory polynucleotides comprising a nucleic acid sequence encoding the siRNA molecules of the present invention, to a subject may lower mutant SOD1 in the CNS of a subject. In another embodiment, administration of the AAV particles, to a subject may lower wild-type SOD1 in the CNS of a subject. In yet another embodiment, administration of the AAV particles, to a subject may lower both mutant SOD1 and wild-type SOD1 in the CNS of a subject. The mutant and/or wild-type SOD1 may be lowered by about 30%, 40%, 50%, 60%, 70%, 80%, 85%, 90%, 95% and 100%, or at least 20-30%, 20-40%, 20-50%, 20-60%, 20-70%, 20-80%, 20-90%, 20-95%, 20-100%, 30-40%, 30-50%, 30-60%, 30-70%, 30-80%, 30-90%, 30-95%, 30-100%, 40-50%, 40-60%, 40-70%, 40-80%, 40-90%, 40-95%, 40-100%, 50-60%, 50-70%, 50-80%, 50-90%, 50-95%, 50-100%, 60-70%, 60-80%, 60-90%, 60-95%, 60-100%, 70-80%, 70-90%, 70-95%, 70-100%, 80-90%, 80-95%, 80-100%, 90-95%, 90-100% or 95-100% in the CNS, a region of the CNS, or a specific cell of the CNS of a subject. As a non-limiting example, the AAV particles may lower the expression of wild-type SOD1 by at least 50% in the motor neurons (e.g., ventral hom motor neurons) and/or astrocytes. As another non-limiting example, the AAV particles may lower the expression of mutant SOD1 by at least 50% in the motor neurons (e.g., ventral hom motor neurons) and/or astrocytes. As yet another non-limiting example, the AAV particles may lower the expression of wild-type SOD1 and mutant SOD1 by at least 50% in the motor neurons (e.g., ventral horn motor neurons) and/or astrocytes.

[1076] In one embodiment, administration of the AAV particles, to a subject will reduce the expression of mutant and/or wild-type SOD1 in the spinal cord and the reduction of expression of the mutant and/or wild-type SOD1 will reduce the effects of ALS in a subject.

[1077] In one embodiment, the AAV particles may be administered to a subject who is in the early stages of ALS. Early stage symptoms include, but are not limited to, muscles which are weak and soft or stiff, tight and spastic, cramping and twitching (fasciculations) of muscles, loss of muscle bulk (atrophy), fatigue, poor balance, slurred words, weak grip, and/or tripping when walking. The symptoms may be limited to a single body region or a mild symptom may affect more than one region. As a non-limiting example, administration of the AAV particles may reduce the severity and/or occurrence of the symptoms of ALS.

[1078] In one embodiment, the AAV particles may be administered to a subject who is in the middle stages of ALS. The middle stage of ALS includes, but is not limited to, more widespread muscle symptoms as compared to the early stage, some muscles are paralyzed while others are weakened or unaffected, continued muscle twitchings (fasciculations), unused muscles may cause contractures where the joints become rigid, painful and sometimes deformed, weakness in swallowing muscles may cause choking and greater difficulty eating and managing saliva, weakness in breathing muscles can cause respiratory insufficiency which can be prominent when lying down, and/or a subject may have bouts of uncontrolled and inappropriate laughing or crying (pseudobulbar affect). As a non-limiting example, administration of the AAV particles may reduce the severity and/or occurrence of the symptoms of ALS.

[1079] In one embodiment, the AAV particles may be administered to a subject who is in the late stages of ALS. The late stage of ALS includes, but is not limited to, voluntary muscles which are mostly paralyzed, the muscles that help move air in and out of the lungs are severely compromised, mobility is extremely limited, poor respiration may cause fatigue, fuzzy thinking, headaches and susceptibility to infection or diseases (e.g., pneumonia), speech is difficult and eating or drinking by mouth may not be possible.

[1080] In one embodiment, the AAV particles may be used to treat a subject with ALS who has a C9orf72 mutation.

[1081] In one embodiment, the AAV particles may be used to treat a subject with ALS who has TDP-43 mutations.

[1082] In one embodiment, the AAV particles may be used to treat a subject with ALS who has FUS mutations.

[1083] In one embodiment, the AAV particle of the present invention comprises an AAVrh10 capsid and a self-complementary AAV viral genome comprising an H1 promoter, a stuffer sequence originating from a pLKO.1 lentiviral vector and a SOD1 targeting payload.

[1084] In one embodiment, the AAV particle of the present invention comprises an AAV2 capsid and a self-complementary AAV viral genome.

[1085] In one embodiment, the AAV particle of the present invention comprises an AAV2 capsid and a self-complementary AAV viral genome comprising an H1 promoter, a stuffer sequence originating from a pLKO.1 lentiviral vector and a SOD1 targeting payload.

### V. Definitions

[1086] Unless stated otherwise, the following terms and phrases have the meanings described below. The definitions are not meant to be limiting in nature and serve to provide a clearer understanding of certain aspects of the present invention.

[1087] As used herein, the term “nucleic acid”, “polynucleotide” and ‘oligonucleotide” refer to any nucleic acid polymers composed of either polydeoxyribonucleotides (containing 2-deoxy-D-ribose), or polyribonucleotides (containing D-ribose), or any other type of polynucleotide which is an N glycoside of a purine or pyrimidine base, or modified purine or pyrimidine bases. There is no intended distinction in length between the term “nucleic acid”, “polynucleotide” and “oligonucleotide”, and these terms will be used interchangeably. These terms refer only to the primary structure of the molecule. Thus, these terms include double- and single-stranded DNA, as well as double- and single stranded RNA.

[1088] As used herein, the term “RNA” or “RNA molecule” or “ribonucleic acid molecule” refers to a polymer of ribonucleotides; the term “DNA” or “DNA molecule” or “deoxyribonucleic acid molecule” refers to a polymer of deoxyribonucleotides. DNA and RNA can be synthesized naturally, e.g., by DNA replication and transcription of DNA, respectively; or be chemically synthesized. DNA and RNA can be single-stranded (i.e., ssRNA or ssDNA, respectively) or multi-stranded (e.g., double stranded, i.e., dsRNA and dsDNA, respectively). The term “mRNA” or “messenger RNA”, as used herein, refers to a single stranded RNA that encodes the amino acid sequence of one or more polypeptide chains.

[1089] As used herein, the term “RNA interfering” or “RNAi” refers to a sequence specific regulatory mechanism mediated by RNA molecules which results in the inhibition or interfering or “silencing” of the expression of a corresponding protein-coding gene. RNAi has been observed in many types of organisms, including plants, animals and fungi. RNAi occurs in cells naturally to remove foreign RNAs (e.g., viral RNAs). Natural RNAi proceeds via fragments cleaved from free dsRNA which direct the degradative mechanism to other similar RNA sequences. RNAi is controlled by the RNA-induced silencing complex (RISC) and is initiated by short/small dsRNA molecules in cell cytoplasm, where they interact with the catalytic RISC component argonaute. The dsRNA molecules can be introduced into cells exogenously. Exogenous dsRNA initiates RNAi by activating the ribonuclease protein Dicer, which binds and cleaves dsRNAs to produce double-stranded fragments of 21-25 base pairs with a few unpaired overhang bases on each end. These short double stranded fragments are called small interfering RNAs (siRNAs).

[1090] As used herein, the terms “short interfering RNA,” “small interfering RNA” or “siRNA” refer to an RNA molecule (or RNA analog) comprising between about 5-60 nucleotides (or nucleotide analogs) which is capable of directing or mediating RNAi. Preferably, a siRNA molecule comprises between about 15-30 nucleotides or nucleotide analogs, such as between about 16-25 nucleotides (or nucleotide analogs), between about 18-23 nucleotides (or nucleotide analogs), between about 19-22 nucleotides (or nucleotide analogs) (e.g., 19, 20, 21 or 22 nucleotides or nucleotide analogs), between about 19-25 nucleotides (or nucleotide analogs), and between about 19-24 nucleotides (or nucleotide analogs). The term “short” siRNA refers to a siRNA comprising 5-23 nucleotides, preferably 21 nucleotides (or nucleotide analogs), for example, 19, 20, 21 or 22 nucleotides. The term “long” siRNA refers to a siRNA comprising 24-60 nucleotides, preferably about 24-25 nucleotides, for example, 23, 24, 25 or 26 nucleotides. Short siRNAs may, in some instances, include fewer than 19 nucleotides, e.g., 16, 17 or 18 nucleotides, or as few as 5 nucleotides, provided that the shorter siRNA retains the ability to mediate RNAi. Likewise, long siRNAs may, in some instances, include more than 26 nucleotides, e.g., 27, 28, 29, 30, 35, 40, 45, 50, 55, or even 60 nucleotides, provided that the longer siRNA retains the ability to mediate RNAi or translational repression absent further processing, e.g., enzymatic processing, to a short siRNA. siRNAs can be single stranded RNA molecules (ss-siRNAs) or double stranded RNA molecules (ds-siRNAs) comprising a sense strand and an antisense strand which hybridized to form a duplex structure called siRNA duplex.

[1091] As used herein, the term “the antisense strand” or “the first strand” or “the guide strand” of a siRNA molecule refers to a strand that is substantially complementary to a section of about 10-50 nucleotides, e.g., about 15-30, 16-25, 18-23 or 19-22 nucleotides of the mRNA of the gene targeted for silencing. The antisense strand or first strand has sequence sufficiently complementary to the desired target mRNA sequence to direct target-specific silencing, e.g., complementarity sufficient to trigger the destruction of the desired target mRNA by the RNAi machinery or process.

[1092] As used herein, the term “the sense strand” or “the second strand” or “the passenger strand” of a siRNA molecule refers to a strand that is complementary to the antisense strand or first strand. The antisense and sense strands of a siRNA molecule are hybridized to form a duplex structure. As used herein, a “siRNA duplex” includes a siRNA strand having sufficient complementarity to a section of about 10-50 nucleotides of the mRNA of the gene targeted for silencing and a siRNA strand having sufficient complementarity to form a duplex with the other siRNA strand.

[1093] As used herein, the term “complementary” refers to the ability of polynucleotides to form base pairs with one another. Base pairs are typically formed by hydrogen bonds between nucleotide units in antiparallel polynucleotide strands. Complementary polynucleotide strands can form base pair in the Watson-Crick manner (e.g., A to T, A to U, C to G), or in any other manner that allows for the formation of duplexes. As persons skilled in the art are aware, when using RNA as opposed to DNA, uracil rather than thymine is the base that is considered to be complementary to adenosine. However, when a U is denoted in the context of the present invention, the ability to substitute a T is implied, unless otherwise stated. Perfect complementarity or 100% complementarity refers to the situation in which each nucleotide unit of one polynucleotide strand can form hydrogen bond with a nucleotide unit of a second polynucleotide strand. Less than perfect complementarity refers to the situation in which some, but not all, nucleotide units of two strands can form hydrogen bond with each other. For example, for two 20-mers, if only two base pairs on each strand can form hydrogen bond with each other, the polynucleotide strands exhibit 10% complementarity. In the same example, if 18 base pairs on each strand can form hydrogen bonds with each other, the polynucleotide strands exhibit 90% complementarity.

[1094] As used herein, the term “substantially complementary” means that the siRNA has a sequence (e.g., in the antisense strand) which is sufficient to bind the desired target mRNA, and to trigger the RNA silencing of the target mRNA.

[1095] As used herein, “targeting” means the process of design and selection of nucleic acid sequence that will hybridize to a target nucleic acid and induce a desired effect.

[1096] The term “gene expression” refers to the process by which a nucleic acid sequence undergoes successful transcription and in most instances translation to produce a protein or peptide. For clarity, when reference is made to measurement of “gene expression”, this should be understood to mean that measurements may be of the nucleic acid product of transcription, e.g., RNA or mRNA or of the amino acid product of translation, e.g., polypeptides or peptides. Methods of measuring the amount or levels of RNA. mRNA, polypeptides and peptides are well known in the art.

[1097] As used herein, the term “mutation” refers to any changing of the structure of a gene, resulting in a variant (also called “mutant”) form that may be transmitted to subsequent generations. Mutations in a gene may be caused by the alternation of single base in DNA, or the deletion, insertion, or rearrangement of larger sections of genes or chromosomes.

[1098] As used herein, the term “vector” means any molecule or moiety which transports, transduces or otherwise acts as a carrier of a heterologous molecule such as the siRNA molecule of the invention. A “viral genome” or “vector genome” or “viral vector” refers to a sequence which comprises one or more polynucleotide regions encoding or comprising a molecule of interest, e.g., a transgene, a polynucleotide encoding a polypeptide or multi-polypeptide or a modulatory nucleic acid such as small interfering RNA (siRNA). Viral genomes are commonly used to deliver genetic materials into cells. Viral genomes are often modified for specific applications. Types of viral genome sequence include retroviral viral genome sequences, lentiviral viral genome sequences, adenoviral viral genome sequences and adeno-associated viral genome sequences.

[1099] The term “adeno-associated virus” or “AAV” as used herein refers to any vector which comprises or derives from components of an adeno-associated vector and is suitable to infect mammalian cells, preferably human cells. The term AAV vector typically designates an AAV type viral particle or virion comprising a payload. The AAV vector may be derived from various serotypes, including combinations of serotypes (i.e., “pseudotyped” AAV) or from various genomes (e.g., single stranded or self-complementary). In addition, the AAV vector may be replication defective and/or targeted.

[1100] As used herein, the phrase “inhibit expression of a gene” means to cause a reduction in the amount of an expression product of the gene. The expression product can be a RNA molecule transcribed from the gene (e.g., an mRNA) or a polypeptide translated from an mRNA transcribed from the gene. Typically a reduction in the level of an mRNA results in a reduction in the level of a polypeptide translated therefrom. The level of expression may be determined using standard techniques for measuring mRNA or protein.

[1101] As used herein, the term “in vitro” refers to events that occur in an artificial environment, e.g., in a test tube or reaction vessel, in cell culture, in a Petri dish, etc., rather than within an organism (e.g., animal, plant, or microbe),

[1102] As used herein, the term “in vivo” refers to events that occur within an organism (e.g., animal, plant, or microbe or cell or tissue thereof).

[1103] As used herein, the term “modified” refers to a changed state or structure of a molecule of the invention. Molecules may be modified in many ways including chemically, structurally, and functionally.

[1104] As used herein, the term “synthetic” means produced, prepared, and/or manufactured by the hand of man. Synthesis of polynucleotides or polypeptides or other molecules of the present invention may be chemical or enzymatic.

[1105] As used herein, the term “transfection” refers to methods to introduce exogenous nucleic acids into a cell. Methods of transfection include, but are not limited to, chemical methods, physical treatments and cationic lipids or mixtures. The list of agents that can be transfected into a cell is large and includes, but is not limited to, siRNA, sense and/or anti-sense sequences, DNA encoding one or more genes and organized into an expression plasmid, proteins, protein fragments, and more.

[1106] As used herein, “off target” refers to any unintended effect on any one or more target, gene, or cellular transcript.

[1107] As used herein, the phrase “pharmaceutically acceptable” is employed herein to refer to those compounds, materials, compositions, and/or dosage forms which are, within the scope of sound medical judgment, suitable for use in contact with the tissues of human beings and animals without excessive toxicity, irritation, allergic response, or other problem or complication, commensurate with a reasonable benefit/risk ratio.

[1108] As used herein, the term “effective amount” of an agent is that amount sufficient to effect beneficial or desired results, for example, clinical results, and, as such, an “effective amount” depends upon the context in which it is being applied. For example, in the context of administering an agent that treats HD, an effective amount of an agent is, for example, an amount sufficient to achieve treatment, as defined herein, of HD, as compared to the response obtained without administration of the agent. For example, in the context of administering an agent that treats ALS, an effective amount of an agent is, for example, an amount sufficient to achieve treatment, as defined herein, of ALS, as compared to the response obtained without administration of the agent.

[1109] As used herein, the term “therapeutically effective amount” means an amount of an agent to be delivered (e.g., nucleic acid, drug, therapeutic agent, diagnostic agent, prophylactic agent, etc.) that is sufficient, when administered to a subject suffering from or susceptible to an infection, disease, disorder, and/or condition, to treat, improve symptoms of, diagnose, prevent, and/or delay the onset of the infection, disease, disorder, and/or condition.

[1110] As used herein, the term “subject” or “patient” refers to any organism to which a composition in accordance with the invention may be administered, e.g., for experimental, diagnostic, prophylactic, and/or therapeutic purposes. Typical subjects include animals (e.g., mammals such as mice, rats, rabbits, non-human primates such as chimpanzees and other apes and monkey species, and humans) and/or plants.

[1111] As used herein, the term “preventing” or “prevention” refers to delaying or forestalling the onset, development or progression of a condition or disease for a period of time, including weeks, months, or years.

[1112] The term “treatment” or “treating,” as used herein, refers to the application of one or more specific procedures used for the cure or amelioration of a disease. In certain embodiments, the specific procedure is the administration of one or more pharmaceutical agents. In the context of the present invention, the specific procedure is the administration of one or more siRNA molecules.

[1113] As used herein, the term “amelioration” or “ameliorating” refers to a lessening of severity of at least one indicator of a condition or disease. For example, in the context of neurodegeneration disorder, amelioration includes the reduction of neuron loss.

[1114] As used herein, the term “administering” refers to providing a pharmaceutical agent or composition to a subject.

[1115] As used herein, the term “neurodegeneration” refers to a pathologic state which results in neural cell death. A large number of neurological disorders share neurodegeneration as a common pathological state. For example, Alzheimer's disease, Parkinson's disease, Huntington's disease, and amyotrophic lateral sclerosis (ALS) all cause chronic neurodegeneration, which is characterized by a slow, progressive neural cell death over a period of several years, whereas acute neurodegeneration is characterized by a sudden onset of neural cell death as a result of ischemia, such as stroke, or trauma, such as traumatic brain injury, or as a result of axonal transection by demyelination or trauma caused, for example, by spinal cord injury or multiple sclerosis. In some neurological disorders, mainly one type of neuronal cell is degenerative, for example, medium spiny neuron degeneration in early HD.

### VI. Equivalents and Scope

[1116] Those skilled in the art will recognize, or be able to ascertain using no more than routine experimentation, many equivalents to the specific embodiments in accordance with the invention described herein. The scope of the present invention is not intended to be limited to the above Description, but rather is as set forth in the appended claims.

[1117] In the claims, articles such as “a,” “an,” and “the” may mean one or more than one unless indicated to the contrary or otherwise evident from the context. Claims or descriptions that include “or” between one or more members of a group are considered satisfied if one, more than one, or all of the group members are present in, employed in, or otherwise relevant to a given product or process unless indicated to the contrary or otherwise evident from the context. The invention includes embodiments in which exactly one member of the group is present in, employed in, or otherwise relevant to a given product or process. The invention includes embodiments in which more than one, or the entire group members are present in, employed in, or otherwise relevant to a given product or process.

[1118] It is also noted that the term “comprising” is intended to be open and permits but does not require the inclusion of additional elements or steps. When the term “comprising” is used herein, the term “consisting of” is thus also encompassed and disclosed.

[1119] Where ranges are given, endpoints are included. Furthermore, it is to be understood that unless otherwise indicated or otherwise evident from the context and understanding of one of ordinary skill in the art, values that are expressed as ranges can assume any specific value or subrange within the stated ranges in different embodiments of the invention, to the tenth of the unit of the lower limit of the range, unless the context clearly dictates otherwise.

[1120] In addition, it is to be understood that any particular embodiment of the present invention that falls within the prior art may be explicitly excluded from any one or more of the claims. Since such embodiments are deemed to be known to one of ordinary skill in the art, they may be excluded even if the exclusion is not set forth explicitly herein. Any particular embodiment of the compositions of the invention (e.g., any antibiotic, therapeutic or active ingredient; any method of production; any method of use; etc.) can be excluded from any one or more claims, for any reason, whether or not related to the existence of prior art.

[1121] It is to be understood that the words which have been used are words of description rather than limitation, and that changes may be made within the purview of the appended claims without departing from the true scope and spirit of the invention in its broader aspects.

[1122] While the present invention has been described at some length and with some particularity with respect to the several described embodiments, it is not intended that it should be limited to any such particulars or embodiments or any particular embodiment, but it is to be construed with references to the appended claims so as to provide the broadest possible interpretation of such claims in view of the prior art and, therefore, to effectively encompass the intended scope of the invention.

### VII. Examples

### Example 1, AAV-miRNA Expression Vectors

[1123] The constructs comprising the pri-miRNA cassettes containing guide strands targeting HTT and passenger strands were engineered into AAV-miRNA expression vectors (either ss or sc). The AAV-miRNA expression vector construct from ITR to ITR, recited 5′ to 3′, comprises an ITR (mutant or wild-type), a promoter comprising either a CMV (which includes an SV40 intron), U6, H1, CBA (which includes a CMVie enhancer, a CB promoter and an SV40 intron) or CAG promoter (which includes a CMVie enhancer, a CB promoter and a rabbit betaglobin intron), the pri-miRNA cassette, a rabbit globin polyA or human growth hormone and wild type ITR. In vitro and in vivo studies are performed to evaluate the pharmacological activity of the AAV-miRNA expression vectors.

### Example 2. In Vivo Studies of AAV-miRNA

### A. In Vivo Studies of Efficacy

[1124] Based on HTT suppression in YAC128 mice, guide to passenger ratio, and precision of 5′ end processing, selected AAV-miRNA expression vectors are packaged in AAV1 (either as ss or sc) with a CBA promoter (AAV1.CBA.iHtt), formulated in phosphate buffered saline (PBS) with 0.001% F-68 and administered to YAC128 mice to assess efficacy, AAV1 vectors are administered to YAC128 mice 7-12 weeks of age via bilateral intrastriatal infusion at a dose of approximately 1E10 to 3E10 vg in 5 uL over 10 minutes per hemisphere. A control group is treated with vehicle (PBS with 0.001% F-68). Following test article administration, behavioral tests including rotarod and Porsolt swim tests are performed at pre-determined time intervals, to assess efficacy. At a pre-determined day post-dosing, animals are euthanized, and striatum tissue punches are collected and snap-frozen. Tissue samples are homogenized and the total RNA is purified. The relative expression of HTT is determined by qRT-PCR. Housekeeping genes for normalization included mouse XPNPEP1. HTT is normalized to housekeeping gene expression, and then further normalized to the vehicle group. Samples are also used to quantify HTT protein.

B. In Vivo Study in NHP of HTT Suppression. Guide to Passenger Ratio and 5′ End Precision of Processing

[1125] Based on HTT suppression in YAC128 mice, guide to passenger ratio, and precision of 5′ end processing, selected AAV-miRNA expression vectors are packaged in AAV1 with a CBA promoter (AAV1.CBA.iHtt), formulated in phosphate buffered saline (PBS) with 0.001% F-68 and administered to non-human primates by intraparenchymal brain infusion. A control group is treated with vehicle (PBS with 0.001% F-68). The relative expression of HTT mRNA, guide to passenger ratio, and the precision of 5′ end processing is determined in various tissue samples at a pre-determined time post-dosing.

### Example 3. Activity of Polycistronic Constructs in HEK293T and HeLa Cells

[1126] The polycistronic miRNA expression vectors encoding VOYHTmiR-104.016 (SEQ ID NO: 1589) and VOYHTmiR-127.579 (SEQ ID NO: 1599) were packaged in AAV2, and infected into HEK293T cells and HeLa cells. For HEK293T, the cells were plated into 96-well plates (2.5E4 cells/well in 100 ul cell culture medium) and infected with polycistronic miRNA expression vectors. The HeLa cells were plated into 96-well plates (1E4 cells/well in 100 ul cell culture medium), 24 hours after infection, the cells were harvested for immediate cell lysis and measurement of luciferase activity or isolation of RNA for qRT-PCR.

### A. Activity of Polycistronic Constructs (125 pM and 250 pM)

[1127] The relative activity (relative luciferase) of the polycistronic constructs 48 hours after transfection at 125 pM and 250 pM was determined by luciferase activity for the HEK293T and HeLa cells. The relative activity was obtained by normalizing the renilla luciferase level to the internal control firefly luciferase level as determined by duo-luciferase assay.

[1128] The RLU for the polycistronic constructs and the description of the constructs tested are shown in Table 47. In Table 47, two modulatory polynucleotides were tested in each vector and the modulatory polynucleotides were in tandem. In the table, the vector encodes the A modulatory polynucleotide before the B modulatory polynucleotide.

[1129] For the HEK293T cells, the control had a RLU of 1 at 125 pM and 1.11 at 250 pM. The construct encoding one VOYHTmiR-104.016 modulatory polynucleotide (SEQ ID NO: 1589) transfected at 125 pM provided a RLU of 0.13 and at 250 pM provided a RLU of 0.14. The construct encoding the VOYHTmiR-127.579 modulatory polynucleotide (SEQ ID NO: 1599) transfected at 125 pM provided a RLU of 0.14 and at 250 pM provided a RLU of 0.14. When two vectors each encoding one of the two modulatory polynucleotides (VOYHTmiR-104.016 (SEQ ID NO: 1589]) and VOYHTmiR-127.579 (SEQ ID NO: 1599)) were transfected at the same time at 125 pM each, a RLU of 0.06 was seen.

[1130] For the HeLa cells, the control had a RLU of 1 at 125 pM and 0.99 at 250 pM. The construct encoding the VOYHTmiR-104.016 modulatory polynucleotide (SEQ ID NO: 1589) transfected at 125 pM provided a RLU of 0.26 and at 250 pM provided a RLU of 0.27. The construct encoding the VOYHTmiR-127.579 modulatory polynucleotide (SEQ ID NO: 1599) transfected at 125 pM provided a RLU of 0.20 and at 250 pM provided a RLU of 0.12. When two constructs each encoding one of the two modulatory polynucleotides (VOYHTmiR-104.016 (SEQ ID NO: 1589) and VOYHTmiR-127.579 (SEQ ID NO: 1599)) were transfected at the same time at 125 pM each, a RLU of 0.22 was seen.

TABLE 47
Polycistronic activity

| | Modulatory | | RLU | | | |
|---|---|---|---|---|---|---|
| Modulatory | Poly- | | HEK293T | | HeLa | |
| Polynucleotide | nucleotide | Sequence | 125 | 250 | 125 | 250 |
| Name | SEQ ID | Name | pM | pM | pM | pM |
| A: VOYHTmiR- | A: 1589 | VOYPC13 | 0.13 | 0.17 | 0.23 | 0.26 |
| 104.016 | B: 1589 | | | | | |
| B: VOYHTmiR- | | | | | | |
| 104.016 | | | | | | |
| A: VOYHTmiR- | A: 1599 | VOYPC14 | 0.05 | 0.06 | 0.08 | 0.09 |
| 127.579 | B: 1589 | | | | | |
| B: VOYHTmiR- | | | | | | |
| 104.016 | | | | | | |
| A: VOYHTmiR.- | A: 1589 | VOYPC15 | 0.05 | 0.06 | 0.16 | 0.17 |
| 104.016 | B: 1599 | | | | | |
| B: VOYHTmiR- | | | | | | |
| 127.579 | | | | | | |
| A: VOYHTmiR- | A: 1599 | VOYPC16 | 0.13 | 0.14 | 0.18 | 0.17 |
| 127.579 | B: 1599 | | | | | |
| B: VOYHTmiR- | | | | | | |
| 127.579 | | | | | | |

[1131] The vectors encoding both the VOYHTmiR-104.016 and VOYHTmiR-127.579 in tandem showed the best activity as compared to the controls.

### B. Activity of Polycistronic Constructs (62.5 pM and 125 pM) and Length of Vector

[1132] The relative activity (relative luciferase) of the polycistronic constructs with and without filler DNA (to make the total DNA content the same in each condition) 40 hours after transfection at 62.5 pM and 125 pM was determined by Duo-Luciferase assay for HeLa cells. The relative activity was obtained by normalizing the renilla luciferase level to the internal control firefly luciferase level as determined by duo-luciferase assay. The RLU for the polycistronic constructs and the description of the constructs tested are shown in Table 48. In Table 48, two modulatory polynucleotides were tested in each construct and the modulatory polynucleotides were in tandem. In the table, the construct encodes the A modulatory polynucleotide before the B modulatory polynucleotide.

[1133] For constructs with filler DNA, the control had a RLU of 1 at 62.5 pM and 125 pM. The constructs encoding the VOYHTmiR-104.016 modulatory polynucleotide (SEQ ID NO: 1589) transfected at 62.5 pM provided a RLU of 0.45 and at 125 pM provided a RLU of 0.31. The constructs encoding the VOYHTmiR-127.579 modulatory polynucleotide (SEQ ID NO: 1599) transfected at 62.5 pM provided a RLU of 0.25 and at 125 pM provided a RLU of 0.20. When two constructs each encoding one of the two modulatory polynucleotides (VOYHTmiR-104.016 (SEQ ID NO: 1589) and VOYHTmiR-127.579 (SEQ ID NO: 1599)) were transfected at the same time at 62.5 pM each, a RLU of 0.26 was seen.

[1134] For constructs without filler DNA, the control had a RLU of 1 at 62.5 pM and 125 pM. The constructs encoding the VOYHTmiR-104.016 modulatory polynucleotide (SEQ ID NO: 1589) transfected at 62.5 pM provided a RLU of 0.31 and at 125 pM provided a RLU of 0.24. The constructs encoding the VOYHTmiR-127.579 modulatory polynucleotide (SEQ ID NO: 1599) transfected at 62.5 pM provided a RLU of 0.29 and at 125 pM provided a RLU of 0.24. When two constructs each encoding one of the two modulatory polynucleotides (VOYHTmiR-104.016 (SEQ ID NO: 1589) and VOYHTmiR-127.579 (SEQ ID NO: 1599)) were transfected at the same time at 62.5 pM each, a RLU of 0.23 was seen.

TABLE 48
Polycistronic activity

| | | | RLU | | | |
|---|---|---|---|---|---|---|
| | | | With | | Without | |
| | Modulatory | | Filler | | Filler | |
| Modulatory | Poly- | | DNA | | DNA | |
| Polynucleotide | nucleotide | Sequence | 62.5 | 125 | 62.5 | 125 |
| Name | SEQ ID | Name | pM | pM | pM | pM |
| A: VOYHTmiR- | A: 1589 | VOYPC13 | 0.41 | 0.38 | 0.36 | 0.37 |
| 104.016 | B: 1589 | | | | | |
| B: VOYHTmiR- | | | | | | |
| 104.016 | | | | | | |
| A: VOYHTmiR- | A: 1599 | VOYPC14 | 0.17 | 0.15 | 0.16 | 0.15 |
| 127.579 | B: 1589 | | | | | |
| B: VOYHTmiR- | | | | | | |
| 104.016 | | | | | | |
| A: VOYHTmiR- | A: 1589 | VOYPC15 | 0.36 | 0.24 | 0.35 | 0.23 |
| 104.016 | B: 1599 | | | | | |
| B: VOYHTmiR- | | | | | | |
| 127.579 | | | | | | |
| A: VOYHTmiR- | A: 1599 | VOYPC16 | 0.30 | 0.23 | 0.29 | 0.23 |
| 127.579 | B: 1599 | | | | | |
| B: VOYHTmiR- | | | | | | |
| 127.579 | | | | | | |

[1135] Both the higher and lower dose of the constructs showed similar expression with and without the filler DNA. The constructs with the VOYHTmiR-127.579 and VOYHTmiR-104.016 modulatory polynucleotides in tandem showed the lowest RLU for both transfection conditions.

C. HTT Suppression after Transfection with Polycistronic Constructs

[1136] The relative expression of HTT mRNA 48 hours after transfection at a 125 pM or 250 pM was determined by qRT-PCR for HeLa. The relative HTT mRNA expression was obtained by normalizing the HTT mRNA level to the housekeeping gene mRNA level as determined by qRT-PCR this normalized HTT mRNA level was then expressed relative to the normalized HTT mRNA level in control treated cells. The results for the polycistronic constructs and the description of the constructs tested are shown in Table 49. In Table 49, two modulatory polynucleotides were tested in each construct and the modulatory polynucleotides were in tandem. In the table, the construct encodes the A modulatory polynucleotide before the B modulatory polynucleotide.

[1137] The constructs encoding the VOYHTmiR-104.016 modulatory polynucleotide (SEQ ID NO: 1589) transfected at 125 pM provided a relative Htt mRNA level (normalized to control) of 50% and at 250 pM provided a relative Htt mRNA level (normalized to control) of 61%. The constructs encoding the VOYHTmiR-127.579 modulatory polynucleotide (SEQ ID NO: 1599) transfected at 125 pM provided a relative Htt mRNA level (normalized to control) of 52% and at 250 pM provided a relative Htt mRNA level (normalized to control) of 56%. When two constructs each encoding one of the two modulatory polynucleotides (VOYHTmiR-104.016 (SEQ ID NO: 1589) and VOYHTmiR-127.579 (SEQ ID NO: 1599)) were transfected at the same time at 125 pM each, a relative Htt mRNA level (normalized to control) of 49% was seen.

TABLE 49
Knock-Down of HTT

| | | | Relative HTT | |
|---|---|---|---|---|
| | | | mRNA Level (%) | |
| | | | (normalized to | |
| Modulatory | Modulatory | | Control) | |
| Polynucleotide | polynucleotide | Sequence | HeLa | |
| Name | SEQ ID | Name | 1.25 pM | 250 pM |
| A: VOYHTmiR- | A: 1589 | VOYPC13 | 43 | 50 |
| 104.016 | B: 1589 | | | |
| B: VOYHTmiR- | | | | |
| 104.016 | | | | |
| A: VOYHTmiR- | A: 1599 | VOYPC14 | 43 | 36 |
| 127.579 | B: 1589 | | | |
| B: VOYHTmiR- | | | | |
| 104.016 | | | | |
| A: VOYHTmiR- | A: 1589 | VOYPC15 | 49 | 50 |
| 104.016 | B: 1599 | | | |
| B: VOYHTmiR- | | | | |
| 127.579 | | | | |
| A: VOYHTmiR- | A: 1599 | VOYPC16 | 55 | 50 |
| 127.579 | B: 1599 | | | |
| B: VOYHTmiR- | | | | |
| 127.579 | | | | |

[1138] The constructs encoding both the VOYHTmiR-104.016 and VOYHTmiR-127.579 in tandem showed the best activity as compared to the controls for both transfection conditions.

D. HTT Suppression after Infection at MOI of 1E4 and 1E5 vg/Cell

[1139] The relative expression of HTT mRNA 24 hours after infection at a MOI of 1E4 or 1E5 vg/cell was determined by qRT-PCR for HEK293T and HeLa cells. The relative HTT mRNA expression was obtained by normalizing the HTT mRNA level to the housekeeping gene mRNA level as determined by qRT-PCR; this normalized HTT mRNA level was then expressed relative to the normalized HTT mRNA level in mCherry-treated cells. The results are shown in Tables 50 and 51.

TABLE 50
Knock-Down of HTT

| | | Relative HTT mRNA | | | |
|---|---|---|---|---|---|
| | Modulatory | Level (%) (normalized to | | | |
| Modulatory | polynucleotide | Control) | | | |
| Polynucleotide | SEQ | HEK293T | | HeLa | |
| Name | ID | 1E4 | 1E5 | 1E4 | 1E5 |
| VOYHTmiR-104.016 | 1589 | 42 | 28 | 75 | 47 |
| VOYHTmiR-127.579 | 1599 | 44 | 29 | 67 | 45 |
| Construct 1: | Construct 1: 1589 | 35 | 27 | 67 | 46 |
| VOYHTmiR-104.016 | Construct 2: 1599 | | | | |
| Construct 2: | | | | | |
| VOYHTmiR-127.579 | | | | | |
| Untreated | — | 86 | 91 | 67 | 96 |

TABLE 51
Knock-Down of HTT

| | Mod- | | Relative HTT mRNA | | | |
|---|---|---|---|---|---|---|
| | ulatory | | Level (%) (normalized | | | |
| Modulatory | poly- | | to Control) | | | |
| Polynucleotide | nucleotide | Sequence | HEK293T | | HeLa | |
| Name | SEQ ID | Name | 1E4 | 1E5 | 1E4 | 1E5 |
| A: VOYHTmiR- | A: 1589 | VOYPC13 | 48 | 27 | 47 | 46 |
| 104.016 | B: 1589 | | | | | |
| B: VOYHTmiR- | | | | | | |
| 104.016 | | | | | | |
| A: VOYHTmiR- | A: 1599 | VOYPC14 | 32 | 22 | 46 | 28 |
| 127.579 | B: 1589 | | | | | |
| B: VOYHTmiR- | | | | | | |
| 104.016 | | | | | | |
| A: VOYHTmiR- | A: 1589 | VOYPC15 | 30 | 23 | 60 | 26 |
| 104.016 | B: 1599 | | | | | |
| B: VOYHTmiR- | | | | | | |
| 127.579 | | | | | | |
| A : VOYHTmiR- | A: 1599 | VOYPC16 | 39 | 28 | 67 | 34 |
| 127.579 | B: 1599 | | | | | |
| B: VOYHTmiR- | | | | | | |
| 177.579 | | | | | | |

[1140] The vectors encoding both the VOYHTmiR-104.016 and VOYHTmiR-127.579 in tandem showed the best activity as compared to the controls for both infection levels in both cell types.

### E. Activity of Polycistronic Constructs (62.5 pM and 125 pM)

[1141] The relative activity (relative luciferase) of the polycistronic constructs 48 hours after transfection at 62.5 pM and 125 pM was determined by duo-luciferase assay for the HEK293T and HeLa cells. The relative activity was obtained by normalizing the renilla luciferase level to the internal control firefly luciferase level as determined by duo-luciferase assay. The RLU for the polycistronic constructs and the description of the constructs tested are shown in Tables 52-53. In Table 53, two, three or four modulatory polynucleotides were tested in each construct and the modulatory polynucleotides were in tandem. For example, if there are two modulatory polynucleotides, the construct encodes the A modulatory polynucleotide before the B modulatory polynucleotide.

TABLE 52
Knock-Down of HTT

| Modulatory | Modulatory | RLU | | | |
|---|---|---|---|---|---|
| Polynucleotide | polynucleotide | HEK293T | | HEK293T | |
| Name | SEQ ID | 62.5 pM | 62.5 pM | 62.5 pM | 62.5 pM |
| VOYHTmiR-104.016 | 1589 | 0.24 | 0.2 | 0.59 | 0.3 |
| VOYHTmiR-127.579 | 1599 | 0.31 | 0.23 | 0.84 | 0.27 |
| Construct 1: | Construct 1: 1589 | 0.1 | 0.11 | 0.25 | 0.2 |
| VOYHTmiR-104.016 | Construct 2: 1599 | | | | |
| Construct 2: | | | | | |
| VOYHTmiR-127:579 | | | | | |
| Untreated | — | 0.24 | 0.2 | 0.59 | 0.3 |

TABLE 53
Polycistronic activity

| | Modulatory | | RLU | | | |
|---|---|---|---|---|---|---|
| Modulatory | poly- | | 293T | | HeLa | |
| Polynucleotide | nucleotide | Sequence | 62.5 | 125 | 62.5 | 125 |
| Name | SEQ ID | Name | pM | pM | pM | pM |
| A: VOYHTmiR- | A: 1599 | VOYPC14 | 0.11 | 0.09 | 0.26 | 0.11 |
| 127.579 | B: 1589 | | | | | |
| B: VOYHTmiR- | | | | | | |
| 104.016 | | | | | | |
| A: VOYHTmiR- | A: 1599 | VOYPC35 | 0.11 | 0.11 | 0.28 | 0.28 |
| 177.579 | B: 1589 | | | | | |
| B: VOYHTmiR- | C: 1589 | | | | | |
| 104.016 | | | | | | |
| C: VOYHTmiR- | | | | | | |
| 104.016 | | | | | | |
| A: VOYHTmiR- | A: 1599 | VOYPC36 | 0.07 | 0.07 | 0.16 | 0.10 |
| 127.579 | B: 1589 | | | | | |
| B: VOYHTmiR- | C: 1599 | | | | | |
| 104.016 | | | | | | |
| C: VOYHTmiR- | | | | | | |
| 127.579 | | | | | | |
| A: VOYHTmiR- | A: 1599 | VOYPC51 | 0.08 | 0.07 | 0.18 | 0.12 |
| 127.579 | B: 1589 | | | | | |
| B: VOYHTmiR- | C: 1599 | | | | | |
| 104.016 | D: 1589 | | | | | |
| C: VOYHTmiR- | | | | | | |
| 127.579 | | | | | | |
| D: VOYHTmiR- | | | | | | |
| 104.016 | | | | | | |
| A: VOYHTmiR- | A: 1599 | VOYPC52 | 0.07 | 0.07 | 0.16 | 0.10 |
| 127.579 | B: 1589 | | | | | |
| B: VOYHTmiR- | C: 1589 | | | | | |
| 104.016 | D: 1599 | | | | | |
| C: VOYHTmiR- | | | | | | |
| 104.016 | | | | | | |
| D: VOYHTmiR- | | | | | | |
| 127.579 | | | | | | |

[1142] The constructs encoding more than two modulatory polynucleotides gave the lowest RLU values for both transfection conditions in both cell types.

### Example 4. Activity of Polycistronic Constructs in HEK293T and HeLa Cells

[1143] The polycistronic miRNA expression constructs encoding VOYHTmiR-104.579 (SEQ ID NO: 1595) and VOYHTmiR-127.016 (SEQ ID NO: 1593) were packaged in scAAV2, and infected into HEK293T cells and HeLa cells. For HEK293T, the cells were plated into 96-well plates (2.5E4 cells/well in 100 ul cell culture medium) and infected with polycistronic miRNA expression vectors. The HeLa cells were plated into 96-well plates (1E4 cells/well in 100 ul cell culture medium), 24 hours after infection, the cells were harvested for immediate cell lysis and measurement of luciferase activity or isolation for qRT-PCR.

### A. Activity of Polycistronic Constructs (62.5 pM and 125 pM)

[1144] The relative activity (relative luciferase) of the polycistronic constructs 48 hours after transfection at 62.5 pM and 125 pM was determined by qRT-PCR for HEK293T and HeLa cells. The relative activity was obtained by normalizing the renilla luciferase level to the internal control firefly luciferase level as determined by duo-luciferase assay. The RLU for the polycistronic constructs and the description of the constructs tested are shown in Tables 54-55. In Table 55, two modulatory polynucleotides were tested in each construct and the modulatory polynucleotides were in tandem. In the table, the construct encodes the A modulatory polynucleotide before the B modulatory polynucleotide.

TABLE 54
Knock-Down of HTT

| Modulatory | Modulatory | RLU | | | |
|---|---|---|---|---|---|
| Polynucleotide | polynucleotide | HEK293T | | HeLa | |
| Name | SEQ ID | 62.5 pM | 125 pM | 62.5 pM | 125 pM |
| VOYHTmiR- | 1595 | 0.24 | 0.13 | 0.51 | 0.25 |
| 104.579 | | | | | |
| VOYHTmiR- | 1593 | 0.33 | 0.16 | 0.23 | 0.22 |
| 127.016 | | | | | |
| Construct 1: | Construct 1: | 0.07 | 0.06 | 0.08 | 0.12 |
| VOYHTmiR- | 1595 | | | | |
| 104.579 | Construct 2: | | | | |
| Construct 2: | 1593 | | | | |
| VOYHTmiR- | | | | | |
| 127.016 | | | | | |

TABLE 55
Polycistronic activity

| | Modulatory | | RLU | | | |
|---|---|---|---|---|---|---|
| Modulatory | poly- | | HEK293T | | HeLa | |
| Polynucleotide | nucleotide | Sequence | 62.5 | 125 | 62.5 | 125 |
| Name | SEQ ID | Name | pM | pM | pM | pM |
| A: VOYHTmiR- | A: 1599 | VOYPC14 | 0.12 | 0.09 | 0.19 | 0.27 |
| 127.579 | B: 1589 | | | | | |
| B: VOYHTmiR- | | | | | | |
| 104.016 | | | | | | |
| A: VOYHTmiR- | A: 1595 | VOYPC17 | 0.33 | 0.18 | 0.55 | 0.93 |
| 104.579 | B: 1595 | | | | | |
| B: VOYHTmiR- | | | | | | |
| 104.579 | | | | | | |
| A: VOYHTmiR- | A: 1593 | VOYPC18 | 0.21 | 0.15 | 0.16 | 0.21 |
| 127.016 | B: 1593 | | | | | |
| B: VOYHTmiR- | | | | | | |
| 127.016 | | | | | | |
| A: VOYHTmiR- | A: 1595 | VOYPC19 | 0.09 | 0.05 | 0.10 | 0.07 |
| 104.579 | B: 1593 | | | | | |
| B: VOYHTmiR- | | | | | | |
| 127.016 | | | | | | |
| A: VOYHTmiR- | A: 1593 | VOYPC20 | 0.07 | 0.04 | 0.09 | 0.09 |
| 127.016 | B: 1595 | | | | | |
| B: VOYHTmiR- | | | | | | |
| 104.579 | | | | | | |

[1145] The constructs with the VOYHTmiR-127.016 and VOYHTmiR-104.579 modulatory polynucleotides in tandem in any order showed the lowest RLU for both transfection conditions.

### B. Activity of Polycistronic Constructs (62.5 pM and 125 pM) in HeLa at 48 and 72 Hours

[1146] The relative expression of HTT mRNA 48 and 72 hours after transfection at 62.5 pM and 125 pM was determined by qRT-PCR for HeLa cells. The relative HTT mRNA expression was obtained by normalizing the HTT mRNA level to the housekeeping gene mRNA level as determined by qRT-PCR this normalized HTT mRNA level was then expressed relative to the normalized HTT mRNA level in mCherry-treated cells. The results and the description of the constructs tested are shown in Table 56-57. In Table 57, two modulatory polynucleotides were tested in each vector and the modulatory polynucleotides were in tandem. In the table, the vector encodes the A modulatory polynucleotide before the B modulatory polynucleotide.

TABLE 56
Knock-Down of HTT

| | | Relative HTT mRNA | |
|---|---|---|---|
| | | Level (%) (normalized | |
| Modulatory | Modulatoty | to Control) | |
| Polynucleotide | polynucleotide | 48 hours | |
| Name | SEQ ID | 62.5 pM | 125 pM |
| VOYHTmiR-104.579 | 1595 | 73 | 91 |
| VOYHTmiR-127.016 | 1593 | 52 | 51 |
| Construct 1: | Construct 1: | 43 | 23 |
| VOYHTmiR-104.579 | 1595 | | |
| Construct 2: | Construct 2: | | |
| VOYHTmiR-127.016 | 1593 | | |

TABLE 57
Knock-Down of HTT

| | | Polycistronic | Relative HTT mRNA | |
|---|---|---|---|---|
| | Modulatory | miRNA | Level (%) (normalized | |
| Modulatory | poly- | expression | to Control) | |
| Polynucleotide | nucleotide | vector SEQ | 62.5 pM | |
| Name | SEQ ID | ID | 48 Hours | 72 Hours |
| A: VOYHTmiR- | A: 1595 | VOYPC17 | 97 | 88 |
| 104.579 | B: 1595 | | | |
| B: VOYHTmiR- | | | | |
| 104.579 | | | | |
| A: VOYHTmiR- | A: 1593 | VOYPC18 | 36 | 39 |
| 127.016 | B: 1593 | | | |
| B: VOYHTmiR- | | | | |
| 127.016 | | | | |
| A: VOYHTmiR- | A: 1595 | VOYPC19 | 37 | 37 |
| 104.579 | B: 1593 | | | |
| B: VOYHTmiR- | | | | |
| 127.016 | | | | |
| A: VOYHTmiR- | A: 1593 | VOYPC20 | 49 | 51 |
| 127.016 | B: 1595 | | | |
| B: VOYHTmiR- | | | | |
| 104.579 | | | | |

[1147] The constructs with the VOYHTmiR-127.016 and VOYHTmiR-104.579 modulatory polynucleotides in tandem in any order showed the lowest relative Htt mRNA levels for both time points.

### Example 5. Activity of Polycistronic Constructs in HEK293T Cells

[1148] To determine relative activities for inhibiting the target gene, miRNA expression vectors encoding VOYHTmiR-104.016 (SEQ ID NO: 1589) and/or VOYHTmiR-127.579 (SEQ ID NO: 1599) singly or in various tandem combinations comprising two, three or four modulatory polynucleotides were constructed and either transfected into HEK293T cells as plasmids, or packaged in AAV2 and infected into HEK293T cells, and then target gene mRNA levels were measured.

A. Activity of Polycistronic Constructs with Up to 2 Modulatory Polynucleotides after Plasmid Transfection

[1149] HEK293T cells were plated into 96-well plates (2.5E4 cells/well in 100 ul cell culture medium) and co-transfected with miRNA expression plasmid (62.5 or 125 pM) and a dual-luciferase plasmid containing the firefly luciferase gene for normalization of transfection efficiency and the VOYHTmiR-104.016 and VOYHTmiR-127.579 target regions of the huntingtin (HTT) gene cloned downstream of the stop codon for the Renilla luciferase gene. At 24 or 36 hours after transfection, the relative activities of the polycistronic constructs for inhibiting the HTT target mRNA were determined by measuring the Renilla and firefly luciferase activities with the Dual-Glow™ Luciferase Assay System, and normalizing the Renilla luciferase activity to the internal control firefly luciferase activity. These normalized Renilla luciferase activities (RLU, relative light units) were then expressed relative to normalized Renilla luciferase activity (average set to 1) in HEK293T cells transfected with control plasmid (pcDNA) at the same concentration.

[1150] The relative RLU (mean±standard deviation) for the various constructs and the description of the constructs tested are shown in Table 58 for 24 and 36 hours after transfection. Two constructs, each encoding a single modulatory polynucleotide—either VOYHTmiR-104.016 (SEQ ID NO: 1589) or VOYHTmiR-127.579 (SEQ ID NO: 1599)-served as references for four constructs that each encoded two modulatory polynucleotides (VOYHTmiR-104.016 (SEQ ID NO: 1589) and/or VOYHTmiR-127.579 (SEQ ID NO: 1599)) in tandem, where each polynucleotide is driven by its own H1 promoter and followed by its own H1 terminator. In Table 58, the construct encodes the A modulatory polynucleotide before the B modulatory polynucleotide. N/A means not applicable.

TABLE 58
Polycistronic Activity After Transfection of HEK293T Cells

| | | | Relative | | Relative | |
|---|---|---|---|---|---|---|
| Modulatory | Modulatory | | RLU at | | RLU at | |
| Poly- | poly- | | 24 Hours | | 36 Hours | |
| nucleotide | nucleotide | Sequence | 62.5 | 125 | 62.5 | 125 |
| Name | SEQ ID | Name | pM | pM | pM | pM |
| Construct 1: | 1589 | N/A | 0.15 ± | 0.15 ± | 0.07 ± | 0.07 ± |
| VOYHTmiR- | (ITR to ITR | | 0.01 | 0.01 | 0.00 | 0.00 |
| 104.016 | sequence: | | | | | |
| | SEQ ID NO: | | | | | |
| | 2691) | | | | | |
| Construct 2: | 1599 | N/A | 0.15 ± | 0.14 ± | 0.08 ± | 0.07 ± |
| VOYHTmiR- | (ITR to ITR | | 0.02 | 0.01 | 0.00 | 0.00 |
| 127.579 | sequence: | | | | | |
| | SEQ ID NO: | | | | | |
| | 2690) | | | | | |
| Construct 1: | Constrict 1: | N/A | 0.11 ± | 0.09 ± | 0.03 ± | 0.03 ± |
| VOYHTmiR- | 1589 | | 0.01 | 0.01 | 0.00 | 0.00 |
| 104.016 | Construct 2: | | | | | |
| Construct 2: | 1599 | | | | | |
| VOYHTmiR- | | | | | | |
| 127.579 | | | | | | |
| A: | A: 1589 | VOYPC59 | 0.08 ± | 0.10 ± | 0.03 ± | 0.03 ± |
| VOYHTmiR- | B: 1589 | | 0.02 | 0.03 | 0.00 | 0.00 |
| 104.016 | | | | | | |
| B: | | | | | | |
| VOYHTmiR- | | | | | | |
| 104.016 | | | | | | |
| A: | A: 1599 | VOYPC61 | 0.08 ± | 0.08 ± | 0.03 ± | 0.03 ± |
| VOYHTmiR- | B: 1589 | | 0.02 | 0.02 | 0.00 | 0.00 |
| 127.579 | | | | | | |
| B: | | | | | | |
| VOYHTmiR- | | | | | | |
| 104.016 | | | | | | |
| A: | A: 1589 | VOYPC60 | 0.09 ± | 0.10 ± | 0.03 ± | 0.03 ± |
| VOYHTmiR- | B: 1599 | | 0.02 | 0.02 | 0.00 | 0.00 |
| 104.016 | | | | | | |
| B: | | | | | | |
| VOYHTmiR- | | | | | | |
| 127.579 | | | | | | |
| A: | A: 1599 | VOYPC62 | 0.15 ± | 0.13 ± | 0.07 ± | 0.07 ± |
| VOYHTmiR- | B: 1599 | | 0.03 | 0.02 | 0.00 | 0.00 |
| 127.579 | | | | | | |
| B: | | | | | | |
| VOYHTmiR- | | | | | | |
| 127.579 | | | | | | |

[1151] These results demonstrate that sequences VOYPC59, VOYPC60 and VOYPC61, each containing two modulatory polynucleotides in tandem (either two copies of VOYHTmiR-104.016 (SEQ ID NO: 1589), or a combination of one copy of VOYHTmiR-104.016 (SEQ ID NO: 1589) and one copy of VOYHTmiR-127.579 (SEQ ID NO: 1599)), provide more target lowering than the constructs containing a single modulatory polynucleotide (either VOYHTmiR-104.016 (SEQ ID NO: 1589) or VOYHTmiR-127.579 (SEQ ID NO: 1599)),

B. Activity of Polycistronic Constructs with Up to 4 Modulatory Polynucleotides after Infection with AAV

[1152] HEK293T cells were plated into 96-well plates (2.5E4 cells/well in 100 ul cell culture medium), and infected with miRNA expression vectors packaged in AAV2 at an MOI of 1×10³ vector genomes per cell, as well as transfected with a dual-luciferase plasmid containing the firefly luciferase gene for normalization of transfection efficiency and the VOYHTmiR-104.016 and VOYHTmiR-127.579 target regions of the HTT gene cloned downstream of the stop codon for the Renilla luciferase gene. At 48 hours after infection, the relative activities of the constructs for inhibiting the HTT target mRNA were determined by measuring the Renilla and firefly luciferase activities with the Dual-Glow™ Luciferase Assay System, and normalizing the Renilla luciferase activity to the internal control firefly luciferase activity. These normalized Renilla luciferase activities (RLU, relative light units) were then expressed relative to normalized Renilla luciferase activity (average set to 1) in HEK293T cells infected with control vector (AAV2.mCherry) at the same MOI, or uninfected HEK293T cells.

[1153] The relative RLU (mean±standard deviation) for the various constructs and the description of the constructs tested are shown in Table 59. Two AAV vectors, each encoding a single modulatory polynucleotide—either VOYHTmiR-104.016 (SEQ ID NO: 1589) or VOYHTmiR-127.579 (SEQ ID NO: 1599)—served as references for sixteen AAV vectors that contained two, three or four modulatory polynucleotides (VOYHTmiR-104.016 (SEQ ID NO: 1589) and/or VOYHTmiR-127.579 (SEQ ID NO: 1599)) in tandem, where each polynucleotide is driven by its own Pol III H1 promoter and followed by its own H1 terminator. In Table 59, the construct encodes the A modulatory polynucleotide before the B modulatory polynucleotide, which in turn is before the C modulatory polynucleotide, which in turn is before the D modulatory polynucleotide. N/A means not applicable.

TABLE 59
Polycistronic Activity After AAV Infection of HEK293T Cells

| Modulatory | Modulatory | | RLU |
|---|---|---|---|
| Polynucleotide | polynucleotide | Sequence | (Relative to |
| Name | SEQ ID | Name | Uninfected) |
| mCherry | N/A | N/A | 0.99 ± 0.02 |
| Uninfected | N/A | N/A | 1.00 ± 0.03 |
| VOYHTmiR-104.016 | 1589 | N/A | 0.25 ± 0.01 |
| | (ITR to ITR | | |
| | sequence: | | |
| | SEQ ID | | |
| | NO: 2691) | | |
| A: VOYHTmiR-104.016 | A: 1589 | VOYPC59 | 0.25 ± 0.01 |
| B: VOYHTmiR-104.016 | B: 1589 | | |
| A: VOYHTmiR-104.016 | A: 1589 | VOYPC33 | 0.21 ± 0.01 |
| B: VOYHTmiR-104.016 | B: 1589 | | |
| C: VOYHTmiR-104.016 | C: 1589 | | |
| A: VOYHTmiR-104.016 | A: 1589 | VOYPC47 | 0.19 ± 0.01 |
| B: VOYHTmiR-104.016 | B: 1589 | | |
| C: VOYHTmiR-104.016 | C: 1589 | | |
| D: VOYHTmiR-104.016 | D: 1589 | | |
| VOYHTmiR-127.579 | 1599 | N/A | 0.48 ± 0.01 |
| | (ITR to ITR | | |
| | sequence: | | |
| | SEQ ID | | |
| | NO: 2690) | | |
| A: VOYHTmiR-127.579 | A: 1599 | VOYPC62 | 0.42 ± 0.01 |
| B: VOYHTmiR-127.579 | B: 1599 | | |
| A: VOYHTmiR-127.579 | A: 1599 | VOYPC31 | 0.34 ± 0.03 |
| B: VOYHTmiR-127.579 | B: 1599 | | |
| C: VOYHTmiR-127.579 | C: 1599 | | |
| A: VOYHTmiR-127.579 | A: 1599 | VOYPC43 | 0.32 ± 0.02 |
| B: VOYHTmiR-127.579 | B: 1599 | | |
| C: VOYHTmiR-127.579 | C: 1599 | | |
| D: VOYHTmiR-127.579 | D: 1599 | | |
| A: VOYHTmiR-104.016 | A: 1589 | VOYPC60 | 0.27 ± 0.01 |
| B: VOYHTmiR-127.579 | B: 1599 | | |
| A: VOYHTmiR-127.579 | A: 1599 | VOYPC61 | 0.24 ± 0.03 |
| B: VOYHTmiR-104.016 | B: 1589 | | |
| A: VOYHTmiR-127.579 | A: 1599 | VOYPC29 | 0.28 ± 0.01 |
| B: VOYHTmiR-104.016 | B: 1589 | | |
| C: VOYHTmiR-127.579 | C. 1599 | | |
| A: VOYHTmiR-104.016 | A: 1589 | VOYPC34 | 0.20 ± 0.00 |
| B: VOYHTmiR-104.016 | B: 1589 | | |
| C: VOYHTmiR-127.579 | C: 1599 | | |
| A: VOYHTmiR-104.016 | A: 1589 | VOYPC30 | 0.26 ± 0.03 |
| B: VOYHTmiR-127.579 | B: 1599 | | |
| C: VOYHTmiR-104.016 | C: 1589 | | |
| A: VOYHTmiR-127.579 | A: 1599 | VOYPC32 | 0.23 ± 0.01 |
| B: VOYHTmiR-127.579 | B: 1599 | | |
| C: VOYHTmiR-104.016 | C: 1589 | | |
| A: VOYHTmiR-127.579 | A: 1599 | VOYPC44 | 0.17 ± 0.01 |
| B: VOYHTmiR-104.016 | B: 1589 | | |
| C: VOYHTmiR-127.579 | C: 1599 | | |
| D: VOYHTmiR-104.016 | D: 1589 | | |
| A: VOYHTmiR-104.016 | A. 1589 | VOYPC48 | 0.20 ± 0.01 |
| B: VOYHTmiR-127.579 | B: 1599 | | |
| C: VOYHTmiR-104.016 | C: 1589 | | |
| D: VOYHTmiR-127.579 | D: 1599 | | |
| A: VOYHTmiR-104.016 | A: 1589 | VOYPC46 | 0.19 ± 0.01 |
| B: VOYHTmiR-127.579 | B: 1599 | | |
| C: VOYHTmiR-127.579 | C: 1599 | | |
| D: VOYHTmiR-104.016 | D: 1589 | | |
| A: VOYHTmiR-127.579 | A: 1599 | VOYPC45 | 0.21 ± 0.01 |
| B: VOYHTmiR-104.016 | B: 1589 | | |
| C: VOYHTmiR-104.016 | C: 1589 | | |
| D: VOYHTmiR-127.579 | D.1599 | | |

[1154] The results show that sequence VOYPC47 which contains 4 identical modulatory polynucleotides (VOYHTmiR-104.016 (SEQ ID NO: 1589)) in tandem provides more target lowering than VOYPC33 which contains 3 of the same modulatory polynucleotides (VOYHTmiR-104.016 (SEQ ID NO: 1589)) in tandem. These results also show that VOYPC33 which contains 3 identical modulatory polynucleotides (VOYHTmiR-104.016 (SEQ ID NO: 1589)) in tandem provides more target lowering than VOYPC59 which contains 2 of the same modulatory polynucleotides (VOYHTmiR-104.016 (SEQ ID NO: 1589)) in tandem.

[1155] The results show that sequence VOYPC43 which contains 4 identical modulatory polynucleotides (VOYHTmiR-127.579 (SEQ ID NO: 1599)) in tandem provides more target lowering than VOYPC31 which contains 3 of the same modulatory polynucleotides (VOYHTmiR-127.579 (SEQ ID NO: 1599)) in tandem. These results also show that VOYPC31 which contains 3 identical modulatory polynucleotides (VOYHTmiR-127.579 (SEQ ID NO: 1599)) in tandem provides more target lowering than VOYPC62 which contains 2 of the same modulatory polynucleotides (VOYHTmiR-127.579 (SEQ ID NO: 1599)) in tandem.

[1156] Taken together, these results with VOYHTmiR-104.016 (SEQ ID NO: 1589) and with VOYHTmiR-127.579 (SEQ ID NO: 1599) demonstrate that 4 identical modulatory polynucleotides in tandem provides more inhibitor activity (target lowering) than 3 of the same modulator) polynucleotides in tandem, which in turn provides more inhibitor activity (target lowering) than 2 of the same modulatory polynucleotides in tandem.

[1157] The results show that sequence VOYPC34, which contains two copies of VOYHTmiR-104.016 (SEQ ID NO: 1589) followed by one copy of VOYHTmiR-127.579 (SEQ ID NO: 1599) provides more inhibitory activity (target lowering) than VOYPC30. Both sequences contain two copies of VOYHTmiR-104.016 (SEQ ID NO: 1589) and one copy of VOYHTmiR-127.579 (SEQ ID NO: 1599), but the order of these modulatory polynucleotides is different; VOYPC34 contains two copies of VOYHTmiR-104.016 (SEQ ID NO: 1589) followed by one copy of VOYHTmiR-127.579 (SEQ ID NO: 1599) whereas VOYPC30 contains one copy of VOYHTmiR-104.016 (SEQ ID NO: 1589) followed by one copy of VOYHTmiR-127.579 (SEQ ID NO: 1599) followed by one copy of VOYHTmiR-104.016 (SEQ ID NO: 1589).

[1158] The results show that of the sequences containing four modulatory polynucleotides comprising two different modulatory polynucleotides, sequence VOYPC44 provides more inhibitory activity (target lowering) than VOYPC48, VOYPC46 or VOYPC45.

### Example 6. Pri-miRNA Processing of Polycistronic Constructs in HEK293T Cells

[1159] To determine precision and efficiency of pri-miRNA processing, miRNA expression vectors encoding VOYHTmiR-104.016 (SEQ ID NO: 1589) and/or VOYHTmiR-127.579 (SEQ ID NO: 1599) singly or in various tandem combinations comprising two modulatory polynucleotides were constructed, packaged in AAV2 with one CMV promoter, or two H1 promoters, and infected into HEK293T cells, and then precision and efficiency of pri-miRNA processing was assessed by deep sequencing.

[1160] HEK293T cells were plated into 6-well plates (2E6 cells/plate in 2 mL cell culture medium), and infected with miRNA expression vectors packaged in AAV2 at an MOI of 1×10⁴ vector genomes per cell, in duplicate (Rep1, Rep2); see Tables 60-65. At 48 hours after infection, the cell cultures were evaluated for pri-miRNA processing by deep sequencing to assess abundance of guide strand relative to the total endogenous pool of miRNAs (Tables 60-61), guide:passenger strand ratio (Tables 62-63), and precision of processing at the 5′-end of the guide strand (Tables 64-65). In Tables 60-65, the construct encodes the A modulatory polynucleotide before the B modulatory polynucleotide. N/A means not applicable.

[1161] With the CMV promoter (Table 60), guide strand abundance of VOYHTmiR-104.016 was affected by the presence of a second modulatory polynucleotide in the AAV genome. Guide strand abundance was lower with an AAV genome containing two copies of VOYHTmiR-104.016 (SEQ ID NO: 1589) (VOYPC13, 0.26 and 0.27% relative to the total endogenous miRNA pool) than with an AAV genome containing a single copy of VOYHTmiR-104.016 (SEQ ID NO: 1589) (0.49 and 0.43% relative to the total endogenous miRNA pool). However, guide strand abundance for VOYHTmiR-104.016 was higher with an AAV genome containing a second different modulatory polynucleotide VOYHTmiR-127.579. Guide strand abundance for VOYPC14 was 1.69 and 1.52% relative to the total endogenous miRNA pool, and guide strand abundance for VOYPC15 was 2.17 and 2.11% relative to the total endogenous miRNA pool, in contrast to guide strand abundance with a single modulatory polynucleotide (VOYHTmiR-104.016 (SEQ ID NO: 1589) which was 0.49 and 0.43% relative to the total endogenous miRNA pool. Sequences utilizing CMV promoters were configured with the modulatory polynucleotides in tandem 3′ to a CMV promoter, such that transcription of the modulatory polynucleotides was under the control of a single CMV promoter. Results obtained using the CMV promoter are shown in Table 60.

TABLE 60
Pri-miRNA Processing in HEK293T Cultures after AAV Infection (CMV
Promoter)-Guide Strand Abundance

| | | | Guide Strand Abundance Relative to | | | |
|---|---|---|---|---|---|---|
| | Modulatory | | Endogenous mRNA Pool (%) | | | |
| Modulatory | polynucteotide | Sequence | 127.579 | | 104.016 | |
| Polynucleotide Name | SEQ ID | Name | Rep1 | Rep2 | Rep1 | Rep2 |
| VOYHTmiR- | 1599 | N/A | 1.92 | 0.85 | N/A | N/A |
| 127.579 | (ITR to | | | | | |
| | ITR | | | | | |
| | sequence: | | | | | |
| | SEQ ID | | | | | |
| | NO: 2692) | | | | | |
| VOYHTmiR- | 1589 | N/A | N/A | N/A | 0.49 | 0.43 |
| 104.016 | (ITR to | | | | | |
| | ITR | | | | | |
| | sequence: | | | | | |
| | SEQ ID | | | | | |
| | NO: 2693) | | | | | |
| Construct 1: | Construct | N/A | 0.98 | 0.72 | 0.24 | 0.23 |
| VOYHTmiR- | 1: 1589 | | | | | |
| 104.016 | (ITR to | | | | | |
| Construct 2: | ITR | | | | | |
| VOYHTmiR- | sequence: | | | | | |
| 127.579 | SEQ ID | | | | | |
| | NO: 2693) | | | | | |
| | Construct | | | | | |
| | 2: 1599 | | | | | |
| | (ITR to | | | | | |
| | ITR | | | | | |
| | sequence: | | | | | |
| | SEQ ID | | | | | |
| | NO: 2692) | | | | | |
| A: VOYHTmiR- | A: 1589 | VOYPC13 | N/A | N/A | 0.26 | 0.27 |
| 104.016 | B: 1589 | | | | | |
| B: VOYHTmiR- | | | | | | |
| 104.016 | | | | | | |
| A: VOYHTmiR- | A: 1599 | VOYPC14 | 0.26 | 0.24 | 1.69 | 1.52 |
| 127.579 | B: 1589 | | | | | |
| B: VOYHTmiR- | | | | | | |
| 104.016 | | | | | | |
| A: VOYHTmiR- | A: 1589 | VOYPC15 | 0.31 | 0.28 | 2.17 | 2.11 |
| 104.016 | B: 1.599 | | | | | |
| B: VOYHTmiR- | | | | | | |
| 127.579 | | | | | | |
| A: VOYHTmiR- | | | | | | |
| 127.579 | A: 1599 | VOYPC16 | 0.93 | 0.72 | N/A | N/A |
| B: VOYHTmiR- | B: 1599 | | | | | |
| 127.579 | | | | | | |

[1162] Sequences utilizing the Pol 111 promoter H1 were configured with each modulatory polynucleotide under control by its own H1 promoter. As shown in Table 61, with the H1 promoter, guide strand abundance was proportional to the number of corresponding modulatory polynucleotides in the AAV genome. Guide strand abundance of VOYHTmiR-104.016 (SEQ ID NO: 1589) was 1.77-fold higher with an AAV genome containing two copies of VOYHTmiR-104.016 (VOYPC59, 3.81 and 3.84% relative to the total endogenous miRNA pool) than with an AAV genome containing a single copy of VOYHTmiR-104.016 (2.19 and 2.13% relative to the total endogenous miRNA pool). Guide strand abundance of VOYHTmiR-104.016 (SEQ ID NO: 1589) was similar with an AAV genome containing one copy of VOYHTmiR-104.016 whether or not a copy of a different modulatory polynucleotide VOYHTmiR-127.579 (SEQ ID NO: 1599) was present in the AAV genome. The guide strand abundance relative to the total endogenous miRNA pool of VOYHTmiR-104.016 was 2.19 and 2.13%, 2.61 and 2.52%, and 2.21 and 2.3% with an AAV genome containing one copy of VOYHTmiR-104.016 (SEQ ID NO: 1589), an AAV genome containing one copy of VOYHTmiR-104.016 (SEQ ID NO: 1589) followed by one copy of VOYHTmiR-127.579 (SEQ ID NO: 1599) (VOYPC60), and an AAV genome containing one copy of VOYHTmiR-127.579 (SEQ ID NO: 1599) followed by one copy of VOYHTmiR-104.016 (SEQ ID NO: 1589) (VOYPC61), respectively.

[1163] Similarly, with the H1 promoter (Table 61), for another modulatory polynucleotide, guide strand abundance of VOYHTmiR-127.579 (SEQ ID NO: 1599) was 2.67-fold higher with an AAV genome containing two copies of VOYHTmiR-127.579 (VOYPC62, 2.05 and 1.74% relative to the total endogenous miRNA pool) than with an AAV genome containing a single copy of VOYHTmiR-127.579 (0.75 and 0.67% relative to the total endogenous miRNA pool). Guide strand abundance of VOYHTmiR-127.579 (SEQ ID NO: 1599) was similar with an AAV genome containing one copy of VOYHTmiR-127.579 whether or not a copy of a different modulatory polynucleotide VOYHTmiR-104.016 (SEQ ID NO: 1589) was present in the AAV genome. The guide strand abundance of VOYHTmiR-127.579 relative to the total endogenous miRNA pool was 0.75 and 0.67%, 1.0 and 1.05%, and 0.97 and 0.99% with an AAV genome containing one copy of VOYHTmiR-127.579 (SEQ ID NO: 1599), an AAV genome containing one copy of VOYHTmiR-104.016 (SEQ ID NO: 1589) followed by one copy of VOYHTmiR-127.579 (SEQ ID NO: 1599) (VOYPC60), and an AAV genome containing one copy of VOYHTmiR-127.579 (SEQ ID NO: 1599) followed by one copy of VOYHTmiR-104.016 (SEQ ID NO: 1589) (VOYPC61), respectively.

TABLE 61
Pri-miRNA Processing in HEK293T Cultures after AAV Infection (H1
Promoter)-Guide Strand Abundance

| | | | Guide Strand Abundance Relative | | | |
|---|---|---|---|---|---|---|
| | Modulatory | | to Endogenous miRNA Pool (A) | | | |
| Modulatory | polynucleotide | Sequence | 127.579 | | 104.016 | |
| Polynucleotide Name | SEQ ID | Name | Rep1 | Rep2 | Rep1 | Rep2 |
| VOYHTmiR-127.579 | 1599 | N/A | 0.75 | 0.67 | N/A | N/A |
| | (ITR to | | | | | |
| | ITR | | | | | |
| | sequence: | | | | | |
| | SEQ ID | | | | | |
| | NO: 2690) | | | | | |
| VOYHTmiR-104.016 | 1589 | N/A | N/A | N/A | 2.19 | 2.13 |
| | (ITR to | | | | | |
| | ITR | | | | | |
| | sequence: | | | | | |
| | SEQ ID | | | | | |
| | NO: 2691) | | | | | |
| Construct 1: | Construct | N/A | 0.32 | 0.29 | 1.54 | 1.56 |
| VOYHTmiR- | 1: 1589 | | | | | |
| 104.016 | (ITR to | | | | | |
| Construct 2: | ITR | | | | | |
| VOYHTmiR-127.579 | sequence: | | | | | |
| | SEQ ID | | | | | |
| | NO: 2691) | | | | | |
| | Construct 2: | | | | | |
| | 1599 | | | | | |
| | (ITR to | | | | | |
| | ITR | | | | | |
| | sequence: | | | | | |
| | SEQ ID | | | | | |
| | NO: 2690) | | | | | |
| A: VOYHTmiR- | A: 1589 | VOYPC59 | N/A | N/A | 3.81 | 3.84 |
| 104.016 | B: 1589 | | | | | |
| B: VOYHTmiR-104.016 | | | | | | |
| A: VOYHTmiR- | A: 1599 | VOYPC61 | 0.97 | 0.99 | 2.21 | 2.3 |
| 177.579 | B: 1589 | | | | | |
| B: VOYHTmiR-104.016 | | | | | | |
| A: VOYHTmiR- | A: 1589 | VOYPC60 | 1 | 1.05 | 2.61 | 2.52 |
| 104.016 | B: 1599 | | | | | |
| B: VOYHTmiR-127.579 | | | | | | |
| A: VOYHTmiR- | A: 1599 | VOYPC62 | 2.05 | 1.74 | N/A | N/A |
| 127.579 | B: 1599 | | | | | |
| B: VOYHTmiR-127.579 | | | | | | |

[1164] With the CMV promoter (Table 62), the guide/passenger strand ratio for VOYHTmiR-104.016 was 114.2 and 121.6, and 99.2 and 105.8 for an AAV genome containing one copy of VOYHTmiR-104.016 (SEQ ID NO: 1589) followed by one copy of VOYHTmiR-127.579 (SEQ ID NO: 1599) (VOYPC15), and an AAV genome containing one copy of VOYHTmiR-127.579 (SEQ ID NO: 1599) followed by one copy of VOYHTmiR-104.016 (SEQ ID NO: 1589) (VOYPC14), respectively, versus 71.1 and 83 for an AAV genome containing a single copy of VOYHTmiR-104.016 only.

TABLE 62
Pri-miRNA Processing in HEK293T Cultures after AAV infection (CMV
Promoter)-Guide/Passenger Ratio

| | Modulatory | | Guide/Passenger Ratio | | | |
|---|---|---|---|---|---|---|
| Modulatory | polynucleotide | Sequence | 127.579 | | 104.016 | |
| Polynucleotide Name | SEQ ID | Name | Rep1 | Rep2 | Rep1 | Rep2 |
| VOYHTmiR-127.579 | 1599 | N/A | 16.6 | 4.6 | N/A | N/A |
| | (ITR to | | | | | |
| | ITR | | | | | |
| | sequence: | | | | | |
| | SEQ ID | | | | | |
| | NO: 2692) | | | | | |
| VOYHTmiR-104.016 | 1589 | N/A | N/A | N/A | 71.1 | 83 |
| | (ITR to | | | | | |
| | ITR | | | | | |
| | sequence: | | | | | |
| | SEQ ID | | | | | |
| | NO: 2693) | | | | | |
| Construct 1: | Construct | N/A | 9.4 | 6 | 45.2 | 66.9 |
| VOYHTmiR- | 1: 1589 | | | | | |
| 104.016 | (ITR to | | | | | |
| Construct 2: | ITR | | | | | |
| VOYHTmiR-127.579 | sequence: | | | | | |
| | SEQ ID | | | | | |
| | NO: 2693 | | | | | |
| | Construct 2: | | | | | |
| | 1599 | | | | | |
| | (ITR to | | | | | |
| | ITR | | | | | |
| | sequence: | | | | | |
| | SEQ ID | | | | | |
| | NO: 2692) | | | | | |
| A: VOYHTmiR- | A: 1589 | VOYPC13 | N/A | N/A | 45.8 | 126.3 |
| 104.016 | B: 1589 | | | | | |
| B: VOYHTmiR-104.016 | | | | | | |
| A: VOYHTmiR- | A: 1599 | VOYPC14 | 6.8 | 6.7 | 99.2 | 105.8 |
| 127.579 | B: 1589 | | | | | |
| B: VOYHTmiR-104.016 | | | | | | |
| A: VOYHTmiR- | A: 1589 | VOYPC15 | 6.7 | 6.7 | 114.2 | 121.6 |
| 104.016 | B: 1599 | | | | | |
| B: VOYHTmiR-127.579 | | | | | | |
| A: VOYHTmiR- | A: 1599 | VOYPC16 | 7.8 | 6.6 | N/A | N/A |
| 127.579 | B: 1599 | | | | | |
| B: VOYHTmiR-127.579 | | | | | | |

[1165] When utilizing the Pol III H1 promoter (Table 63), the guide/passenger ratio of VOYHTmiR-104.016 (SEQ ID NO: 1589) was unaffected by the presence of a second modulatory polynucleotide in the AAV genome. Guide/passenger ratios for VOYHTmiR-104.016 were 16.9 and 20.2, 14.3 and 18.6, 16.3 and 16.3, and 17.7 and 17.8 for an AAV genome containing one copy of VOYHTmiR-104.016 (SEQ ID NO: 1589), an AAV genome containing two copies of VOYHTmiR-104.016 (SEQ ID NO: 1589) (VOYPC59), an AAV genome containing one copy of VOYHTmiR-104.016 (SEQ ID NO: 1589) followed by one copy of VOYHTmiR-127.579 (SEQ ID NO: 1599) (VOYPC60), and an AAV genome containing one copy of VOYHTmiR-127.579 (SEQ ID NO: 1599) followed by one copy of VOYHTmiR-104.016 (SEQ ID NO: 1589) (VOYPC61), respectively.

[1166] Similarly, with a Pol III H1 promoter (Table 63), the guide/passenger ratio of VOYHTmiR-127.579 (SEQ ID NO: 1599) was unaffected by the presence of a second modulatory polynucleotide in the AAV genome. Guide/passenger ratios for VOYHTmiR-127.579 were 6.4 and 5.9, 5.7 and 6.4, 5.6 and 6.2, and 6.2 and 5.8 for an AAV genome containing one copy of VOYHTmiR-127.579 (SEQ ID NO: 1599), an AAV genome containing two copies of VOYHTmiR-127.579 (SEQ ID NO: 1599) (VOYPC62), an AAV genome containing one copy of VOYHTmiR-104.016 (SEQ ID NO: 1589) followed by one copy of VOYHTmiR-127.579 (SEQ ID NO: 1599) (VOYPC60), and an AAV genome containing one copy of VOYHTmiR-127.579 (SEQ ID NO: 1599) followed by one copy of VOYHTmiR-104.016 (SEQ ID NO: 1589) (VOYPC61), respectively.

[1167] These results demonstrate that with the Pol III H1 promoter (Table 63), the guide/passenger ratio was the same whether a second modulatory polynucleotide was present or not.

TABLE 63
Pri-miRNA Processing in HEK293T Cultures after AAV Infection (H1
Promoter)-Guide/Passenger Ratio

| Modulatory | Modulatory | | Guide/Passenger Ratio | | | |
|---|---|---|---|---|---|---|
| Polynueleotide | polynucleotide | Sequence | 127.579 | | 104.016 | |
| Name | SEQ ID | Name | Rep1 | Rep2 | Rep1 | Rep2 |
| VOYHTmiR- | 1599 | N/A | 6.4 | 5.9 | N/A | N/A |
| 127.579 | (ITR to | | | | | |
| | ITR | | | | | |
| | sequence: | | | | | |
| | SEQ ID | | | | | |
| | NO: 2690) | | | | | |
| VOYHTmiR- | 1589 | N/A | N/A | N/A | 16.9 | 20.2 |
| 104.016 | (ITR to | | | | | |
| | ITR | | | | | |
| | sequence: | | | | | |
| | SEQ ID | | | | | |
| | NO: 2691 | | | | | |
| Construct 1: | Construct | N/A | 6.3 | 6 | 17.6 | 19.5 |
| VOYHTmiR- | 1: 1589 | | | | | |
| 104.016 | (ITR to | | | | | |
| Construct 2: | ITR | | | | | |
| VOYHTmiR- | sequence: | | | | | |
| 127.579 | SEQ ID | | | | | |
| | NO: 2691) | | | | | |
| | Construct 2: | | | | | |
| | 1599 | | | | | |
| | (ITR to | | | | | |
| | ITR | | | | | |
| | sequence: | | | | | |
| | SEQ ID | | | | | |
| | NO: 2690) | | | | | |
| A: VOYHTmiR- | A: 1589 | VOYPC59 | N/A | N/A | 14.3 | 18.6 |
| 104.016 | B: 1589 | | | | | |
| B: VOYHTmiR- | | | | | | |
| 104.016 | | | | | | |
| A: VOYHTmiR- | A: 1599 | VOYPC61 | 6.2 | 5.8 | 17.7 | 17.8 |
| 127.579 | B: 1589 | | | | | |
| B: VOYHTmiR- | | | | | | |
| 104.016 | | | | | | |
| A: VOYHTmiR- | A: 1589 | VOYPC60 | 5.6 | 6.2 | 16.3 | 16.3 |
| 104.016 | B: 1599 | | | | | |
| B: VOYHTmiR- | | | | | | |
| 127.579 | | | | | | |
| A: VOYHTmiR- | A: 1599 | VOYPC62 | 5.7 | 6.4 | N/A | N/A |
| 127.579 | B: 1599 | | | | | |
| B: VOYHTmiR- | | | | | | |
| 127.579 | | | | | | |

[1168] With the CMV promoter (Table 64), the precision of processing at the 5′-end of the guide strand was the same whether or not a second modulatory polynucleotide was present in the AAV genome. With the CMV promoter, the precision of processing at the 5′-end of the guide strand for VOYHTmiR-104.016 (SEQ ID NO: 1589) was 95.5 and 95%, 94.9 and 95.4%, 95.7 and 95.7%, and 95.6 and 95.3% for an AAV genome containing one copy of VOYHTmiR-104.016 (SEQ ID NO: 1589), an AAV genome containing two copies of VOYHTmiR-104.016 (SEQ ID NO: 1589) (VOYPC13), an AAV genome containing one copy of VOYHTmiR-104.016 (SEQ ID NO: 1589) followed by one copy of VOYHTmiR-127.579 (SEQ ID NO: 1599) (VOYPC15), and an AAV genome containing one copy of VOYHTmiR-127.579 (SEQ ID NO: 1599) followed by one copy of VOYHTmiR-104.016 (SEQ ID NO: 1589) (VOYPC14), respectively. With the CMV promoter, the precision of processing at the 5′-end of the guide strand for VOYHTmiR-127.579 (SEQ ID NO: 1599) was 59 and 59.8%, 60.1 and 60.8%, 59.9 and 61.5%, and 61 and 61.2% for an AAV genome containing one copy of VOYHTmiR-127.579 (SEQ ID NO: 1599) an AAV genome containing two copies of VOYHTmiR-127.579 (SEQ ID NO: 1599) (VOYPC16), an AAV genome containing one copy of VOYHTmiR-104.016 (SEQ ID NO: 1589) followed by one copy of VOYHTmiR-127.579 (SEQ ID NO: 1599) (VOYPC15), and an AAV genome containing one copy of VOYHTmiR-127.579 (SEQ ID NO: 1599) followed by one copy of VOYHTmiR-104.016 (SEQ ID NO: 1589) (VOYPC14), respectively.

TABLE 64
Pri-miRNA Processing in HEK293T Cultures after AAV Infection
(CMV Promoter)-Precision of Guide Strand 5′-Processing

| | Modulatory | | | | | |
|---|---|---|---|---|---|---|
| Modulatory | poly- | | % N (Guide) | | | |
| Polynucleotide | nucleolide | Sequence | 127.579 | | 104.016 | |
| Name | SEQ ID | Name | Rep1 | Rep2 | Rep1 | Rep2 |
| VOYHTmiR- | 1599 | N/A | 59 | 59.8 | N/A | N/A |
| 127.579 | (ITR to | | | | | |
| | ITR | | | | | |
| | sequence: | | | | | |
| | SEQ ID | | | | | |
| | NO: 2692) | | | | | |
| VOYHTmiR- | 1589 | N/A | N/A | N/A | 95.5 | 95 |
| 104.016 | (ITR to | | | | | |
| | ITR | | | | | |
| | sequence: | | | | | |
| | SEQ ID | | | | | |
| | NO: 2693) | | | | | |
| Construct 1: | Construct | N/A | 58.9 | 60 | 95.3 | 94.6 |
| VOYHTmiR- | 1: 1589 | | | | | |
| 104.016 | (ITR to | | | | | |
| Construct 2: | ITR | | | | | |
| VOYHTmiR- | sequence: | | | | | |
| 127.579 | SEQ ID | | | | | |
| | NO: 2693) | | | | | |
| | Construct 2: | | | | | |
| | 1599 | | | | | |
| | (ITR to | | | | | |
| | ITR | | | | | |
| | sequence: | | | | | |
| | SEQ ID | | | | | |
| | NO: 2692) | | | | | |
| A: VOYHTmiR- | A: 1589 | VOYPC13 | N/A | N/A | 94.9 | 95.4 |
| 104.016 | B: 1589 | | | | | |
| B: VOYHTmiR- | | | | | | |
| 104.016 | | | | | | |
| A: VOYHTmiR- | A: 1599 | VOYPC14 | 61 | 61.2 | 95.6 | 95.3 |
| 127.579 | B: 1589 | | | | | |
| B: VOYHTmiR- | | | | | | |
| 104.016 | | | | | | |
| A: VOYHTmiR- | A: 1589 | VOYPC15 | 59.9 | 61.5 | 95.7 | 95.7 |
| 104.016 | B: 1599 | | | | | |
| B: VOYHTmiR- | | | | | | |
| 127.579 | | | | | | |
| A: VOYHTmiR- | A: 1599 | VOYPC16 | 60.1 | 60.8 | N/A | N/A |
| 127.579 | B: 1599 | | | | | |
| B: VOYHTmiR- | | | | | | |
| 127.579 | | | | | | |

[1169] With the H1 promoter (Table 65), the precision of processing at the 5′-end of the guide strand was the same whether or not a second modulatory polynucleotide was present in the AAV genome. With the H1 promoter, the precision of processing at the 5′-end of the guide strand for VOYHTmiR-104.016 was 92.6 and 92.6%, 92.6 and 92.1%, 92.1 and 91.8%, and 93 and 92.9% for an AAV genome containing one copy of VOYHTmiR-104.016 (SEQ ID NO: 1589), an AAV genome containing two copies of VOYHTmiR-104.016 (SEQ ID NO: 1589) (VOYPC59), an AAV genome containing one copy of VOYHTmiR-104.016 (SEQ ID NO: 1589) followed by one copy of VOYHTmiR-127.579 (SEQ ID NO: 1599) (VOYPC60), and an AAV genome containing one copy of VOYHTmiR-127.579 (SEQ ID NO: 1599) followed by one copy of VOYHTmiR-104.016 (SEQ ID NO: 1589) (VOYPC61), respectively. With the H1 promoter, the precision of processing at the 5′-end of the guide strand for VOYHTmiR-127.579 (SEQ ID NO: 1599) was 59.5 and 59.6%, 58.5 and 59.3%, 59 and 59.8%, and 58.5 and 58.7% for an AAV genome containing one copy of VOYHTmiR-127.579 (SEQ ID NO: 1599) an AAV genome containing two copies of VOYHTmiR-127.579 (SEQ ID NO: 1599) (VOYPC62), an AAV genome containing one copy of VOYHTmiR-104.016 (SEQ ID NO: 1589) followed by one copy of VOYHTmiR-127.579 (SEQ ID NO: 1599) (VOYPC60), and an AAV genome containing one copy of VOYHTmiR-127.579 (SEQ ID NO: 1599) followed by one copy of VOYHTmiR-104.016 (SEQ ID NO: 1589) (VOYPC61), respectively.

[1170] These results demonstrate that with the CMV (Table 64) or H1 (Table 65) promoter, the precision of processing at the 5′-end of the guide strand was the same whether a second modulatory polynucleotide was present or not.

TABLE 65
Pri-miRNA Processing in HEK293T Cultures after AAV Infection (H1
Promoter)-Precision of Guide Strand 5′-Processing

| Modulatory | Modulatory | | % N (Guide) | | | |
|---|---|---|---|---|---|---|
| Polynucleotide | polynucleotide | Sequence | 127.579 | | 104.016 | |
| Name | SEQ ID | Name | Rep1 | Rep2 | Rep1 | Rep2 |
| VOYHTmiR- | 1599 | N/A | 59.5 | 59.6 | N/A | N/A |
| 127.579 | (ITR to | | | | | |
| | ITR | | | | | |
| | sequence: | | | | | |
| | SEQ ID | | | | | |
| | NO: 2690) | | | | | |
| VOYHTmiR- | 1589 | N/A | N/A | N/A | 92.6 | 92.6 |
| 104.016 | (ITR to | | | | | |
| | ITR | | | | | |
| | sequence: | | | | | |
| | SEQ ID | | | | | |
| | NO: 2691) | | | | | |
| Construct 1: | Construct | N/A | 59.5 | 60 | 92.6 | 92.4 |
| VOYHTmiR- | 1: 1589 | | | | | |
| 104.016 | (ITR to | | | | | |
| Construct 2: | ITR | | | | | |
| VOYHTmiR- | sequence: | | | | | |
| 127.579 | SEQ ID | | | | | |
| | NO: 2691) | | | | | |
| | Construct 2: | | | | | |
| | 1599 | | | | | |
| | (ITR to | | | | | |
| | ITR | | | | | |
| | sequence: | | | | | |
| | SEQ ID | | | | | |
| | NO: 2690) | | | | | |
| A: VOYHTmiR- | A: 1589 | VOYPC59 | N/A | N/A | 92.6 | 92.1 |
| 104.016 | B: 1589 | | | | | |
| B: VOYHTmiR- | | | | | | |
| 104.016 | | | | | | |
| A: VOYHTmiR- | A: 1599 | VOYPC61 | 58.5 | 58.7 | 93 | 92.9 |
| 127.579 | B: 1589 | | | | | |
| B: VOYHTmiR- | | | | | | |
| 104.016 | | | | | | |
| A: VOYHTmiR- | A: 1589 | VOYPC60 | 59 | 59.8 | 92.1 | 91.8 |
| 104.016 | B: 1599 | | | | | |
| B: VOYHTmiR- | | | | | | |
| 127.579 | | | | | | |
| A: VOYHTmiR- | A: 1599 | VOYPC62 | 58.5 | 59.3 | N/A | N/A |
| 127.579 | B: 1599 | | | | | |
| B: VOYHTmiR- | | | | | | |
| 127.579 | | | | | | |

[1171] While the present invention has been described at some length and with some particularity with respect to the several described embodiments, it is not intended that it should be limited to any such particulars or embodiments or any particular embodiment, but it is to be construed with references to the appended claims so as to provide the broadest possible interpretation of such claims in view of the prior art and, therefore, to effectively encompass the intended scope of the invention.

[1172] All publications, patent applications, patents, and other references mentioned herein are incorporated by reference in their entirety. In case of conflict, the present specification, including definitions, will control. In addition, section headings, the materials, methods, and examples are illustrative only and not intended to be limiting.

1-112. (canceled)

113. An adeno-associated virus (AAV) vector genome comprising a nucleic acid sequence positioned between two inverted terminal repeats (ITRs), wherein the nucleic acid sequence comprises a first polynucleotide and a second polynucleotide; wherein the first polynucleotide comprises a first region encoding a first sense strand sequence which comprises at least 15 nucleotides, and a second region encoding a first antisense strand sequence which comprises at least 15 nucleotides, and wherein the first sense strand sequence and the first antisense strand sequence share a region of complementarity of at least seven nucleotides in length; and wherein the second polynucleotide comprises a third region encoding a second sense strand sequence which comprises at least 15 nucleotides, and a fourth region encoding a second antisense strand sequence which comprises at least 15 nucleotides, and wherein the second sense strand sequence and the second antisense strand sequence share a region of complementarity of at least seven nucleotides in length.

114. The AAV vector genome of claim 113, wherein the nucleic acid sequence of the AAV vector genome comprises a third polynucleotide; wherein the third polynucleotide comprises a fifth region encoding a third sense strand sequence which comprises at least 15 nucleotides, and a sixth region encoding a third antisense strand sequence which comprises at least 15 nucleotides, and wherein the third sense strand sequence and the third antisense strand sequence share a region of complementarity of at least seven nucleotides in length.

115. The AAV vector genome of claim 114, wherein the nucleic acid sequence of the AAV vector genome comprises a fourth polynucleotide; wherein the fourth polynucleotide comprises a seventh region encoding a fourth sense strand sequence which comprises at least 15 nucleotides, and an eighth region encoding a fourth antisense strand sequence which comprises at least 15 nucleotides, and wherein the fourth sense strand sequence and the fourth antisense strand sequence share a region of complementarity of at least seven nucleotides in length.

116. The AAV vector genome of claim 113, wherein at least one of the first antisense strand sequence or the second antisense strand share a region of complementary with a Huntingtin gene.

117. The AAV vector genome of claim 113, wherein at least one of the first antisense strand or the second antisense strand share a region of complementary with a SOD1 gene.

118. The AAV vector genome of claim 113, wherein at least one of the first antisense strand or the second antisense strand share a region of complementary with a Huntingtin target gene; and wherein at least one of the first antisense strand or second antisense strand share a region of complementary with a SOD1 gene.

119. The AAV vector genome of claim 113, wherein the first sense strand, the first antisense strand, the second sense strand and the second antisense strand are each, independently, 19-23 nucleotides in length.

120. The AAV vector genome of claim 113, wherein the first sense strand, the first antisense strand, the second sense strand and the second antisense strand are each, independently, 20-22 nucleotides in length.

121. The AAV vector genome of claim 113, wherein the first region comprises a first promoter sequence which is 5′ of the first sense strand sequence, wherein the second region comprises a first promoter terminator sequence which is 3′ of the first antisense strand sequence, wherein the third region comprises a second promoter sequence which is 5′ of the second sense strand sequence, and wherein the fourth region comprises a second promoter terminator sequence which is 3′ of the second antisense strand sequence.

122. The AAV vector genome of claim 121, wherein the first region is 5′ of the second region, and wherein the third region is 5′ of the fourth region.

123. The AAV vector genome of claim 121, wherein at least one of the first promoter sequence or the second promoter sequence comprises a Pol III promoter; and wherein at least one of the first promoter terminator sequence or the second promoter terminator sequence comprises a Pol III promoter terminator.

124. The AAV vector genome of claim 123, wherein the Pol III promoter is an H1 promoter and the Pol III promoter terminator is an H1 promoter terminator.

125. The AAV viral genome of claim 113, wherein the first region and the second region encode a first siRNA molecule comprising the first sense strand sequence and the first antisense strand sequence, and wherein the third region and the fourth region encode a second siRNA molecule comprising the second sense strand sequence and the second antisense strand sequence.

126. The AAV vector genome of claim 125, wherein the AAV vector genome is a monospecific polycistronic AAV vector genome.

127. The AAV vector genome of claim 125, wherein the AAV vector genome is a bispecific polycistronic AAV vector genome.

128. The AAV viral genome of claim 113, wherein the first polynucleotide comprises a first molecular scaffold region and the second polynucleotide comprises a second molecular scaffold region; wherein the first molecular scaffold region comprises a first molecular scaffold nucleic acid sequence encoding:
(a) a first stem and a first loop which form a first stem-loop structure, wherein the sequence of the first stem-loop structure comprises, from 5′ to 3′:
(i) a first 5′ stem arm, wherein the first 5′ stem arm comprises the first sense strand sequence and a first 5′ spacer sequence located 5′ to the first sense strand sequence;
(ii) a first loop region between 4-20 nucleotides in length; and
(iii) a first 3′ stem arm, wherein the first 3′ stem arm comprises the first antisense strand sequence and a first 3′ spacer sequence located 3′ to the first antisense strand sequence;
(b) a first 5′ flanking region located 5′ to the first sense strand sequence, wherein the first 5′ flanking region comprises the first 5′ spacer sequence and a first 5′ flanking sequence located 5′ to the first 5′ spacer sequence; and
(c) a first 3′ flanking region located 3′ to the first antisense strand sequence, wherein the first 3′ flanking region comprises the first 3′ spacer sequence and a first 3′ flanking sequence located 3′ to the first 3′ spacer sequence; and
wherein the second molecular scaffold region comprises a second molecular scaffold nucleic acid sequence encoding:
(d) a second stem and a second loop which form a second stem-loop structure, wherein the sequence of the second stem-loop structure comprises, from 5′ to 3′:
(i) a second 5′ stem arm, wherein the second 5′ stem arm comprises the second sense strand sequence and a second 5′ spacer sequence located 5′ to the second sense strand sequence;
(ii) a second loop region between 4-20 nucleotides in length; and
(iii) a second 3′ stem arm, wherein the second 3′ stem arm comprises the second antisense strand sequence and a second 3′ spacer sequence located 3′ to the second antisense strand sequence;
(e) a second 5′ flanking region located 5′ to the second sense strand sequence, wherein the second 5′ flanking region comprises the second 5′ spacer sequence and a second 5′ flanking sequence located 5′ to the second 5′ spacer sequence; and
(f) a second 3′ flanking region located 3′ to the second antisense strand sequence, wherein the second 3′ flanking region comprises the second 3′ spacer sequence and a second 3′ flanking sequence located 3′ to the second 3′ spacer sequence.

129. The AAV viral genome of claim 113, wherein the first polynucleotide comprises a first molecular scaffold region and the second polynucleotide comprises a second molecular scaffold region; wherein the first molecular scaffold region comprises a first molecular scaffold nucleic acid sequence encoding:
(a) a first stem and a first loop which form a first stem-loop structure, wherein the sequence of the first stem-loop structure comprises, from 5′ to 3′:
(i) a first 5′ stem arm, wherein the first 5′ stem arm comprises the first antisense strand sequence and a first 5′ spacer sequence located 5′ to the first antisense strand sequence;
(ii) a first loop region between 4-20 nucleotides in length; and
(iii) a first 3′ stem arm, wherein the first 3′ stem arm comprises the first sense strand sequence and a first 3′ spacer sequence located 3′ to the first sense strand sequence;
(b) a first 5′ flanking region located 5′ to the first antisense strand sequence, wherein the first 5′ flanking region comprises the first 5′ spacer sequence and a first 5′ flanking sequence located 5′ to the first 5′ spacer sequence; and
(c) a first 3′ flanking region located 3′ to the first sense strand sequence, wherein the first 3′ flanking region comprises the first 3′ spacer sequence and a first 3′ flanking sequence located 3′ to the first 3′ spacer sequence; and
wherein the second molecular scaffold region comprises a second molecular scaffold nucleic acid sequence encoding:
(d) a second stem and a second loop which form a second stem-loop structure, wherein the sequence of the second stem-loop structure comprises, from 5′ to 3′:
(i) a second 5′ stem arm, wherein the second 5′ stem arm comprises the second antisense strand sequence and a second 5′ spacer sequence located 5′ to the second antisense strand sequence;
(ii) a second loop region between 4-20 nucleotides in length; and
(iii) a second 3′ stem arm, wherein the second 3′ stem arm comprises the second sense strand sequence and a second 3′ spacer sequence located 3′ to the second sense strand sequence;
(e) a second 5′ flanking region located 5′ to the second antisense strand sequence, wherein the second 5′ flanking region comprises the second 5′ spacer sequence and a second 5′ flanking sequence located 5′ to the second 5′ spacer sequence; and
(f) a second 3′ flanking region located 3′ to the second sense strand sequence, wherein the second 3′ flanking region comprises the second 3′ spacer sequence and a second 3′ flanking sequence located 3′ to the second 3′ spacer sequence.

130. A method for inhibiting the expression of a target gene in a cell, the method comprising administering to the cell a composition comprising an AAV vector genome of claim 125.

131. A method for inhibiting the expression of a target gene in a cell, the method comprising administering to the cell a composition comprising an AAV vector genome of claim 128.

132. A method for inhibiting the expression of a target gene in a cell, the method comprising administering to the cell a composition comprising an AAV vector genome of claim 129.

The application's sequence listing, which the Patent Office published only in electronic form, follows.

SEQUENCE LISTING (2693 sequences)

SEQ ID NO: 1 - DNA, 2211 bp, Adeno-associated virus 1
atggctgccgatggttatcttccagattggctcgaggacaacctctctgagggcattcgcgagtggtgggacttgaaacctggagccccgaagcccaaagccaaccagcaaaagcaggacgacggccggggtctggtgcttcctggctacaagtacctcggacccttcaacggactcgacaagggggagcccgtcaacgcggcggacgcagcggccctcgagcacgacaaggcctacgaccagcagctcaaagcgggtgacaatccgtacctgcggtataaccacgccgacgccgagtttcaggagcgtctgcaagaagatacgtcttttgggggcaacctcgggcgagcagtcttccaggccaagaagcgggttctcgaacctctcggtctggttgaggaaggcgctaagacggctcctggaaagaaacgtccggtagagcagtcgccacaagagccagactcctcctcgggcatcggcaagacaggccagcagcccgctaaaaagagactcaattttggtcagactggcgactcagagtcagtccccgatccacaacctctcggagaacctccagcaacccccgctgctgtgggacctactacaatggcttcaggcggtggcgcaccaatggcagacaataacgaaggcgccgacggagtgggtaatgcctcaggaaattggcattgcgattccacatggctgggcgacagagtcatcaccaccagcacccgcacctgggccttgcccacctacaataaccacctctacaagcaaatctccagtgcttcaacgggggccagcaacgacaaccactacttcggctacagcaccccctgggggtattttgatttcaacagattccactgccacttttcaccacgtgactggcagcgactcatcaacaacaattggggattccggcccaagagactcaacttcaaactcttcaacatccaagtcaaggaggtcacgacgaatgatggcgtcacaaccatcgctaataaccttaccagcacggttcaagtcttctcggactcggagtaccagcttccgtacgtcctcggctctgcgcaccagggctgcctccctccgttcccggcggacgtgttcatgattccgcaatacggctacctgacgctcaacaatggcagccaagccgtgggacgttcatccttttactgcctggaatatttcccttctcagatgctgagaacgggcaacaactttaccttcagctacacctttgaggaagtgcctttccacagcagctacgcgcacagccagagcctggaccggctgatgaatcctctcatcgaccaatacctgtattacctgaacagaactcaaaatcagtccggaagtgcccaaaacaaggacttgctgtttagccgtgggtctccagctggcatgtctgttcagcccaaaaactggctacctggaccctgttatcggcagcagcgcgtttctaaaacaaaaacagacaacaacaacagcaattttacctggactggtgcttcaaaatataacctcaatgggcgtgaatccatcatcaaccctggcactgctatggcctcacacaaagacgacgaagacaagttctttcccatgagcggtgtcatgatttttggaaaagagagcgccggagcttcaaacactgcattggacaatgtcatgattacagacgaagaggaaattaaagccactaaccctgtggccaccgaaagatttgggaccgtggcagtcaatttccagagcagcagcacagaccctgcgaccggagatgtgcatgctatgggagcattacctggcatggtgtggcaagatagagacgtgtacctgcagggtcccatttgggccaaaattcctcacacagatggacactttcacccgtctcctcttatgggcggctttggactcaagaacccgcctcctcagatcctcatcaaaaacacgcctgttcctgcgaatcctccggcggagttttcagctacaaagtttgcttcattcatcacccaatactccacaggacaagtgagtgtggaaattgaatgggagctgcagaaagaaaacagcaagcgctggaatcccgaagtgcagtacacatccaattatgcaaaatctgccaacgttgattttactgtggacaacaatggactttatactgagcctcgccccattggcacccgttaccttacccgtcccctgtaa

SEQ ID NO: 2 - protein, 736 aa, Adeno-associated virus 1
MAADGYLPDWLEDNLSEGIREWWDLKPGAPKPKANQQKQDDGRGLVLPGYKYLGPFNGLDKGEPVNAADAAALEHDKAYDQQLKAGDNPYLRYNHADAEFQERLQEDTSFGGNLGRAVFQAKKRVLEPLGLVEEGAKTAPGKKRPVEQSPQEPDSSSGIGKTGQQPAKKRLNFGQTGDSESVPDPQPLGEPPATPAAVGPTTMASGGGAPMADNNEGADGVGNASGNWHCDSTWLGDRVITTSTRTWALPTYNNHLYKQISSASTGASNDNHYFGYSTPWGYFDFNRFHCHFSPRDWQRLINNNWGFRPKRLNFKLFNIQVKEVTTNDGVTTIANNLTSTVQVFSDSEYQLPYVLGSAHQGCLPPFPADVFMIPQYGYLTLNNGSQAVGRSSFYCLEYFPSQMLRTGNNFTFSYTFEEVPFHSSYAHSQSLDRLMNPLIDQYLYYLNRTQNQSGSAQNKDLLFSRGSPAGMSVQPKNWLPGPCYRQQRVSKTKTDNNNSNFTWTGASKYNLNGRESIINPGTAMASHKDDEDKFFPMSGVMIFGKESAGASNTALDNVMITDEEEIKATNPVATERFGTVAVNFQSSSTDPATGDVHAMGALPGMVWQDRDVYLQGPIWAKIPHTDGHFHPSPLMGGFGLKNPPPQILIKNTPVPANPPAEFSATKFASFITQYSTGQVSVEIEWELQKENSKRWNPEVQYTSNYAKSANVDFTVDNNGLYTEPRPIGTRYLTRPL

SEQ ID NO: 3 - DNA, 4718 bp, Adeno-associated virus 1
ttgcccactccctctctgcgcgctcgctcgctcggtggggcctgcggaccaaaggtccgcagacggcagagctctgctctgccggccccaccgagcgagcgagcgcgcagagagggagtgggcaactccatcactaggggtaatcgcgaagcgcctcccacgctgccgcgtcagcgctgacgtaaattacgtcataggggagtggtcctgtattagctgtcacgtgagtgcttttgcgacattttgcgacaccacgtggccatttagggtatatatggccgagtgagcgagcaggatctccattttgaccgcgaaatttgaacgagcagcagccatgccgggcttctacgagatcgtgatcaaggtgccgagcgacctggacgagcacctgccgggcatttctgactcgtttgtgagctgggtggccgagaaggaatgggagctgcccccggattctgacatggatctgaatctgattgagcaggcacccctgaccgtggccgagaagctgcagcgcgacttcctggtccaatggcgccgcgtgagtaaggccccggaggccctcttctttgttcagttcgagaagggcgagtcctacttccacctccatattctggtggagaccacgggggtcaaatccatggtgctgggccgcttcctgagtcagattagggacaagctggtgcagaccatctaccgcgggatcgagccgaccctgcccaactggttcgcggtgaccaagacgcgtaatggcgccggaggggggaacaaggtggtggacgagtgctacatccccaactacctcctgcccaagactcagcccgagctgcagtgggcgtggactaacatggaggagtatataagcgcctgtttgaacctggccgagcgcaaacggctcgtggcgcagcacctgacccacgtcagccagacccaggagcagaacaaggagaatctgaaccccaattctgacgcgcctgtcatccggtcaaaaacctccgcgcgctacatggagctggtcgggtggctggtggaccggggcatcacctccgagaagcagtggatccaggaggaccaggcctcgtacatctccttcaacgccgcttccaactcgcggtcccagatcaaggccgctctggacaatgccggcaagatcatggcgctgaccaaatccgcgcccgactacctggtaggccccgctccgcccgcggacattaaaaccaaccgcatctaccgcatcctggagctgaacggctacgaacctgcctacgccggctccgtctttctcggctgggcccagaaaaggttcgggaagcgcaacaccatctggctgtttgggccggccaccacgggcaagaccaacatcgcggaagccatcgcccacgccgtgcccttctacggctgcgtcaactggaccaatgagaactttcccttcaatgattgcgtcgacaagatggtgatctggtgggaggagggcaagatgacggccaaggtcgtggagtccgccaaggccattctcggcggcagcaaggtgcgcgtggaccaaaagtgcaagtcgtccgcccagatcgaccccacccccgtgatcgtcacctccaacaccaacatgtgcgccgtgattgacgggaacagcaccaccttcgagcaccagcagccgttgcaggaccggatgttcaaatttgaactcacccgccgtctggagcatgactttggcaaggtgacaaagcaggaagtcaaagagttcttccgctgggcgcaggatcacgtgaccgaggtggcgcatgagttctacgtcagaaagggtggagccaacaaaagacccgcccccgatgacgcggataaaagcgagcccaagcgggcctgcccctcagtcgcggatccatcgacgtcagacgcggaaggagctccggtggactttgccgacaggtaccaaaacaaatgttctcgtcacgcgggcatgcttcagatgctgtttccctgcaagacatgcgagagaatgaatcagaatttcaacatttgcttcacgcacgggacgagagactgttcagagtgcttccccggcgtgtcagaatctcaaccggtcgtcagaaagaggacgtatcggaaactctgtgccattcatcatctgctggggcgggctcccgagattgcttgctcggcctgcgatctggtcaacgtggacctggatgactgtgtttctgagcaataaatgacttaaaccaggtatggctgccgatggttatcttccagattggctcgaggacaacctctctgagggcattcgcgagtggtgggacttgaaacctggagccccgaagcccaaagccaaccagcaaaagcaggacgacggccggggtctggtgcttcctggctacaagtacctcggacccttcaacggactcgacaagggggagcccgtcaacgcggcggacgcagcggccctcgagcacgacaaggcctacgaccagcagctcaaagcgggtgacaatccgtacctgcggtataaccacgccgacgccgagtttcaggagcgtctgcaagaagatacgtcttttgggggcaacctcgggcgagcagtcttccaggccaagaagcgggttctcgaacctctcggtctggttgaggaaggcgctaagacggctcctggaaagaaacgtccggtagagcagtcgccacaagagccagactcctcctcgggcatcggcaagacaggccagcagcccgctaaaaagagactcaattttggtcagactggcgactcagagtcagtccccgatccacaacctctcggagaacctccagcaacccccgctgctgtgggacctactacaatggcttcaggcggtggcgcaccaatggcagacaataacgaaggcgccgacggagtgggtaatgcctcaggaaattggcattgcgattccacatggctgggcgacagagtcatcaccaccagcacccgcacctgggccttgcccacctacaataaccacctctacaagcaaatctccagtgcttcaacgggggccagcaacgacaaccactacttcggctacagcaccccctgggggtattttgatttcaacagattccactgccacttttcaccacgtgactggcagcgactcatcaacaacaattggggattccggcccaagagactcaacttcaaactcttcaacatccaagtcaaggaggtcacgacgaatgatggcgtcacaaccatcgctaataaccttaccagcacggttcaagtcttctcggactcggagtaccagcttccgtacgtcctcggctctgcgcaccagggctgcctccctccgttcccggcggacgtgttcatgattccgcaatacggctacctgacgctcaacaatggcagccaagccgtgggacgttcatccttttactgcctggaatatttcccttctcagatgctgagaacgggcaacaactttaccttcagctacacctttgaggaagtgcctttccacagcagctacgcgcacagccagagcctggaccggctgatgaatcctctcatcgaccaatacctgtattacctgaacagaactcaaaatcagtccggaagtgcccaaaacaaggacttgctgtttagccgtgggtctccagctggcatgtctgttcagcccaaaaactggctacctggaccctgttatcggcagcagcgcgtttctaaaacaaaaacagacaacaacaacagcaattttacctggactggtgcttcaaaatataacctcaatgggcgtgaatccatcatcaaccctggcactgctatggcctcacacaaagacgacgaagacaagttctttcccatgagcggtgtcatgatttttggaaaagagagcgccggagcttcaaacactgcattggacaatgtcatgattacagacgaagaggaaattaaagccactaaccctgtggccaccgaaagatttgggaccgtggcagtcaatttccagagcagcagcacagaccctgcgaccggagatgtgcatgctatgggagcattacctggcatggtgtggcaagatagagacgtgtacctgcagggtcccatttgggccaaaattcctcacacagatggacactttcacccgtctcctcttatgggcggctttggactcaagaacccgcctcctcagatcctcatcaaaaacacgcctgttcctgcgaatcctccggcggagttttcagctacaaagtttgcttcattcatcacccaatactccacaggacaagtgagtgtggaaattgaatgggagctgcagaaagaaaacagcaagcgctggaatcccgaagtgcagtacacatccaattatgcaaaatctgccaacgttgattttactgtggacaacaatggactttatactgagcctcgccccattggcacccgttaccttacccgtcccctgtaattacgtgttaatcaataaaccggttgattcgtttcagttgaactttggtctcctgtccttcttatcttatcggttaccatggttatagcttacacattaactgcttggttgcgcttcgcgataaaagacttacgtcatcgggttacccctagtgatggagttgcccactccctctctgcgcgctcgctcgctcggtggggcctgcggaccaaaggtccgcagacggcagagctctgctctgccggccccaccgagcgagcgagcgcgcagagagggagtgggcaa

SEQ ID NO: 4 - DNA, 3131 bp, Adeno-associated virus
gcggccgcgaattcgcccttggctgcgtcaactggaccaatgagaactttcccttcaatgattgcgtcgacaagatggtgatctggtgggaggagggcaagatgacggccaaggtcgtggagtccgccaaggccattctcggcggcagcaaggtgcgcgtggaccaaaagtgcaagtcgtccgcccagatcgaccccacccccgtgatcgtcacctccaacaccaacatgtgcgccgtgattgacgggaacagcaccaccttcgagcaccagcagcctctccaggaccggatgtttaagttcgaactcacccgccgtctggagcacgactttggcaaggtgacaaagcaggaagtcaaagagttcttccgctgggccagtgatcacgtgaccgaggtggcgcatgagttttacgtcagaaagggcggagccagcaaaagacccgcccccgatgacgcggataaaagcgagcccaagcgggcctgcccctcagtcgcggatccatcgacgtcagacgcggaaggagctccggtggactttgccgacaggtaccaaaacaaatgttctcgtcacgcgggcatgcttcagatgctgtttccctgcaaaacgtgcgagagaatgaatcggaatttcaacatttgcttcacacacggggtcagagactgctcagagtgtttccccggcgtgtcagaatctcaaccggtcgtcagaaagaggacgtatcggaaactccgtgcgattcatcatctgctggggcgggctcccgagattgcttgctcggcctgcgatctggtcaacgtggacctggatgactgtgtttctgagcaataaatgacttaaaccaggtatggctgccgatggttatcttccagattggctcgaggacaacctctctgagggcattcgcgagtggtgggcgctgaaacctggagccccgaagcccaaagccaaccagcaaaagcaggacgacggccggggtctggtgcttcctggctacaagtacctcggacccttcaacggactcgacaagggggagcccgtcaacgcggcggacgcagcggccctcgagcacgacaaggcttacgaccagcagctgcaggcgggtgacaatccgtacctgcggtataaccacgccgacgccgagtttcaggagcgtctgcaagaagatacgtcttttgggggcaacctcgggcgagcagtcttccaggccaagaagcgggttctcgaacctctcggtctggttgaggaaggcgctaagacggctcctggaaagaagagaccggtagagccatcaccccagcgttctccagactcctctacgggcatcggcaagaaaggccaacagcccgccagaaaaagactcaattttggtcagactggcgactcagagtcagttccagaccctcaacctctcggagaacctccagcagcgccctctggtgtgggacctaatacaatggctgcaggcggtggcgcaccaatggcagacaataacgaaggcgccgacggagtgggtagttcctcgggaaattggcattgcgattccacatggctgggcgacagagtcatcaccaccagcacccgaacctgggccctgcccacctacaacaaccacctctacaagcaaatctccaacgggacatcgggaggagccaccaacgacaacacctacttcggctacagcaccccctgggggtattttgactttaacagattccactgccacctttcaccacgtgactggcagcgactcatcaacaacaactggggattccgacccaagagactcagcttcaagctcttcaacatccaggtcaaggaggtcacgcagaatgaaggcaccaagaccatcgccaataacctcaccagcaccatccaggtgtttacggactcggagtaccagctgccgtacgttctcggctctgtccaccagggctgcctgcctccgttcccggcggacgtgttcatgattccccagtacggctacctaacactcaacaacggtagtcaggccgtgggacgctcctccttctactgcctggaatactttccttcgcagatgctgagaaccggcaacaacttccagtttacttacaccttcgaggacgtgcctttccacagcagctacgcccacagctagagcttggaccggctgatgaatcctctgattgaccagtacctgtactacttgtctcggactcaaacaacaggaggcacggcaaatacgcagactctgggcttcagccaaggtgggcctaatacaatggccaatcaggcaaagaactggctgccaggaccctgttaccgccaacaacgcgtctcaacgacaaccgggcaaaacaacaatagcaactttgcctggactgctgggaccaaataccatctgaatggaagaaattcattggctaatcctggcatcgctatggcaacacacaaagacgacgaggagcgtttttttcccagtaacgggatcctgatttttggcaaacaaaatgctgccagagacaatgcggattacagcgatgtcatgctcaccagcgaggaagaaatcaaaaccactaaccctgtggctacagaggaatacggtatcgtggcagataacttgcagcagcaaaacacggctcctcaaattggaactgtcaacagccagggggccttacccggtatggtctggcagaaccgggacgtgtacctgcagggtcccatctgggccaagattcctcacacggacggcaacttccacccgtctccgctgatgggcggctttggcctgaaacatcctccgcctcagatcctgatcaagaacacgcctgtacctgcggatcctccgaccaccttcaaccagtcaaagctgaactctttcatcacgcaatacagcaccggacaggtcagcgtggaaattgaatgggagctgcagaaggaaaacagcaagcgctggaaccccgagatccagtacacctccaactactacaaatctataagtgtggactttgctgttaatacagaaggcgtgtactctgaaccccgccccattggcacccgttacctcacccgtaatctgtaattgcctgttaatcaataaaccggttgattcgtttcagttgaactttggtctctgcgaagggcgaattc

SEQ ID NO: 5 - DNA, 255 bp, Adeno-associated virus 10
ggtaattcctccggaaattggcattgcgattccacatggctgggcgacagagtcatcaccaccagcacccgaacctgggtcctgcccacctacaacaaccacatctacaagcaaatctccagcgagacaggagccaccaacgacaaccactacttcggctacagcaccccctgggggtattttgactttaacagattccactgccacttttcaccacgtgactggcagcgactcatcaacaacaactggggattc

SEQ ID NO: 6 - protein, 738 aa, Adeno-associated virus 10
MAADGYLPDWLEDNLSEGIREWWDLKPGAPKPKANQQKQDDGRGLVLPGYKYLGPFNGLDKGEPVNAADAAALEHDKAYDQQLKAGDNPYLRYNHADAEFQERLQEDTSFGGNLGRAVFQAKKRVLEPLGLVEEAAKTAPGKKRPVEPSPQRSPDSSTGIGKKGQQPAKKRLNFGQTGESESVPDPQPIGEPPAGPSGLGSGTMAAGGGAPMADNNEGADGVGSSSGNWHCDSTWLGDRVITTSTRTWALPTYNNHLYKQISNGTSGGSTNDNTYFGYSTPWGYFDFNRFHCHFSPRDWQRLINNNWGFRPKRLSFKLFNIQVKEVTQNEGTKTIANNLTSTIQVFTDSEYQLPYVLGSAHQGCLPPFPADVFMIPQYGYLTLNNGSQAVGRSSFYCLEYFPSQMLRTGNNFEFSYTFEDVPFHSSYAHSQSLDRLMNPLIDQYLYYLSRTQSTGGTQGTQQLLFSQAGPANMSAQAKNWLPGPCYRQQRVSTTLSQNNNSNFAWTGATKYHLNGRDSLVNPGVAMATHKDDEERFFPSSGVLMFGKQGAGRDNVDYSSVMLTSEEEIKTTNPVATEQYGVVADNLQQANTGPIVGNVNSQGALPGMVWQNRDVYLQGPIWAKIPHTDGNFHPSPLMGGFGLKHPPPQILIKNTPVPADPPTTFSQAKLASFITQYSTGQVSVEIEWELQKENSKRWNPEIQYTSNYYKSTNVDFAVNTEGTYSEPRPIGTRYLTRNL

SEQ ID NO: 7 - protein, 738 aa, Adeno-associated virus 10
MAADGYLPDWLEDNLSEGIREWWDLKPGAPKPKANQQKQDDGRGLVLPGYKYLGPFNGLDKGEPVNAADAAALEHDKAYDQQLKAGDNPYLRYNHADAEFQERLQEDTSFGGNLGRAVFQAKKRVLEPLGLVEEGAKTAPGKKRPVEPSPQRSPDSSTGIGKKGQQPAKKRLNFGQTGDSESVPDPQPIGEPPAGPSGLGSGTMAAGGGAPMADNNEGADGVGSSSGNWHCDSTWLGDRVITTSTRTWALPTYNNHLYKQISNGTSGGSTNDNTYFGYSTPWGYFDFNRFHCHFSPRDWQRLINNNWGFRPKRLNFKLFNIQVKEVTQNEGTKTIANNLTSTIQVFTDSEYQLPYVLGSAHQGCLPPFPADVFMIPQYGYLTLNNGSQAVGRSSFYCLEYFPSQMLRTGNNFEFSYQFEDVPFHSSYAHSQSLDRLMNPLIDQYLYYLSRTQSTGGTAGTQQLLFSQAGPNNMSAQAKNWLPGPCYRQQRVSTTLSQNNNSNFAWTGATKYHLNGRDSLVNPGVAMATHKDDEERFFPSSGVLMFGKQGAGKDNVDYSSVMLTSEEEIKTTNPVATEQYGVVADNLQQQNAAPIVGAVNSQGALPGMVWQNRDVYLQGPIWAKIPHTDGNFHPSPLMGGFGLKHPPPQILIKNTPVPADPPTTFSQAKLASFITQYSTGQVSVEIEWELQKENSKRWNPEIQYTSNYYKSTNVDFAVNTDGTYSEPRPIGTRYLTRNL

SEQ ID NO: 8 - DNA, 258 bp, Adeno-associated virus 11
ggtaattcctccggaaattggcattgcgattccacatggctgggcgacagagtcatcaccaccagcacccgaacctgggccctgccaacctacaacaaccacctctacaaacaaatctccagcgcttcaacgggggccagcaacgacaaccactactttggctacagcaccccctgggggtattttgactttaacagattccactgccacttctcaccacgtgactggcagcgactcatcaacaacaactggggattc

SEQ ID NO: 9 - DNA, 255 bp, Adeno-associated virus 12
ggtaattcctccggaaattggcattgcgattccacatggctgggcgaccgagtcattaccaccagcacccggacttgggccctgcccacctacaacaaccacctctacaagcaaatctccagccaatcgggtgccaccaacgacaaccactacttcggctacagcaccccttgggggtattttgatttcaacagattccactgccatttctcaccacgtgactggcagcgactcatcaacaacaactggggattc

SEQ ID NO: 10 - DNA, 2208 bp, Adeno-associated virus 2
atggctgccgatggttatcttccagattggctcgaggacactctctctgaaggaataagacagtggtggaagctcaaacctggcccaccaccaccaaagcccgcagagcggcataaggacgacagcaggggtcttgtgcttcctgggtacaagtacctcggacccttcaacggactcgacaagggagagccggtcaacgaggcagacgccgcggccctcgagcacgacaaagcctacgaccggcagctcgacagcggagacaacccgtacctcaagtacaaccacgccgacgcggagtttcaggagcgccttaaagaagatacgtcttttgggggcaacctcggacgagcagtcttccaggcgaaaaagagggttcttgaacctctgggcctggttgaggaacctgttaagacggctccgggaaaaaagaggccggtagagcactctcctgtggagccagactcctcctcgggaaccggaaaggcgggccagcagcctgcaagaaaaagattgaattttggtcagactggagacgcagactcagtacctgacccccagcctctcggacagccaccagcagccccctctggtctgggaactaatacgatggctacaggcagtggcgcaccaatggcagacaataacgagggcgccgacggagtgggtaattcctcgggaaattggcattgcgattccacatggatgggcgacagagtcatcaccaccagcacccgaacctgggccctgcccacctacaacaaccacctctacaaacaaatttccagccaatcaggagcctcgaacgacaatcactactttggctacagcaccccttgggggtattttgacttcaacagattccactgccacttttcaccacgtgactggcaaagactcatcaacaacaactggggattccgacccaagagactcaacttcaagctctttaacattcaagtcaaagaggtcacgcagaatgacggtacgacgacgattgccaataaccttaccagcacggttcaggtgtttactgactcggagtaccagctcccgtacgtcctcggctcggcgcatcaaggatgcctcccgccgttcccagcagacgtcttcatggtgccacagtatggatacctcaccctgaacaacgggagtcaggcagtaggacgctcttcattttactgcctggagtactttccttctcagatgctgcgtaccggaaacaactttaccttcagctacacttttgaggacgttcctttccacagcagctacgctcacagccagagtctggaccgtctcatgaatcctctcatcgaccagtacctgtattacttgagcagaacaaacactccaagtggaaccaccacgcagtcaaggcttcagttttctcaggccggagcgagtgacattcgggaccagtctaggaactggcttcctggaccctgttaccgccagcagcgagtatcaaagacatctgcggataacaacaacagtgaatactcgtggactggagctaccaagtaccacctcaatggcagagactctctggtgaatccgggcccggccatggcaagccacaaggacgatgaagaaaagttttttcctcagagcggggttctcatctttgggaagcaaggctcagagaaaacaaatgtggacattgaaaaggtcatgattacagacgaagaggaaatcaggacaaccaatcccgtggctacggagcagtatggttctgtatctaccaacctccagagaggcaacagacaagcagctaccgcagatgtcaacacacaaggcgttcttccaggcatggtctggcaggacagagatgtgtaccttcaggggcccatctgggcaaagattccacacacggacggacattttcacccctctcccctcatgggtggattcggacttaaacaccctcctccacagattctcatcaagaacaccccggtacctgcgaatccttcgaccaccttcagtgcggcaaagtttgcttccttcatcacacagtactccacgggacaggtcagcgtggagatcgagtgggagctgcagaaggaaaacagcaaacgctggaatcccgaaattcagtacacttccaactacaacaagtctgttaatgtggactttactgtggacactaatggcgtgtattcagagcctcgccccattggcaccagatacctgactcgtaatctgtaa

SEQ ID NO: 11 - protein, 735 aa, Adeno-associated virus 2 [sequence omitted]

SEQ ID NO: 12 - protein, 621 aa, Adeno-associated virus 2
MPGFYEIVIKVPSDLDGHLPGISDSFVNWVAEKEWELPPDSDMDLNLIEQAPLTVAEKLQRDFLTEWRRVSKAPEALFFVQFEKGESYFHMHVLVETTGVKSMVLGRFLSQIREKLIQRIYRGIEPTLPNWFAVTKTRNGAGGGNKVVDECYIPNYLLPKTQPELQWAWTNMEQYLSACLNLTERKRLVAQHLTHVSQTQEQNKENQNPNSDAPVIRSKTSARYMELVGWLVDKGITSEKQWIQEDQASYISFNAASNSRSQIKAALDNAGKIMSLTKTAPDYLVGQQPVEDISSNRIYKILELNGYDPQYAASVFLGWATKKFGKRNTIWLFGPATTGKTNIAEAIAHTVPFYGCVNWTNENFPFNDCVDKMVIWWEEGKMTAKVVESAKAILGGSKVRVDQKCKSSAQIDPTPVIVTSNTNMCAVIDGNSTTFEHQQPLQDRMFKFELTRRLDHDFGKVTKQEVKDFFRWAKDHVVEVEHEFYVKKGGAKKRPAPSDADISEPKRVRESVAQPSTSDAEASINYADRYQNKCSRHVGMNLMLFPCRQCERMNQNSNICFTHGQKDCLECFPVSESQPVSVVKKAYQKLCYIHHIMGKVPDACTACDLVNVDLDDCIFEQ

SEQ ID NO: 13 - DNA, 4675 bp, Adeno-associated virus 2
ttggccactccctctctgcgcgctcgctcgctcactgaggccgggcgaccaaaggtcgcccgacgcccgggctttgcccgggcggcctcagtgagcgagcgagcgcgcagagagggagtggccaactccatcactaggggttcctggaggggtggagtcgtgacgtgaattacgtcatagggttagggaggtcctgtattagaggtcacgtgagtgttttgcgacattttgcgacaccatgtggtcacgctgggtatttaagcccgagtgagcacgcagggtctccattttgaagcgggaggtttgaacgcgcagccgccatgccggggttttacgagattgtgattaaggtccccagcgaccttgacgggcatctgcccggcatttctgacagctttgtgaactgggtggccgagaaggaatgggagttgccgccagattctgacatggatctgaatctgattgagcaggcacccctgaccgtggccgagaagctgcagcgcgactttctgacggaatggcgccgtgtgagtaaggccccggaggcccttttctttgtgcaatttgagaagggagagagctacttccacatgcacgtgctcgtggaaaccaccggggtgaaatccatggttttgggacgtttcctgagtcagattcgcgaaaaactgattcagagaatttaccgcgggatcgagccgactttgccaaactggttcgcggtcacaaagaccagaaatggcgccggaggcgggaacaaggtggtggatgagtgctacatccccaattacttgctccccaaaacccagcctgagctccagtgggcgtggactaatatggaacagtatttaagcgcctgtttgaatctcacggagcgtaaacggttggtggcgcagcatctgacgcacgtgtcgcagacgcaggagcagaacaaagagaatcagaatcccaattctgatgcgccggtgatcagatcaaaaacttcagccaggtacatggagctggtcgggtggctcgtggacaaggggattacctcggagaagcagtggatccaggaggaccaggcctcatacatctccttcaatgcggcctccaactcgcggtcccaaatcaaggctgccttggacaatgcgggaaagattatgagcctgactaaaaccgcccccgactacctggtgggccagcagcccgtggaggacatttccagcaatcggatttataaaattttggaactaaacgggtacgatccccaatatgcggcttccgtctttctgggatgggccacgaaaaagttcggcaagaggaacaccatctggctgtttgggcctgcaactaccgggaagaccaacatcgcggaggccatagcccacactgtgcccttctacgggtgcgtaaactggaccaatgagaactttcccttcaacgactgtgtcgacaagatggtgatctggtgggaggaggggaagatgaccgccaaggtcgtggagtcggccaaagccattctcggaggaagcaaggtgcgcgtggaccagaaatgcaagtcctcggcccagatagacccgactcccgtgatcgtcacctccaacaccaacatgtgcgccgtgattgacgggaactcaacgaccttcgaacaccagcagccgttgcaagaccggatgttcaaatttgaactcacccgccgtctggatcatgactttgggaaggtcaccaagcaggaagtcaaagactttttccggtgggcaaaggatcacgtggttgaggtggagcatgaattctacgtcaaaaagggtggagccaagaaaagacccgcccccagtgacgcagatataagtgagcccaaacgggtgcgcgagtcagttgcgcagccatcgacgtcagacgcggaagcttcgatcaactacgcagacaggtaccaaaacaaatgttctcgtcacgtgggcatgaatctgatgctgtttccctgcagacaatgcgagagaatgaatcagaattcaaatatctgcttcactcacggacagaaagactgtttagagtgctttcccgtgtcagaatctcaacccgtttctgtcgtcaaaaaggcgtatcagaaactgtgctacattcatcatatcatgggaaaggtgccagacgcttgcactgcctgcgatctggtcaatgtggatttggatgactgcatctttgaacaataaatgatttaaatcaggtatggctgccgatggttatcttccagattggctcgaggacactctctctgaaggaataagacagtggtggaagctcaaacctggcccaccaccaccaaagcccgcagagcggcataaggacgacagcaggggtcttgtgcttcctgggtacaagtacctcggacccttcaacggactcgacaagggagagccggtcaacgaggcagacgccgcggccctcgagcacgtacaaagcctacgaccggcagctcgacagcggagacaacccgtacctcaagtacaaccacgccgacgcggagtttcaggagcgccttaaagaagatacgtcttttgggggcaacctcggacgagcagtcttccaggcgaaaaagagggttcttgaacctctgggcctggttgaggaacctgttaagacggctccgggaaaaaagaggccggtagagcactctcctgtggagccagactcctcctcgggaaccggaaaggcgggccagcagcctgcaagaaaaagattgaattttggtcagactggagacgcagactcagtacctgacccccagcctctcggacagccaccagcagccccctctggtctgggaactaatacgatggctacaggcagtggcgcaccaatggcagacaataacgagggcgccgacggagtgggtaattcctccggaaattggcattgcgattccacatggatgggcgacagagtcatcaccaccagcacccgaacctgggccctgcccacctacaacaaccacctctacaaacaaatttccagccaatcaggagcctcgaacgacaatcactactttggctacagcaccccttgggggtattttgacttcaacagattccactgccacttttcaccacgtgactggcaaagactcatcaacaacaactggggattccgacccaagagactcaacttcaagctctttaacattcaagtcaaagaggtcacgcagaatgacggtacgacgacgattgccaataaccttaccagcacggttcaggtgtttactgactcggagtaccagctcccgtacgtcctcggctcggcgcatcaaggatgcctcccgccgttcccagcagacgtcttcatggtgccacagtatggatacctcaccctgaacaacgggagtcaggcagtaggacgctcttcattttactgcctggagtactttccttctcagatgctgcgtaccggaaacaactttaccttcagctacacttttgaggacgttcctttccacagcagctacgctcacagccagagtctggaccgtctcatgaatcctctcatcgaccagtacctgtattacttgagcagaacaaacactccaagtggaaccaccacgcagtcaaggcttcagttttctcaggccggagcgagtgacattcgggaccagtctaggaactggcttcctggaccctgttaccgccagcagcgagtatcaaagacatctgcggataacaacaacagtgaatactcgtggactggagctaccaagtaccacctcaatggcagagactctctggtgaatccggccatggcaagccacaaggacgatgaagaaaagttttttcctcagagcggggttctcatctttgggaagcaaggctcagagaaaacaaatgtgaacattgaaaaggtcatgattacagacgaagaggaaatcggaacaaccaatcccgtggctacggagcagtatggttctgtatctaccaacctccagagaggcaacagacaagcagctaccgcagatgtcaacacacaaggcgttcttccaggcatggtctggcaggacagagatgtgtaccttcaggggcccatctgggcaaagattccacacacggacggacattttcacccctctcccctcatgggtggattcggacttaaacaccctcctccacagattctcatcaagaacaccccggtacctgcgaatccttcgaccaccttcagtgcggcaaagtttgcttccttcatcacacagtactccacgggacacggtcagcgtggagatcgagtgggagctgcagaaggaaaacagcaaacgctggaatcccgaaattcagtacacttccaactacaacaagtctgttaatcgtggacttaccgtggatactaatggcgtgtattcagagcctcgccccattggcaccagatacctgactcgtaatctgtaattgcttgttaatcaataaaccgtttaattcgtttcagttgaactttggtctctgcgtatttctttcttatctagtttccatggctacgtagataagtagcatggcgggttaatcattaactacaaggaacccctagtgatggagttggccactccctctctgcgcgctcgctcgctcactgaggccgggcgaccaaaggtcgcccgacgcccgggctttgcccgggcggcctcagtgagcgagcgagcgcgcagagagggagtggccaa

SEQ ID NO: 14 - DNA, 4679 bp, Adeno-associated virus 2
ttggccactccctctctgcgcgctcgctcgctcactgaggccgggcgaccaaaggtcgcccgacgcccgggctttgcccgggcggcctcagtgagcgagcgagcgcgcagagagggagtggccaactccatcactaggggttcctggaggggtggagtcgtgacgtgaattacgtcatagggttagggaggtcctgtattagaggtcacgtgagtgttttgcgacattttgcgacaccatgtggtcacgctgggtatttaagcccgagtgagcacgcagggtctccattttgaagcgggaggtttgaacgcgcagccgccatgccggggttttacgagattgtgattaaggtccccagcgaccttgacgggcatctgcccggcatttctgacagctttgtgaactgggtggccgagaaggaatgggagttgccgccagattctgacatggatctgaatctgattgagcaggcacccctgaccgtggccgagaagctgcagcgcgactttctgacggaatggcgccgtgtgagtaaggccccggaggcccttttctttgtgcaatttgagaagggagagagctacttccacatgcacgtgctcgtggaaaccaccggggtgaaatccatggttttgggacgtttcctgagtcagattcgcgaaaaactgattcagagaatttaccgcgggatcgagccgactttgccaaactggttcgcggtcacaaagaccagaaatggcgccggaggcgggaacaaggtggtggatgagtgctacatccccaattacttgctccccaaaacccagcctgagctccagtgggcgtggactaatatggaacagtatttaagcgcctgtttgaatctcacggagcgtaaacggttggtggcgcagcatctgacgcacgtgtcgcagacgcaggagcagaacaaagagaatcagaatcccaattctgatgcgccggtgatcagatcaaaaacttcagccaggtacatggagctggtcgggtggctcgtggacaaggggattacctcggagaagcagtggatccaggaggaccaggcctcatacatctccttcaatgcggcctccaactcgcggtcccaaatcaaggctgccttggacaatgcgggaaagattatgagcctgactaaaaccgcccccgactacctggtgggccagcagcccgtggaggacatttccagcaatcggatttataaaattttggaactaaacgggtacgatccccaatatgcggcttccgtctttctgggatgggccacgaaaaagttcggcaagaggaacaccatctggctgtttgggcctgcaactaccgggaagaccaacatcgcggaggccatagcccacactgtgcccttctacgggtgcgtaaactggaccaatgagaactttcccttcaacgactgtgtcgacaagatggtgatctggtgggaggaggggaagatgaccgccaaggtcgtggagtcggccaaagccattctcggaggaagcaaggtgcgcgtggaccagaaatgcaagtcctcggcccagatagacccgactcccgtgatcgtcacctccaacaccaacatgtgcgccgtgattgacgggaactcaacgaccttcgaacaccagcagccgttgcaagaccggatgttcaaatttgaactcacccgccgtctggatcatgactttgggaaggtcaccaagcaggaagtcaaagactttttccggtgggcaaaggatcacgtggttgaggtggagcatgaattctacgtcaaaaagggtggagccaagaaaagacccgcccccagtgacgcagatataagtgagcccaaacgggtgcgcgagtcagttgcgcagccatcgacgtcagacgcggaagcttcgatcaactacgcagacaggtaccaaaacaaatgttctcgtcacgtgggcatgaatctgatgctgtttccctgcagacaatgcgagagaatgaatcagaattcaaatatctgcttcactcacggacagaaagactgtttagagtgctttcccgtgtcagaatctcaacccgtttctgtcgtcaaaaaggcgtatcagaaactgtgctacattcatcatatcatgggaaaggtgccagacgcttgcactgcctgcgatctggtcaatgtggatttggatgactgcatctttgaacaataaatgatttaaatcaggtatggctgccgatggttatcttccagattggctcgaggacactctctctgaaggaataagacagtggtggaagctcaaacctggcccaccaccaccaaagcccgcagagcggcataaggacgacagcaggggtcttgtgcttcctgggtacaagtacctcggacccttcaacggactcgacaagggagagccggtcaacgaggcagacgccgcggccctcgagcacgacaaagcctacgaccggcagctcgacagcggagacaacccgtacctcaagtacaaccacgccgacgcggagtttcaggagcgccttaaagaagatacgtcttttgggggcaacctcggacgagcagtcttccaggcgaaaaagagggttcttgaacctctgggcctggttgaggaacctgttaagacggctccgggaaaaaagaggccggtagagcactctcctgtggagccagactcctcctcgggaaccggaaaggcgggccagcagcctgcaagaaaaagattgaattttggtcagactggagacgcagactcagtacctgacccccagcctctcggacagccaccagcagccccctctggtctgggaactaatacgatggctacaggcagtggcgcaccaatggcagacaataacgagggcgccgacggagtgggtaattcctccggaaattggcattgcgattccacatggatgggcgacagagtcatcaccaccagcacccgaacctgggccctgcccacctacaacaaccacctctacaaacaaatttccagccaatcaggagcctcgaacgacaatcactactttggctacagcaccccttgggggtattttgacttcaacagattccactgccacttttcaccacgtgactggcaaagactcatcaacaacaactggggattccgacccaagagactcaacttcaagctctttaacattcaagtcaaagaggtcacgcagaatgacggtacgacgacgattgccaataaccttaccagcacggttcaggtgtttactgactcggagtaccagctcccgtacgtcctcggctcggcgcatcaaggatgcctcccgccgttcccagcagacgtcttcatggtgccacagtatggatacctcaccctgaacaacgggagtcaggcagtaggacgctcttcattttactgcctggagtactttccttctcagatgctgcgtaccggaaacaactttaccttcagctacacttttgaggacgttcctttccacagcagctacgctcacagccagagtctggaccgtctcatgaatcctctcatcgaccagtacctgtattacttgagcagaacaaacactccaagtggaaccaccacgcagtcaaggcttcagttttctcaggccggagcgagtgacattcgggaccagtctaggaactggcttcctggaccctgttaccgccagcagcgagtatcaaagacatctgcggataacaacaacagtgaatactcgtggactggagctaccaagtaccacctcaatggcagagactctctggtgaatccgggcccggccatggcaagccacaaggacgatgaagaaaagttttttcctcagagcggggttctcatctttgggaagcaaggctcagagaaaacaaatgtggacattgaaaaggtcatgattacagacgaagaggaaatcaggacaaccaatcccgtggctacggagcagtatggttctgtatctaccaacctccagagaggcaacagacaagcagctaccgcagatgtcaacacacaaggcgttcttccaggcatggtctggcaggacagagatgtgtaccttcaggggcccatctgggcaaagattccacacacggacggacattttcacccctctcccctcatgggtggattcggacttaaacaccctcctccacagattctcatcaagaacaccccggtacctgcgaatccttcgaccaccttcagtgcggcaaagtttgcttccttcatcacacagtactccacgggacaggtcagcgtggagatcgagtgggagctgcagaaggaaaacagcaaacgctggaatcccgaaattcagtacacttccaactacaacaagtctgttaatgtggactttactgtggacactaatggcgtgtattcagagcctcgccccattggcaccagatacctgactcgtaatctgtaattgcttgttaatcaataaaccgtttaattcgtttcagttgaactttggtctctgcgtatttctttcttatctagtttccatggctacgtagataagtagcatggcgggttaatcattaactacaaggaacccctagtgatggagttggccactccctctctgcgcgctcgctcgctcactgaggccgggcgaccaaaggtcgcccgacgcccgggctttgcccgggcggcctcagtgagcgagcgagcgcgcagagagggagtggccaa

SEQ ID NO: 15 - protein, 725 aa, Adeno-associated virus 5
MAADGYLPDWLEDTLSEGIRQWWKLKPGPPPPKPAERHKDDSRGLVLPGYKYLGPFNGLDKGEPVNEADAAALEHDKAYDRQLDSGDNPYLKYNHADAEFQERLKEDTSFGGNLGRAVFQAKKRVLEPFGLVEEGAKTAPTGKRIDDHFPKRKKARTEEDSKPSTSSDAEAGPSGSQQLQIPAQPASSLGADTMSAGGGGPLGDNNQGADGVGNASGDWHCDSTWMGDRVVTKSTRTWVLPSYNNHQYREIKSGSVDGSNANAYFGYSTPWGYFDFNRFHSHWSPRDWQRLINNYWGFRPRSLRVKIFNIQVKEVTVQDSTTTIANNLTSTVQVFTDDDYQLPYVVGNGTEGCLPAFPPQVFTLPQYGYATLNRDNTENPTERSSFFCLEYFPSKMLRTGNNFEFTYNFEEVPFHSSFAPSQNLFKLANPLVDQYLYRFVSTNNTGGVQFNKNLAGRYANTYKNWFPGPMGRTQGWNLGSGVNRASVSAFATTNRMELEGASYQVPPQPNGMTNNLQGSNTYALENTMIFNSQPANPGTTATYLEGNMLITSESETQPVNRVAYNVGGQMATNNQSSTTAPTTGTYNLQEIVPGSVWMERDVYLQGPIWAKIPETGAHFHPSPAMGGFGLKHPPPMMLIKNTPVPGNITSFSDVPVSSFITQYSTGQVTVEMEWELKKENSKRWNPEIQYTNNYNDPQFVDFAPDSTGEYRTTRPIGTRYLTRPL

SEQ ID NO: 16 - protein, 644 aa, Artificial Sequence
  Description of Artificial Sequence: Synthetic polypeptide
  MOD_RES (434)..(434): Xaa = any amino acid
KAYDQQLKAGDNPYLRYNHADAEFQERLQEDTSFGGNLGRAVFQAKKRVLEPLGLVETPAKTAPGKKRPVDSPDSTSGIGKKGQQPAKKRLNFGQTGDSESVPDPQPIGEPPAGPSGLGSGTMAAGGGAPMADNNEGADGVGNASGNWHCDSTWLGDRVITTSTRTWALPTYNNHLYKQISSQSAGSTNDNVYFGYSTPWGYFDFNRFHCHFSPRDWQRLINNNWGFRPKKLNFKLFNIQVKEVTTNDGVTTIANNLTSTVQVFSDSEYQLPYVLGSAHQGCLPPFPADVFMIPQYGYLTLNNGSQSVGRSSFYCLEYFPSQMLRTGNNFTFSYTFEDVPFHSSYAHSQSLDRLMNPLIDQYLYYLARTQSNAGGTAGNRELQFYQGGPTTMAEQAKNWLPGPCFRQQRVSKTLDQNNNSNFAWTGATKYHLNXRNSLVNPGVAMATHKDDEERFFPSSGVLIFGKTGAANKTTLENVLMTNEEEIRPTNPVATEEYGIVSSNLQAASTAAQTQVVNNQGALPGMVWQNRDVYLQGPIWAKIPHTDGNFHPSPLMGGFGLKHPPPQILIKNTPVPANPPEVFTPAKFASFITQYSTGQVSVEIEWELQKENSKRWNPEIQYTSNFDKQTGVDFAVDSQGVYSEP

SEQ ID NO: 17 - DNA, 1933 bp, Adeno-associated virus
caaggcctacgaccagcagctcaaagcgggtgacaatccgtacctgcggtataaccacgccgacgccgagtttcaggagtgtcttcaagaagatacgtcttttgggggcaacctcgggcgagcagtcttccaggccaaaaagcgggttctcgaacctcttggtctggttgagacgccagctaagacggcacctggaaagaagcgaccggtagactcgccagactccacctcgggcatcggcaagaaaggccagcagcccgcgaaaaagagactcaactttgggcagactggcgactcagagtcagtccccgaccctcaaccaatcggagaaccaccagcaggcccctctggtctgggatctggtacaatggttgcaggcggtggcgcaccaatggctgacaataacgagggcgccgacggagtgggtaatgcctcaggaaattggcattgcgattccacatggctgggcgacagagtcatcaccaccagcacccgaacctgggccctgcccacctacaacaaccacctctacaagcaaatctccagtcagtcagcagggagcaccaacgataacgtctatttcggctacagcaccccctgggggtattttgacttcaacagattccattgccacttctcaccacgtgactggcagcgacttatcaacaacaactggggattccggcccaagaagctcaacttcaagctcttcaacatccaggtcaaggaggtcacgacgaatgacggtgtcacaaccatcgctaataaccttaccagcacggttcaggtcttttcggactcggaatatcaactgccgtacgtcctcggctccgcgcaccagggctgcctgcctccgttcccggcagacgtgttcatgattccgcagtacggatacctgactctgaacaatggcagccaatcggtaggccgttcctccttctactgcctggagtactttccttctcagatgctgagaacgggcaacaacttcacctttagctacaccttcgaggacgtgcctttccacagcagctacgcgcacagccagagtctggaccggctgatgaatcccctcatcgaccagtacctgtactacttggccagaacacagagcaacgcaggaggtactgctggcaatcgggaactgcagttttatcagggcggacctaccaccatggccgaacaagcaaagaactggctgcccggaccttgcttccggcaacagagagtatccaagacgctggatcaaaataacaacagcaactttgcctggactggtgccacaaaataccatttaaatggaagaaattcattggttaatcccggtgtcgccatggcaacccacaaggacgacgaggaacgcttctccccttcgagcggagttctaatttttggcaaaactggagcagctaataaaactacattagaaaacgtgctcatgacaaatgaagaagaaattcgtcctaccaacccggtagctaccgaggaatacgggattgtaagcagcaacttgcaggcggctagcaccgcagcccagacacaagttgttaacaaccagggagccttacctggcatggtctggcagaaccgggacgtgtacctgcaaggtcccatttgggccaagattcctcacacggacggcaactttcacccgtctcctctaatgggtggctttggactgaaacacccgcctccccagatcctgatcaaaaacacgccggtacctgctaatcctccagaagtgtttactcctgccaagtttgcttccttcatcacgcagtacagcaccgggcaagtcagcgttgagatcgagtgggagctgcagaaagagaacagcaagcgctggaacccagagattcagtacacctccaactttgacaaacagactggagtggactttgctgttgacagccagggtgtttactctgagcct

SEQ ID NO: 18 - protein, 644 aa, Artificial Sequence
  Description of Artificial Sequence: Synthetic polypeptide
KAYDQQLKAGDNPYLRYNHADAEFQECLQEDTSFGGNLGRAVFQAKKRVLEPLGLVETPAKTAPGKKRPVDSPDSTSGIGKKGQQPAKKRLNFGQTGDSESVPDPQPIGEPPAGPSGLGSGTMVAGGGAPMADNNEGADGVGNASGNWHCDSTWLGDRVITTSTRTWALPTYNNHLYKQISSQSAGSTNDNVYFGYSTPWGYFDFNRFHCHFSPRDWQRLINNNWGFRPKKLNFKLFNIQVKEVTTNDGVTTIANNLTSTVQVFSDSEYQLPYVLGSAHQGCLPPFPADVFMIPQYGYLTLNNGSQSVGRSSFYCLEYFPSQMLRTGNNFTFSYTFEDVPFHSSYAHSQSLDRLMNPLIDQYLYYLARTQSNAGGTAGNRELQFYQGGPTTMAEQAKNWLPGPCFRQQRVSKTLDQNNNSNFAWTGATKYHLNGRNSLVNPGVAMATHKDDEERFSPSSGVLIFGKTGAANKTTLENVLMTNEEEIRPTNPVATEEYGIVSSNLQAASTAAQTQVVNNQGALPGMVWQNRDVYLQGPIWAKIPHTDGNFHPSPLMGGFGLKHPPPQILIKNTPVPANPPEVFTPAKFASFITQYSTGQVSVEIEWELQKENSKRWNPEIQYTSNFDKQTGVDFAVDSQGVYSEP

SEQ ID NO: 19 - DNA, 1933 bp, Adeno-associated virus
caaggcctacgaccagcagctcaaagcgggtgacaatccgtacctgcggtataaccacgccgacgccgagtttcaggagcgtcttcaagaagatacgtcttttgggggcaacctcgggcgagcagtcttccaggccaaaaagcgggttctcgaacctcttggtctggttgagacgccagctaagacggcacctggaaagaagcgaccggtagactcgccagactccacctcgggcatcggcaagaaaggccagcagcccgcgaaaaagagactcaactttgggcagactggcgactcagagccagtccccgaccctcaaccaatcggagaaccaccagcaggcccctctggtctgggatctggtacaatggctgcaggcggtggcgcaccaatggctgacaataacgagggcgccgacggagtgggtaatgcctcaggaaattggcattgcgattccacacggctgggcgacagagtcatcaccaccagcacccgaacctgggccctgcccacctacaacaaccacctctacaagcaaatctccagtcagtcagcagggagcaccaacgataacgtctatttcggctacagcaccccctgggggtattttgacttcaacagattccattgccacttctcaccacgtgactggcagcgacttatcaacaacaactggggattccggcccaagaagctcaacttcaagctcttcaacatccaggtcaaggaggtcacgacgaatgacggcgtcacaaccatcgctaataaccttaccagcacggttcaggtcttttcggactcggaatatcaactgccgtacgtcctcggctccgcgcaccagggctgcctgcctccgttcccggcagacgtgttcatgattccgcagtacggatacctgactctgaacaatggcagccaatcggtaggccgttcctccttctactgcctggagtactttccttctcagatgctgagaacgggcaacaacttcacctttagctacaccttcgaggacgtgcctttccacagcagctacgcgcacagccagagtctgggccggctgatgaatcccctcatcgaccagtacctgtactacttggccagaacacagagcaacgcaggaggtactgctggcaatcgggaactgcagttttatcagggcggacctaccaccatggccgaacaagcaaagaactggctgcccggaccttgcttccggcaacagagagtatccaagacgctggatcaaaataacaacagcaactttgcctggactggtgccacaaaataccatttaaatggaagaaattcattggttaatcccggtgtcgccatggcaacccacaaggacgacgaggaacgcttcttcccttcgagcggagttctaatttttggcaaaactggagcagctaataaaactacattagaaaacgtgctcatgacaaatgaagaagaaattcgtcctaccaacccggtagctaccgaggaatacgggattgtaagcagcaacttgcaggcggctagcaccgcagcccagacacaagttgttaacaaccagggagccttacctggcatggtctggcagaaccgggacgtgtacctgcaaggtcccatttgggccaagattcctcacacggacggcaactttcacccgtctcctctaatgggtggctttggactgaaacacccgcctccccagatcctgatcaaaaacacaccggtacctgctaatcctccagaagtgtttactcctgccaagtttgcttccttcatcacgcagtacagcaccgggcaagtcagcgttgagatcgaatgggagctgcagaaagagaacagcaagcgctggaacccagagattcagtacacctccaactttgacaaacagactggagtggactttgctgttgacagccagggtgtttactctgagcct

SEQ ID NO: 20 - protein, 644 aa, Artificial Sequence
  Description of Artificial Sequence: Synthetic polypeptide
KAYDQQLKAGDNPYLRYNHADAEFQERLQEDTSFGGNLGRAVFQAKKRVLEPLGLVETPAKTAPGKKRPVDSPDSTSGIGKKGQQPAKKRLNFGQTGDSEPVPDPQPIGEPPAGPSGLGSGTMAAGGGAPMADNNEGADGVGNASGNWHCDSTRLGDRVITTSTRTWALPTYNNHLYKQISSQSAGSTNDNVYFGYSTPWGYFDFNRFHCHFSPRDWQRLINNNWGFRPKKLNFKLFNIQVKEVTTNDGVTTIANNLTSTVQVFSDSEYQLPYVLGSAHQGCLPPFPADVFMIPQYGYLTLNNGSQSVGRSSFYCLEYFPSQMLRTGNNFTFSYTFEDVPFHSSYAHSQSLGRLMNPLIDQYLYYLARTQSNAGGTAGNRELQFYQGGPTTMAEQAKNWLPGPCFRQQRVSKTLDQNNNSNFAWTGATKYHLNGRNSLVNPGVAMATHKDDEERFFPSSGVLIFGKTGAANKTTLENVLMTNEEEIRPTNPVATEEYGIVSSNLQAASTAAQTQVVNNQGALPGMVWQNRDVYLQGPIWAKIPHTDGNFHPSPLMGGFGLKHPPPQILIKNTPVPANPPEVFTPAKFASFITQYSTGQVSVEIEWELQKENSKRWNPEIQYTSNFDKQTGVDFAVDSQGVYSEP

SEQ ID NO: 21 - DNA, 1933 bp, Adeno-associated virus; identical to SEQ ID NO: 19

SEQ ID NO: 22 - protein, 644 aa, Artificial Sequence; identical to SEQ ID NO: 20
  Description of Artificial Sequence: Synthetic polypeptide

SEQ ID NO: 23 - DNA, 1933 bp, Adeno-associated virus
caaggcctacgaccagcagctcaaagcgggtgacaatccgtacctgcggtataaccacgccgacgccgagtttcaggagcgtcttcaagaagatacgtcttttgggggcaacctcgggcgagcagtcttccaggccaaaaagcgggttctcgaacctcttggtctggttgagacgccagctaagacggcacctggaaagaagcgaccggtagactcgccagactccacctcgggcatcggcaagaaaggccagcagcccgcgaaaaagagactcaactttgggcagactggcgactcagagtcagtccccgaccctcaaccaatcggagaaccaccagcaggcccctctggtctgggatctggtacaatggctgcaggcggtggcgcaccaatggctgacaatagcgagggcgccgacggagtgggtaatgcctcaggaaattggcattgcgattccacatggctgggcgacagagtcatcaccaccagcacccgaacctgggccctgcccacctacaacaaccacctctacaagcaaatctccagtcagtcagcagggagcaccaacgataacgtctatttcggctacagcaccccctgggggtattttgacttcaacagattccattgccacttctcaccacgtgactggcagcgacttatcaacaacaactggggattccggcccaagaagctcaacttcaagctcttcaacatccaggtcaaggaggtcacgacgaatgacggtgtcacaaccatcgctaataaccttaccagcacggttcaggtcttttcggactcggaatatcaactgccgtacgtcctcggctccgcgcaccagggctgcctgcctccgttcccggcagacgtgttcatgattccgcagtacggatacctgactctgaacaatggcagccaatcggtaggccgttcctccttctactgcctggagtactttccttctcagatgctgagaacgggcaacaacttcacctttagctacaccttcgaggacgtgcctttccacagcagctacgcgcacagccagagtctggaccggctgatgaatcccctcatcgaccagtacctgtactacttggccagaacacagagcaacgcaggaggtactgctggcaatcgggaactgcagttttatcagggcggacctaccaccatggccgaacaagcaaagaactggctgcccggaccttgcttccggcaacagagagtatccaagacgctggatcaaaataacaacagcaactttgcctggactggtgccacaaaataccatttaaatggaagaaattcattggttaatcccggtgtcgccatggcaacccacaaggacgacgaggaacgcttcttcccttcgagcggagttctaatttttggcaaaactggagcagctaataaaactacattagaaaacgtgctcatgacaaatgaagaagaaattcgtcctaccaacccggtagctaccgaggaatacgggattgtaagcagcaacttgcaggcggctagcaccgcagcccagacacaagttgttaacaaccagggagccttacctggcatggtctggcagaaccgggacgtgtacctgcaaggtcccatttgggccaagattcctcacacggacggcaactttcacccgtctcctctaatgggtggctttggactgaaacacccgcctccccagatcctgatcaaaaacacaccggtacctgctaatcctccagaagtgtttactcctgccaagcttgcttccttcatcacgcagtacagcaccgggcaagtcagcgttgagatcgagtgggagctgcagaaagagaacagcaagcgctggaacccagagattcagtacacctccaactttgacaaacagactggagtggactttgctgttgacagccagggtgtttactctgagcct

SEQ ID NO: 24 - protein, 644 aa, Artificial Sequence
  Description of Artificial Sequence: Synthetic polypeptide
KAYDQQLKAGDNPYLRYNHADAEFQERLQEDTSFGGNLGRAVFQAKKRVLEPLGLVETPAKTAPGKKRPVDSPDSTSGIGKKGQQPAKKRLNFGQTGDSESVPDPQPIGEPPAGPSGLGSGTMAAGGGAPMADNSEGADGVGNASGNWHCDSTWLGDRVITTSTRTWALPTYNNHLYKQISSQSAGSTNDNVYFGYSTPWGYFDFNRFHCHFSPRDWQRLINNNWGFRPKKLNFKLFNIQVKEVTTNDGVTTIANNLTSTVQVFSDSEYQLPYVLGSAHQGCLPPFPADVFMIPQYGYLTLNNGSQSVGRSSFYCLEYFPSQMLRTGNNFTFSYTFEDVPFHSSYAHSQSLDRLMNPLIDQYLYYLARTQSNAGGTAGNRELQFYQGGPTTMAEQAKNWLPGPCFRQQRVSKTLDQNNNSNFAWTGATKYHLNGRNSLVNPGVAMATHKDDEERFFPSSGVLIFGKTGAANKTTLENVLMTNEEEIRPTNPVATEEYGIVSSNLQAASTAAQTQVVNNQGALPGMVWQNRDVYLQGPIWAKIPHTDGNFHPSPLMGGFGLKHPPPQILIKNTPVPANPPEVFTPAKLASFITQYSTGQVSVEIEWELQKENSKRWNPEIQYTSNFDKQTGVDFAVDSQGVYSEP

SEQ ID NO: 25 - DNA, 1933 bp, Adeno-associated virus
caaggcctacgaccagcagctcaaagcgggtgacaatccgtacctgcggtataaccacgccgacgccgagtttcaggagcgtcttcaagaagatacgtcttttgggggcaacctcgggcgagcagtcttccaggccaaaaagcgggttctcgaacctcttggtctggttgagacgccagctaagacggcacctggaaagaagcgaccggtagactcgccagactccacctcgggcatcggcaagaaaggccagcagcccgcgaaaaagagactcaactttgggcagactggcgactcagagtcagtccccgaccctcaaccaatcggagaaccaccagcaggcccctctggtctgggatctggtacaatggctgcaggcggtggcgcaccaatggctgacaataacgagggcgccgacggagtgggtaatgcctcaggaaattggcattgcgattccacatggctgggcgacagagtcatcaccaccagcacccgaacctgggccctgcccacctacaacaaccacctctacaagcaaatctccagtcagtcagcagggagcaccaacgataacgtctatttcggctacagcaccccctgggggtattttgacttcaacagattccattgccacttctcaccacgtgactggcagcgacttatcaacaacaactggggattccggcccaagaagctcaacttcaagctcttcaacatccaggtcaaggaggtcacgacgaatgacggcgtcacaaccatcgctaataaccttaccagcacggttcaggtcttttcggacccggaatatcaactgccgtacgtcctcggctccgcgcaccagggctgcctgcctccgttcccggcagacgtgttcatgattccgcagtacggatacctgactctgaacaatggcagccaatcggtaggccgttcctccttctactgcctggagtactttccttctcagatgctgagaacgggcaacaacttcacctttagctacaccttcgaggacgtgcctttccacagcagctacgcgcacagccagagtctggaccggctgatgaatcccctcatcgaccagtacctgtactacttggccagaacacagagcaacgcaggaggtactgctggcaatcgggaactgcagttttatcagggcggacctaccaccatggccgaacaagcaaagaactggctgcccggaccttgcttccggcaacagagagtatccaagacgctggatcaaaataacaacagcaactttgcctggactggtgccacaaaataccatttaaatggaagaaattcattggttaatcccggtgtcgccatggcaacccacaaggacgacgaggaacgcttcttcccttcgagcggagttctaatttttggcaaaactggagcagctaataaaactacattagaaaacgtgctcatgacaaatgaagaagaaattcgtcctaccaacccggtagctaccgaggaatacgggattgtaagcagcaacttgcaggcggctagcaccgcagcccagacacaagttgttaacaaccagggagccttacctggcatggtctggcagaaccgggacgtgtacctgcaaggtcccatttgggccaagattcctcacacggacggcaactttcacccgtctcctctaatgggtggctttggactgaaacacccgcctccccagatcctgatcaaaaacacaccggtacctgctaatcctccagaagtgtttactcctgccaagattgcttccttcatcacgcagtacagcaccgggcaagtcagcgttgagatcgagtgggagctgcagaaagagaacagcaagcgctggaacccagagattcagtacacctccaactttgacaaacagactggagtggactttgctgttgacagccagggtgtttactctgagcct

SEQ ID NO: 26 - protein, 644 aa, Artificial Sequence
  Description of Artificial Sequence: Synthetic polypeptide
KAYDQQLKAGDNPYLRYNHADAEFQERLQEDTSFGGNLGRAVFQAKKRVLEPLGLVETPAKTAPGKKRPVDSPDSTSGIGKKGQQPAKKRLNFGQTGDSESVPDPQPIGEPPAGPSGLGSGTMAAGGGAPMADNNEGADGVGNASGNWHCDSTWLGDRVITTSTRTWALPTYNNHLYKQISSQSAGSTNDNVYFGYSTPWGYFDFNRFHCHFSPRDWQRLINNNWGFRPKKLNFKLFNIQVKEVTTNDGVTTIANNLTSTVQVFSDPEYQLPYVLGSAHQGCLPPFPADVFMIPQYGYLTLNNGSQSVGRSSFYCLEYFPSQMLRTGNNFTFSYTFEDVPFHSSYAHSQSLDRLMNPLIDQYLYYLARTQSNAGGTAGNRELQFYQGGPTTMAEQAKNWLPGPCFRQQRVSKTLDQNNNSNFAWTGATKYHLNGRNSLVNPGVAMATHKDDEERFFPSSGVLIFGKTGAANKTTLENVLMTNEEEIRPTNPVATEEYGIVSSNLQAASTAAQTQVVNNQGALPGMVWQNRDVYLQGPIWAKIPHTDGNFHPSPLMGGFGLKHPPPQILIKNTPVPANPPEVFTPAKIASFITQYSTGQVSVEIEWELQKENSKRWNPEIQYTSNFDKQTGVDFAVDSQGVYSEP

SEQ ID NO: 27 - protein, 738 aa, Artificial Sequence
  Description of Artificial Sequence: Synthetic polypeptide
MAADGYLPDWLEDNLSEGIREWWALKPGAPKPKANQQKQDDGRGLVLPGYKYLGPFNGLDKGEPVNAADAAALEHDKAYDQQLKAGDNPYLRYNHADAEFQERLQEDTSFGGNLGRAVFQAKKRVLEPLGLVEEGAKTAPGKKRPVEPSPQRSPDSTTGIGKKGQQPAKKRLNFGQTGDSESVPDPQPIGEPPAGPSGLGSGTMAAGGGAPMADNNEGADGVGSSSGNWHCDSTWLGDRVITTSTRTWALPTYNNHLYKQISNGTSGGSTNDNTYFGYSTPWGYFDFNRFHCHFSPRDWQRLINNNWGFRPKRLNFKLFNIQVKEVTQNEGTKTIANNLTSTIQVFTDSEYQLPYVLGSARQGCLPPFPADVFMIPQYGYLTLNNGSQAVGRSSFYCLEYFPSQMLRTGNNFEFSYQFEDVPFHSSYAHSQSLDRLMNPLIDQYLYYLSRTQSTGGTAGTQQLLFSQAGPNNMSAQAKNWLPGPCYRQQRVSTTLSQNNNSNFAWTGATKYHLNGRDSLVNPGVAMATHKDDEERFFPSSGVLMFGKQGAGKGNVDYSSVMLTSEEEIKTTNPVATEQYGVVADNLQQQNAAPIVGAVNSQGALPGMVWQNRDVYLQGPIWAKIPHTDGNFHPSPLMGGFGLKHPPPQILIKNTPVPADPPTTFSQAKLASFITQYSTGQVSVEIEWELQKENSKRWNPEIQYTSNYYKSTNVDFAVNTDGTYSEPRPIGTRYLTRNL

SEQ ID NO: 28 - DNA, 3121 bp, Adeno-associated virus
gaattcgcccttctacggctgcgtcaactggaccaatgagaactttcccttcaacgactgtgtcgacaagatggtgatctggtgggaggaggggaagatgaccgccaaggtcgtggagtcggccaaagccattctcggaggaagcaaggtgcgcgtggaccagaaatgcaagtcctcggcccagatagacccgactcccgtgatcgtcacctccaacaccaacatgtgcgccgtgattgacgggaactcaacgaccttcgaacaccagcagccgttgcaagaccggatgttcaaatttgaactcacccgccgtctggatcatgactttgggaaggtcaccaagcaggaagtcaaagactttttccggtgggcaaaggatcacgtggttgaggtggagcacgaattctacgtcaaaaagggtggagccaagaaaagacccgcccccagtgacgcagatataagtgagcccaaacgggtgcgcgagtcagttgcgcagccatcgacgtcagacgcggaagcttcgatcaactacgcagacaggtaccaaaacaaatgttctcgtcacgcgggcatgaatctgatgctgtttccctgcagacaatgcgagagaatgaatcagaattcaaatatctgcttcactcacggacagaaagactgtttagagtgctttcccgtgtcagaatctcaacccgtttctgtcgtcaaaaaggcgtatcagaaactgtgctacattcatcatatcatgggaaaggtgccagacgcttgcactgcctgcgatctggtcgatgtggatttggatgactgcatctttgaacaataaatgatttaaatcaggtatggctgccgatggttatcttccagattggctcgaggacaacctctctgagggcattcgcgagtggtgggcgctgaaacctggagccccgaagcccaaagccaaccagcaaaagcaggacggcggccggggtctggtgcttcctggctacaagtacctcggacccttcaacggactcgacaagggggagcccgtcaacgcggcggacgcagcggccctcgagcacgacaaggcctacgaccagcagctcaaagcgggtgacaatccgtacctgcggtataaccacgccgacgccgagtttcaggagcgtctgcaagaagatacgtcttttgggggcaacctcgggcgagcagtcttccaggccaagaagcgggttctcgaacctctcggtctggttgaggaaggcgctaagacggctcctggaaagaagagaccggtagagccatcaccccagcgttctccagactcctctacgggcatcggcaagaaaggccagcagcccgcgaaaaagagactcaactttgggcagactggcgactcagagtcagtgcccgaccctcaaccaatcggagaaccccccgcaggcccctctggtctgggatctggtacaatggctgcaggcggtggcgctccaatggcagacaataacgaaggcgccgacggagtgggtagttcctcaggaaattggcattgcgattccacatggctgggcgactgagtcatcaccaccagcacccgaacctgggccctccccacctacaacaaccacctctacaagcaaatctccaacgggacttcgggaggaagcaccaacgacaacacctacttcggctacagcaccccctgggggtattttgactttaacagattccactgccacttctcaccacgtgactggcagcgactcatcaacaacaactggggattccggcccaagagactcaacttcaagctcttcaacatccaggtcaaggaggtcacgcagaatgaaggcaccaagaccatcgccaataaccttaccagcacgattcaggtctttacggactcggaataccagctcccgtacgtcctcggctctgcgcaccagggctgcctgcctccgttcccggcggacgtcttcatgattcctcagtacgggtacctgactctgaacaatggcagtcaggccgtgggccgttcctccttctactgcctggagtactttccttctcaaatgctgagaacgggcaacaactttgagttcagctaccagtttgaggacgtgccttttcacagcagctacgcgcacagccaaagcctggaccggctgatgaaccccctcatcgaccagtacctgtactacctgtctcggactcagtccacgggaggtaccgcaggaactcagcagttgctattttctcaggccgggcctaataacatgtcggctcaggccaaaaactggctacccgggccctgctaccggcagtaacgcgtctccacgacactgtcgcaaaataacaacagcaactttgtctggaccggtgccaccaagtatcatctgaatggcagagactctctggtagatcccggtgtcgctatggcaacccacaaggacgacgaagagcgattttttccgtccagcggagtcataatgtttgggaaacagggagctggaaaagacaacgtggactatagcagcgtcatgctaaccagtgaggaagaaattaaaaccaccaacccagtggccacagaacagtacggcgtggtggccgataacctgcaacagcaaaacgccgctcctattgtaggggccgtcaacagtcaaggagccttacctggcatggtctggcagaaccgggacgtgtacctgcagggtcctacctgggccaagattcctcacacggacggaaactttcatccctcgccgctgatgggaggctttggactgaaacacccgcctcctcagatcctgattaagaatacacctgttcccgcggatcctccaactaccttcagtcaagctaagctggcgtcgttcatcacgcagtacagcaccggacaggtcagcgtggaaattgaatgggagctgcaggaagaaaacagcaaacgctggaacccagagattcaatacacttccaactactacaaatctacaaatgtggactttgctgttaacacagatggcacttattctgagcctcgccccatcggcacccgttacctcacccgtaatctgtaattgcttgttaatcaataaaccggttgattcgtttcagttgaactttggtctctgcgaagggcgaattc

SEQ ID NO: 29 - protein, 738 aa, Artificial Sequence
  Description of Artificial Sequence: Synthetic polypeptide
MAADGYLPDWLEDNLSEGIREWWALKPGAPKPKANQQKQDDGRGLVLPGYKYLGPFNGLDKGEPVNAADAAALEHDKAYDQQLKAGDNPYLRYNHADAEFQERLQEDTSFGGNLGRAVFQAKKRVLEPLGLVEEGAKTAPGKKRPVEPSPQRSPDSSTGIGKKGQQPAKKRLNFGQTGDSESVPDPQPIGEPPAGPSGLGSGTMAAGGGAPMADNNEGADGVGSSSGNWHCDSTWLGDGVITTSTRTWALPTYNNHLYKQISNGTSGGSTNDNTYFGYSTPWGYFDFNRFHCHFSPRDWQRLINNNWGFRPKSLNFKLFNIQVKEVTQNEGTKTIANNLTSTIQVFTDSEYQLPYVLGSAHQGCLPPFPADVFMIPQYGYLTLNNGSQAVGRSSFYCLEYFPSQMLRTGNNFEFSYQFEDVPFHSSYAHSQSLDRLMNPLIDQYLYYLSRTQSTGGTAGTQQLLFSQAGPNNMSAQAKNWLPGPCYRQQRVSTTLSQNDNSNFAWTGATKYHLNGRDSLVNPGVAMATHKDDEERFFPSSGVLMFGKQGAGKDNVDYSSVMLTSEEEIKTTNPVATEQYGVVADNLQQQNAAPIVGAVNSQGALPGMVWQNRDVYLQGPIWAKIPHTDGNFHPSPLMGGFGLKHPPPQILIKNTPVPADPPTTFSQAKLASFITQYSTGQVSVEIEWELQKENSKRWNPEIQYTSNYYKSTNVDFAVNTDGTYSEPRPIGTRYLTRNL

SEQ ID NO: 30 - DNA, 3121 bp, Adeno-associated virus
gaattcgcccttcgcgagaccaaagttcaactgaaacgaatcaaccggtttattgattaacaagcaattacagattacgggtgaggtaacgggtgccgatggggcgaggctcagaataagtgccatctgtgttaacagcaaagtccacatttgtagatttgtagtagttggaagtgtattgaatctctgggttccagcgtttgctgttttctttctgcagctcccattcaatttccacgctgacctgtccggtgctgtactgcgtgatgaacgacgccagcttagcttgactgaaggtagttggaggatccgcgggaacaggtgtattcttaatcaggatctgaggaggcgggtgtttcagtccaaagcctcccatcagcggcgagggatgaaagtttccgtccgtgtgaggaatcttggcccagataggaccctgcaggtacacgtcccggttctgccagaccatgccaggtaaggctccttgactgttgacggcccctacaataggagcggcgttttgctgttgcaggttatcggccaccacgccgtactgttctgtggccactgggttggtggttttaatttcttcctcactggttagcataacgctgctatagtccacgttgtcttttccagctccctgtttcccaaacattaagactccgctggacggaaaaaatcgctcttcgtcgtccttgtgggttgccatagcgacaccgggatttaccagagagtctctgccattcagatgatacttggtggcaccggtccaggcaaagttgctgttgtcattttgcgacagtgtcgtggagacgcgttgctgccggtagcagggcccgggtagccagtttttggcctgagccgacatgttattaggcccggcctgagaaaatagcaactgctgagttcctgcggtacctcccgtggactgagtccgagacaggtagtacaggtactggtcgatgagggggttcatcagccggtccaggctttggctgtgcgcgtagctgctgtgaaaaggcacgtcctcaaactggtagctgaactcaaagttgttgcccgttctcagcatttgagaaggaaagtactccaggcagtagaaggaggaacggcccacggcctgactgccattgttcagagtcaggtacccgtactgaggaatcatgaagacgtccgccgggaacggaggcaggcagccctggtgcgcagagccgaggacgtacgggagctggtattccgagtccgtaaagacctgaatcgtgctggtaaggttattggcgatggtcttggtgccttcattctgcgtgacctccttgacctggatgttgaagagcttgaagttgaggctcttgggccggaatccccagttgttgttgatgagtcgctgccagtcacgtggtgagaagtggcagtggaatctgttaaagtcaaaatacccccagggggtgctgtagccgaagtaggtgttgtcgttggtgcttcctcccgaagtcccgttggagatttgcttgtagaggtggttgttgtaggtggggagggcccaggttcgggtgctggtggtgatgactccgtcgcccagccatgtggaatcgcaatgccaatttcctgaggaactacccactccgtcggcgccttcgttattgtctgccattggagcgccaccgcctgcagccattgtaccagatcccagaccagaggggcctgcggggggttctccgattggttgagggtcgggcactgactctgagtcgccagtctgcccaaagttgagtctctttttcgcgggctgctggcctttcttgccgatgcccgtagaggagtctggagaacgctggggtgatggctctaccggtctcttctttccaggagccgtcttagcgccttcctcaaccagaccgagaggttcgagaacccgcttcttggcctggaagactgctcgcccgaggttgcccccaaaagacgtatcttcttgcagacgctcctgaaactcggcgtcggcgtggttataccgcaggtacggattgtcacccgctttgagctgctggtcgtaggccttgtcgtgctcgagggccgctgcgtccgccgcgttgacgggctcccccttgtcgagtccgttgaagggtccgaggtacttgtagccaggaagcaccagaccccggccgtcgtcctgcttttgctggttggctttgggcttcggggctccaggtttcagcgcccaccactcgcgaatgccctcagagaggttgtcctcgagccaatctggaagataaccatcggcagccatacctgatttaaatcatttattgttcaaagatgcagtcatccaaatccacattgaccagatcgcaggcagtgcaagcgtctggcacctttcccatgatatgatgaatgtagcacagtttctgatacgcctttttgacgacagaaacgggttgagattctgacacgggaaagcactctaaacagtctttctgtccgtgagtgaagcagatatttgaattctgattcattctctcgcattgtctgcagggaaacagcatcagattcatgcccacgtgacgagaacatttgttttggtacctgtctgcgtagttgatcgaagcttccgcgtctgacgtcgatggctgcgcaactgactcgcgcacccgtttgggctcacttatatctgcgtcactgggggcgggtcttttcttggctccaccctttttgacgtagaattcatgctccacctcaaccacgtgatcctttgcccaccggaaaaagtctttgacttcctgcttggtgaccttcccaaagtcatgatccagacggcgggtgagttcaaatttgaacatccggtcttgcaacggctgctggtgttcgaaggtcgttgagttcccgtcaatcacggcgcacatgttggtgttggaggtgacgatcacgggagtcgggtctatctgggccgaggacttgcatttctggtccacgcgcaccttgcttcctccgagaatggctttggccgactccacgaccttggcggtcatcttcccctcctcccaccagatcaccatcttgtcgacacagtcgttgaagggaaagttctcattggtccagttgacgcagccgtagaaagggcgaattc

SEQ ID NO: 31 - DNA, 2211 bp, Adeno-associated virus
atggctgctgacggttatcttccagattggctcgaggacaacctttctgaaggcattcgtgagtggtgggctctgaaacctggagtccctcaacccaaagcgaaccaacaacaccaggacaaccgtcggggtcttgtgcttccgggttacaaatacctcggacccggtaacggactcgacaaaggagagccggtcaacgaggcggacgcggcagccctcgaacacgacaaagcttacgaccagcagctcaaggccggtgacaacccgtacctcaagtacaaccacgccgacgccgagtttcaggagcgtcttcaagaagatacgtcttttgggggcaaccttggcagagcagtcttccaggccaaaaagaggatccttgagcctcttggtctggttgaggaagcagctaaaacggctcctggaaagaagggggctgtagatcagtctcctcaggaaccggactcatcatctggtgttggcaaatcgggcaaacagcctgccagaaaaagactaaatttcggtcagactggagactcagagtcagtcccagaccctcaacctctcggagaaccaccagcagcccccacaagtttgggatctaatacaatggcttcaggcggtggcgcaccaatggcagacaataacgagggtgccgatggagtgggtaattcctcaggaaattggcattgcgattcccaatggctgggcgacagagtcatcaccaccagcaccagaacctgggccctgcccacttacaacaaccatctctacaagcaaatctccagccaatcaggagcttcaaacgacaaccactactttggctacagcaccccttgggggtattttgactttaacagattccactgccacttctcaccacgtgactggcagcgactcattaacaacaactggggattccggcccaagaaactcagcttcaagctcttcaacatccaagttagaggggtcacgcagaacgatggcacgacgactattgccaataaccttaccagcacggttcaagtgtttacggactcggagtatcagctcccgtacgtgctcgggtcggcgcaccaaggctgtctcccgccgtttccagcggacgtcttcatggtccctcagtatggatacctcaccctgaacaacggaagtcaagcggtgggacgctcatccttttactgcctggagtacttcccttcgcagatgctaaggactggaaataacttccaattcagctataccttcgaggatgtaccttttcacagcagctacgctcacagccagagtttggatcgcttgatgaatcctcttattgatcagtatctgtactacctgaacagaacgcaaggaacaacctctggaacaaccaaccaatcacggctgctttttagccaggctgggcctcagtctatgtctttgcaggccagaaattggctacctgggccctgctaccggcaacagagactttcaaagactgctaacgacaacaacaacagtaactttccttggacagcggccagcaaatatcatctcaatggccgcgactcgctggtgaatccaggaccagctatggccagtcacaaggacgatgaagaaaaatttttccctatgcacggcaatctaatatttggcaaagaagggacaacggcaagtaacgcagaattagataatgtaatgattacggatgaagaagagattcgtaccaccaatcctgtggcaacagagcagtatggaactgtggcaaataacttgcagagctcaaatacagctcccacgactggaactgtcaatcatcagggggccttacctggcatggtgtggcaagatcgtgacgtgtaccttcaaggacctatctgggcaaagattcctcacacggatggacactttcatccttctcctctgatgggaggctttggactgaaacatccgcctcctcaaatcatgatcaaaaatactccggtaccggcaaatcctccgacgactttcagcccggccaagtttgcttcatttatcactcagtactccactggacaggtcagcgtggaaattgagtgggagctacagaaagaaaacagcaaacgttggaatccagagattcagtacacttccaactacaacaagtctgttaatgtggactttactgtagacactaatggtgtttatagtgaacctcgccctattggaacccggtatctcacacgaaacttgtga

SEQ ID NO: 32 - protein, 736 aa, Adeno-associated virus 3
MAADGYLPDWLEDNLSEGIREWWALKPGVPQPKANQQHQDNRRGLVLPGYKYLGPGNGLDKGEPVNEADAAALEHDKAYDQQLKAGDNPYLKYNHADAEFQERLQEDTSFGGNLGRAVFQAKKRILEPLGLVEEAAKTAPGKKGAVDQSPQEPDSSSGVGKSGKQPARKRLNFGQTGDSESVPDPQPLGEPPAAPTSLGSNTMASGGGAPMADNNEGADGVGNSSGNWHCDSQWLGDRVITTSTRTWALPTYNNHLYKQISSQSGASNDNHYFGYSTPWGYFDFNRFHCHFSPRDWQRLINNNWGFRPKKLSFKLFNIQVRGVTQNDGTTTIANNLTSTVQVFTDSEYQLPYVLGSAHQGCLPPFPADVFMVPQYGYLTLNNGSQAVGRSSFYCLEYFPSQMLRTGNNFQFSYTFEDVPFHSSYAHSQSLDRLMNPLIDQYLYYLNRTQGTTSGTTNQSRLLFSQAGPQSMSLQARNWLPGPCYRQQRLSKTANDNNNSNFPWTAASKYHLNGRDSLVNPGPAMASHKDDEEKFFPMHGNLIFGKEGTTASNAELDNVMITDEEEIRTTNPVATEQYGTVANNLQSSNTAPTTGTVNHQGALPGMVWQDRDVYLQGPIWAKIPHTDGHFHPSPLMGGFGLKHPPPQIMIKNTPVPANPPTTFSPAKFASFITQYSTGQVSVEIEWELQKENSKRWNPEIQYTSNYNKSVNVDFTVDTNGVYSEPRPIGTRYLTRNL

SEQ ID NO: 33 - DNA, 4726 bp, Adeno-associated virus 3
ttggccactccctctatgcgcactcgctcgctcggtggggcctggcgaccaaaggtcgccagacggacgtgctttgcacgtccggccccaccgagcgagcgagtgcgcatagagggagtggccaactccatcactagaggtatggcagtgacgtaacgcgaagcgcgcgaagcgagaccacgcctaccagctgcgtcagcagtcaggtgacccttttgcgacagtttgcgacaccacgtggccgctgagggtatatattctcgagtgagcgaaccaggagctccattttgaccgcgaaatttgaacgagcagcagccatgccggggttctacgagattgtcctgaaggtcccgagtgacctggacgagcgcctgccgggcatttctaactcgtttgttaactgggtggccgagaaggaatgggacgtgccgccggattctgacatggatccgaatctgattgagcaggcacccctgaccgtggccgaaaagcttcagcgcgagttcctggtggagtggcgccgcgtgagtaaggccccggaggccctcttttttgtccagttcgaaaagggggagacctacttccacctgcacgtgctgattgagaccatcggggtcaaatccatggtggtcggccgctacgtgagccagattaaagagaagctggtgacccgcatctaccgcggggtcgagccgcagcttccgaactggttcgcggtgaccaaaacgcgaaatggcgccgggggcgggaacaaggtggtggacgactgctacatccccaactacctgctccccaagacccagcccgagctccagtgggcgtggactaacatggaccagtatttaagcgcctgtttgaatctcgcggagcgtaaacggctggtggcgcagcatctgacgcacgtgtcgcagacgcaggagcagaacaaagagaatcagaaccccaattctgacgcgccggtcatcaggtcaaaaacctcagccaggtacatggagctggtcgggtggctggtggaccgcgggatcacgtcagaaaagcaatggattcaggaggaccaggcctcgtacatctccttcaacgccgcctccaactcgcggtcccagatcaaggccgcgctggacaatgcctccaagatcatgagcctgacaaagacggctccggactacctggtgggcagcaacccgccggaggacattaccaaaaatcggatctaccaaatcctggagctgaacgggtacgatccgcagtacgcggcctccgtcttcctgggctgggcgcaaaagaagttcgggaagaggaacaccatctggctctttgggccggccacgacgggtaaaaccaacatcgcggaagccatcgcccacgccgtgcccttctacggctgcgtaaactggaccaatgagaactttcccttcaacgattgcgtcgacaagatggtgatctggtgggaggagggcaagatgacggccaaggtcgtggagagcgccaaggccattctgggcggaagcaaggtgcgcgtggaccaaaagtgcaagtcatcggcccagatcgaacccactcccgtgatcgtcacctccaacaccaacatgtgcgccgtgattgacgggaacagcaccaccttcgagcatcagcagccgctgcaggaccggatgtttgaatttgaacttacccgccgtttggaccatgactttgggaaggtcaccaaacaggaagtaaaggactttttccggtgggcttccgatcacgtgactgacgtggctcatgagttctacgtcagaaagggtggagctaagaaacgccccgcctccaatgacgcggatgtaagcgagccaaaacgggagtgcacgtcacttgcgcagccgacaacgtcagacgcggaagcaccggcggactacgcggacaggtaccaaaacaaatgttctcgtcacgtgggcatgaatctgatgctttttccctgtaaaacatgcgagagaatgaatcaaatttccaatgtctgttttacgcatggtcaaagagactgtggggaatgcttccctggaatgtcagaatctcaacccgtttctgtcgtcaaaaagaagacttatcagaaactgtgtccaattcatcatatcctgggaagggcacccgagattgcctgttcggcctgcgatttggccaatgtggacttggatgactgtgtttctgagcaataaatgacttaaaccaggtatggctgctgacggttatcttccagattggctcgaggacaacctttctgaaggcattcgtgagtggtgggctctgaaacctggagtccctcaacccaaagcgaaccaacaacaccaggacaaccgtcggggtcttgtgcttccgggttacaaatacctcggacccggtaacggactcgacaaaggagagccggtcaacgaggcggacgcggcagccctcgaacacgacaaagcttacgaccagcagctcaaggccggtgacaacccgtacctcaagtacaaccacgccgacgccgagtttcaggagcgtcttcaagaagatacgtcttttgggggcaaccttggcagagcagtcttccaggccaaaaagaggatccttgagcctcttggtctggttgaggaagcagctaaaacggctcctggaaagaagggggctgtagatcagtctcctcaggaaccggactcatcatctggtgttggcaaatcgggcaaacagcctgccagaaaaagactaaatttcggtcagactggagactcagagtcagtcccagaccctcaacctctcggagaaccaccagcagcccccacaagtttgggatctaatacaatggcttcaggcggtggcgcaccaatggcagacaataacgagggtgccgatggagtgggtaattcctcaggaaattggcattgcgattcccaatggctgggcgacagagtcatcaccaccagcaccagaacctgggccctgcccacttacaacaaccatctctacaagcaaatctccagccaatcaggagcttcaaacgacaaccactactttggctacagcaccccttgggggtattttgactttaacagattccactgccacttctcaccacgtgactggcagcgactcattaacaacaactggggattccggcccaagaaactcagcttcaagctcttcaacatccaagttagaggggtcacgcagaacgatggcacgacgactattgccaataaccttaccagcacggttcaagtgtttacggactcggagtatcagctcccgtacgtgctcgggtcggcgcaccaaggctgtctcccgccgtttccagcggacgtcttcatggtccctcagtatggatacctcaccctgaacaacggaagtcaagcggtgggacgctcatccttttactgcctggagtacttcccttcgcagatgctaaggactggaaataacttccaattcagctataccttcgaggatgtaccttttcacagcagctacgctcacagccagagtttggatcgcttgatgaatcctcttattgatcagtatctgtactacctgaacagaacgcaaggaacaacctctggaacaaccaaccaatcacggctgctttttagccaggctgggcctcagtctatgtctttgcaggccagaaattggctacctgggccctgctaccggcaacagagactttcaaagactgctaacgacaacaacaacagtaactttccttggacagcggccagcaaatatcatctcaatggccgcgactcgctggtgaatccaggaccagctatggccagtcacaaggacgatgaagaaaaatttttccctatgcacggcaatctaatatttggcaaagaagggacaacggcaagtaacgcagaattagataatgtaatgattacggatgaagaagagattcgtaccaccaatcctgtggcaacagagcagtatggaactgtggcaaataacttgcagagctcaaatacagctcccacgactggaactgtcaatcatcagggggccttacctggcatggtgtggcaagatcgtgacgtgtaccttcaaggacctatctgggcaaagattcctcacacggatggacactttcatccttctcctctgatgggaggctttggactgaaacatccgcctcctcaaatcatgatcaaaaatactccggtaccggcaaatcctccgacgactttcagcccggccaagtttgcttcatttatcactcagtactccactggacaggtcagcgtggaaattgagtgggagctacagaaagaaaacagcaaacgttggaatccagagattcagtacacttccaactacaacaagtctgttaatgtggactttactgtagacactaatggtgtttatagtgaacctcgccctattggaacccggtatctcacacgaaacttgtgaatcctggttaatcaataaaccgtttaattcgtttcagttgaactttggctcttgtgcacttctttatctttatcttgtttccatggctactgcgtagataagcagcggcctgcggcgcttgcgcttcgcggtttacaactgctggttaatatttaactctcgccatacctctagtgatggagttggccactccctctatgcgcactcgctcgctcggtggggcctggcgaccaaaggtcgccagacggacgtgctttgcacgtccggccccaccgagcgagcgagtgcgcatagagggagtggccaa

SEQ ID NO: 34 - protein, 737 aa, Artificial Sequence
  Description of Artificial Sequence: Synthetic polypeptide
MAADGYLPDWLEDNLSEGIREWWDLKPGAPKPKANQQKQDNGRGLVLPGYKYLGPFNGLDKGEPVNAADAAALEHDKAYDQQLNAGDNPYLRYNHADAEFQERLQEDTSFGGNLGRAVFQAKKRVLEPLGLVEEGAKTAPAKKRPVEPSPQRSPDSSTGIGKKGQQPARKRLNFGQTGDSESVPDPQPLGEPPAAPSSVGSGTVAAGGGAPMADNNEGADGVGNASGNWHCDSTWLGDRVITTSTRTWALPTYNNHLYEQISSETAGSTNDNTYFGYSTPWGYFDFNRFHCHFSPRDWQRLINNNWGFRPKKLRFKLFNIQVKEVTTNDGVTTIANNLTSTIQVFSDSEYQLPYVLGSAHQGCLPPFPADVFMIPQYGYLTLNNGSQSVGRSSFYCLEYFPSQMLRTGNNFEFSYSFEDVPFHSSYAHSQSLDRLMNPLIDQYLYYLARTQSDPGGTAGNRELQFYQGGPSTMAEQAKNWLPGPCFRQQRVSKTLDQNNNSNFAWTGATKYHLNGRNSLVNPGVAMATHKDDEDRFFPSSGVLIFGKTGATNKTTLENVLMTNEEEIRPTNPVATEEYGIVSSNLQAANTAAQTQVVNNQGALPGMVWQNRDVYLQGPIWAKIPHTDGNFHPSPLMGGFGLKHPPPQILIKNTPVPANPPEVFTPAKFASFITQYSTGQVSVEIEWELQKENSKRWDPEIQYTSNFEKQTGVDFAVDSQGVYSEPRPIGTRYLTRNL

SEQ ID NO: 35 - DNA, 2211 bp, Adeno-associated virus
atggctgctgacggttatcttccagattggctcgaggacaacctttctgaaggcattcgtgagtggtgggctctgaaacctggagtccctcaacccaaagcgaaccaacaacaccaggacaaccgtcggggtcttgtgcttccgggttacaaatacctcggacccggtaacggactcgacaaaggagagccggtcaacgaggcggacgcggcagccctcgaacacgacaaagcttacgaccagcagctcaaggccggtgacaacccgtacctcaagtacaaccacgccgacgccgagtttcaggagcgtcttcaagaagatacgtcttttgggggcaaccttggcagagcagtcttccaggccaaaaagaggatccttgagcctcttggtctggttgaggaagcagctaaaacggctcctggaaagaagggggctgtagatcagtctcctcaggaaccggactcatcatctggtgttggcaaatcgggcaaacagcctgccagaaaaagactaaatttcggtcagactggagactcagagtcagtcccagaccctcaacctctcggagaaccaccagcagcccccacaagtttgggatctaatacaatggcttcaggcggtggcgcaccaatggcagacaataacgagggtgccgatggagtgggtaattcctcaggaaattggcattgcgattcccaatggctgggcgacagagtcatcaccaccagcaccagaacctgggccctgcccacttacaacaaccatctctacaagcaaatctccagccaatcaggagcttcaaacgacaaccactactttggctacagcaccccttgggggtattttgactttaacagattccactgccacttctcaccacgtgactggcagcgactcattaacaacaactggggattccggcccaagaaactcagcttcaagctcttcaacatccaagttagaggggtcacgcagaacgatggcacgacgactattgccaataaccttaccagcacggttcaagtgtttacggactcggagtatcagctcccgtacgtgctcgggtcggcgcaccaaggctgtctcccgccgtttccagcggacgtcttcatggtccctcagtatggatacctcaccctgaacaacggaagtcaagcggtgggacgctcatccttttactgcctggagtacttcccttcgcagatgctaaggactggaaataacttccaattcagctataccttcgaggatgtaccttttcacagcagctacgctcacagccagagtttggatcgcttgatgaatcctcttattgatcagtatctgtactacctgaacagaacgcaaggaacaacctctggaacaaccaaccaatcacggctgctttttagccaggctgggcctcagtctatgtctttgcaggccagaaattggctacctgggccctgctaccggcaacagagactttcaaagactgctaacgacaacaacaacagtaactttccttggacagcggccagcaaatatcatctcaatggccgcgactcgctggtgaatccaggaccagctatggccagtcacaaggacgatgaagaaaaatttttccctatgcacggcaatctaatatttggcaaagaagggacaacggcaagtaacgcagaattagataatgtaatgattacggatgaagaagagattcgtaccaccaatcctgtggcaacagagcagtatggaactgtggcaaataacttgcagagctcaaatacagctcccacgactggaactgtcaatcatcagggggccttacctggcatggtgtggcaagatcgtgacgtgtaccttcaaggacctatctgggcaaagattcctcacacggatggacactttcatccttctcctctgatgggaggctttggactgaaacatccgcctcctcaaatcatgatcaaaaatactccggtaccggcaaatcctccgacgactttcagcccggccaagtttgcttcatttatcactcagtactccactggacaggtcagcgtggaaattgagtgggagctacagaaagaaaacagcaaacgttggaatccagagattcagtacacttccaactacaacaagtctgttaatgtggactttactgtagacactaatggtgtttatagtgaacctcgccctattggaacccggtatctcacacgaaacttgtaa

SEQ ID NO: 36 - protein, 736 aa, Adeno-associated virus; identical to SEQ ID NO: 32

SEQ ID NO: 37 - protein, 736 aa, Adeno-associated virus 3A; identical to SEQ ID NO: 32

SEQ ID NO: 38 - protein, 624 aa, Adeno-associated virus 3A
MPGFYEIVLKVPSDLDERLPGISNSFVNWVAEKEWDVPPDSDMDPNLIEQAPLTVAEKLQREFLVEWRRVSKAPEALFFVQFEKGETYFHLHVLIETIGVKSMVVGRYVSQIKEKLVTRIYRGVEPQLPNWFAVTKTRNGAGGGNKVVDDCYIPNYLLPKTQPELQWAWTNMDQYLSACLNLAERKRLVAQHLTHVSQTQEQNKENQNPNSDAPVIRSKTSARYMELVGWLVDRGITSEKQWIQEDQASYISFNAASNSRSQIKAALDNASKIMSLTKTAPDYLVGSNPPEDITKNRIYQILELNGYDPQYAASVFLGWAQKKFGKRNTIWLFGPATTGKTNIAEAIAHAVPFYGCVNWTNENFPFNDCVDKMVIWWEEGKMTAKVVESAKAILGGSKVRVDQKCKSSAQIEPTPVIVTSNTNMCAVIDGNSTTFEHQQPLQDRMFEFELTRRLDHDFGKVTKQEVKDFFRWASDHVTDVAHEFYVRKGGAKKRPASNDADVSEPKRECTSLAQPTTSDAEAPADYADRYQNKCSRHVGMNLMLFPCKTCERMNQISNVCFTHGQRDCGECFPGMSESQPVSVVKKKTYQKLCPIHHILGRAPEIACSACDLANVDLDDCVSEQ

SEQ ID NO: 39 - protein, 736 aa, Adeno-associated virus 3B
MAADGYLPDWLEDNLSEGIREWWALKPGVPQPKANQQHQDNRRGLVLPGYKYLGPGNGLDKGEPVNEADAAALEHDKAYDQQLKAGDNPYLKYNHADAEFQERLQEDTSFGGNLGRAVFQAKKRILEPLGLVEEAAKTAPGKKRPVDQSPQEPDSSSGVGKSGKQPARKRLNFGQTGDSESVPDPQPLGEPPAAPTSLGSNTMASGGGAPMADNNEGADGVGNSSGNWHCDSQWLGDRVITTSTRTWALPTYNNHLYKQISSQSGASNDNHYFGYSTPWGYFDFNRFHCHFSPRDWQRLINNNWGFRPKKLSFKLFNIQVKEVTQNDGTTTIANNLTSTVQVFTDSEYQLPYVLGSAHQGCLPPFPADVFMVPQYGYLTLNNGSQAVGRSSFYCLEYFPSQMLRTGNNFQFSYTFEDVPFHSSYAHSQSLDRLMNPLIDQYLYYLNRTQGTTSGTTNQSRLLFSQAGPQSMSLQARNWLPGPCYRQQRLSKTANDNNNSNFPWTAASKYHLNGRDSLVNPGPAMASHKDDEEKFFPMHGNLIFGKEGTTASNAELDNVMITDEEEIRTTNPVATEQYGTVANNLQSSNTAPTTRTVNDQGALPGMVWQDRDVYLQGPIWAKIPHTDGHFHPSPLMGGFGLKHPPPQIMIKNTPVPANPPTTFSPAKFASFITQYSTGQVSVEIEWELQKENSKRWNPEIQYTSNYNKSVNVDFTVDTNGVYSEPRPIGTRYLTRNL

SEQ ID NO: 40 - protein, 624 aa, Adeno-associated virus 3B
MPGFYEIVLKVPSDLDEHLPGISNSFVNWVAEKEWELPPDSDMDPNLIEQAPLTVAEKLQREFLVEWRRVSKAPEALFFVQFEKGETYFHLHVLIETIGVKSMVVGRYVSQIKEKLVTRIYRGVEPQLPNWFAVTKTRNGAGGGNKVVDDCYIPNYLLPKTQPELQWAWTNMDQYLSACLNLAERKRLVAQHLTHVSQTQEQNKENQNPNSDAPVIRSKTSARYMELVGWLVDRGITSEKQWIQEDQASYISFNAASNSRSQIKAALDNASKIMSLTKTAPDYLVGSNPPEDITKNRIYQILELNGYDPQYAASVFLGWAQKKFGKRNTIWLFGPATTGKTNIAEAIAHAVPFYGCVNWTNENFPFNDCVDKMVIWWEEGKMTAKVVESAKAILGGSKVRVDQKCKSSAQIEPTPVIVTSNTNMCAVIDGNSTTFEHQQPLQDRMFKFELTRRLDHDFGKVTKQEVKDFFRWASDHVTDVAHEFYVRKGGAKKRPASNDADVSEPKRQCTSLAQPTTSDAEAPADYADRYQNKCSRHVGMNLMLFPCKTCERMNQISNVCFTHGQRDCGECFPGMSESQPVSVVKKKTYQKLCPIHHILGRAPEIACSACDLANVDLDDCVSEQ

SEQ ID NO: 41 - DNA, 4722 bp, Adeno-associated virus 3B
tggccactccctctatgcgcactcgctcgctcggtggggcctggcgaccaaaggtcgccagacggacgtgctttgcacgtccggccccaccgagcgagcgagtgcgcatagagggagtggccaactccatcactagaggtatggcagtgacgtaacgcgaagcgcgcgaagcgagaccacgcctaccagctgcgtcagcagtcaggtgacccttttgcgacagtttgcgacaccacgtggccgctgagggtatatattctcgagtgagcgaaccaggagctccattttgaccgcgaaatttgaacgagcagcagccatgccggggttctacgagattgtcctgaaggtcccgagtgacctggacgagcacctgccgggcatttctaactcgtttgttaactgggtggccgagaaggaatgggagctgccgccggattctgacatggatccgaatctgattgagcaggcacccctgaccgtggccgaaaagcttcagcgcgagttcctggtggagtggcgccgcgtgagtaaggccccggaggccctcttttttgtccagttcgaaaagggggagacctacttccacctgcacgtgctgattgagaccatcggggtcaaatccatggtggtcggccgctacgtgagccagattaaagagaagctggtgacccgcatctaccgcggggtcgagccgcagcttccgaactggttcgcggtgaccaaaacgcgaaatggcgccgggggcgggaacaaggtggtggacgactgctacatccccaactacctgctccccaagacccagcccgagctccagtgggcgtggactaacatggaccagtatttaagcgcctgtttgaatctcgcggagcgtaaacggctggtggcgcagcatctgacgcacgtgtcgcagacgcaggagcagaacaaagagaatcagaaccccaattctgacgcgccggtcatcaggtcaaaaacctcagccaggtacatggagctggtcgggtggctggtggaccgcgggatcacgtcagaaaagcaatggattcaggaggaccaggcctcgtacatctccttcaacgccgcctccaactcgcggtcccagatcaaggccgcgctggacaatgcctccaagatcatgagcctgacaaagacggctccggactacctggtgggcagcaacccgccggaggacattaccaaaaatcggatctaccaaatcctggagctgaacgggtacgatccgcagtacgcggcctccgtcttcctgggctgggcgcaaaagaagttcgggaagaggaacaccatctggctctttgggccggccacgacgggtaaaaccaacatcgcggaagccatcgcccacgccgtgcccttctacggctgcgtaaactggaccaatgagaactttcccttcaacgattgcgtcgacaagatggtgatctggtgggaggagggcaagatgacggccaaggtcgtggagagcgccaaggccattctgggcggaagcaaggtgcgcgtggaccaaaagtgcaagtcatcggcccagatcgaacccactcccgtgatcgtcacctccaacaccaacatgtgcgccgtgattgacgggaacagcaccaccttcgagcatcagcagccgctgcaggaccggatgtttaaatttgaacttacccgccgtttggaccatgactttgggaaggtcaccaaacaggaagtaaaggactttttccggtgggcttccgatcacgtgactgacgtggctcatgagttctacgtcagaaagggtggagctaagaaacgccccgcctccaatgacgcggatgtaagcgagccaaaacggcagtgcacgtcacttgcgcagccgacaacgtcagacgcggaagcaccggcggactacgcggacaggtaccaaaacaaatgttctcgtcacgtgggcatgaatctgatgctttttccctgtaaaacatgcgagagaatgaatcaaatttccaatgtctgttttacgcatggtcaaagagactgtggggaatgcttccctggaatgtcagaatctcaacccgtttctgtcgtcaaaaagaagacttatcagaaactgtgtccaattcatcatatcctgggaagggcacccgagattgcctgttcggcctgcgatttggccaatgtggacttggatgactgtgtttctgagcaataaatgacttaaaccaggtatggctgctgacggttatcttccagattggctcgaggacaacctttctgaaggcattcgtgagtggtgggctctgaaacctggagtccctcaacccaaagcgaaccaacaacaccaggacaaccgtcggggtcttgtgcttccgggttacaaatacctcggacccggtaacggactcgacaaaggagagccggtcaacgaggcggacgcggcagccctcgaacacgacaaagcttacgaccagcagctcaaggccggtgacaacccgtacctcaagtacaaccacgccgacgccgagtttcaggagcgtcttcaagaagatacgtcttttgggggcaaccttggcagagcagtcttccaggccaaaaagaggatccttgagcctcttggtctggttgaggaagcagctaaaacggctcctggaaagaagaggcctgtagatcagtctcctcaggaaccggactcatcatctggtgttggcaaatcgggcaaacagcctgccagaaaaagactaaatttcggtcagactggcgactcagagtcagtcccagaccctcaacctctcggagaaccaccagcagcccccacaagtttgggatctaatacaatggcttcaggcggtggcgcaccaatggcagacaataacgagggtgccgatggagtgggtaattcctcaggaaattggcattgcgattcccaatggctgggcgacagagtcatcaccaccagcaccagaacctgggccctgcccacttacaacaaccatctctacaagcaaatctccagccaatcaggagcttcaaacgacaaccactactttggctacagcaccccttgggggtattttgactttaacagattccactgccacttctcaccacgtgactggcagcgactcattaacaacaactggggattccggcccaagaaactcagcttcaagctcttcaacatccaagttaaagaggtcacgcagaacgatggcacgacgactattgccaataaccttaccagcacggttcaagtgtttacggactcggagtatcagctcccgtacgtgctcgggtcggcgcaccaaggctgtctcccgccgtttccagcggacgtcttcatggtccctcagtatggatacctcaccctgaacaacggaagtcaagcggtgggacgctcatccttttactgcctggagtacttcccttcgcagatgctaaggactggaaataacttccaattcagctataccttcgaggatgtaccttttcacagcagctacgctcacagccagagtttggatcgcttgatgaatcctcttattgatcagtatctgtactacctgaacagaacgcaaggaacaacctctggaacaaccaaccaatcacggctgctttttagccaggctgggcctcagtctatgtctttgcaggccagaaattggctacctgggccctgctaccggcaacagagactttcaaagactgctaacgacaacaacaacagtaactttccttggacagcggccagcaaatatcatctcaatggccgcgactcgctggtgaatccaggaccagctatggccagtcacaaggacgatgaagaaaaatttttccctatgcacggcaatctaatatttggcaaagaagggacaacggcaagtaacgcagaattagataatgtaatgattacggatgaagaagagattcgtaccaccaatcctgtggcaacagagcagtatggaactgtggcaaataacttgcagagctcaaatacagctcccacgactagaactgtcaatgatcagggggccttacctggcatggtgtggcaagatcgtgacgtgtaccttcaaggacctatctgggcaaagattcctcacacggatggacactttcatccttctcctctgatgggaggctttggactgaaacatccgcctcctcaaatcatgatcaaaaatactccggtaccggcaaatcctccgacgactttcagcccggccaagtttgcttcatttatcactcagtactccactggacaggtcagcgtggaaattgagtgggagctacagaaagaaaacagcaaacgttggaatccagagattcagtacacttccaactacaacaagtctgttaatgtggactttactgtagacactaatggtgtttatagtgaacctcgccctattggaacccggtatctcacacgaaacttgtaatcctggttaatcaataaaccgtttaattcgtttcagttgaactttggctcttgtgcacttcttatcttatcttgtttccatggctactgcgtagataagcagcggcctgcggcgcttgcgcttcgcggtttacaactgctggttaatatttaactctcgccatacctctagtgatggagttggccactccctctatgcgcactcgctcgctcggtggggccggacgtgcaaagcacgtccgtctggcgacctttggtcgccaggccccaccgagcgagcgagtgcgcatagagggagtggccaa

SEQ ID NO: 42 - DNA, 1800 bp, Adeno-associated virus 4
  misc_feature (342)..(342): n is a, c, t, or g
acggctcctggaaagaagagaccgttgattgaatccccccagcagcccgactcctccacgggtatcggcaaaaaaggcaagcagccggctaaaaagaagctcgttttcgaagacgaaactggagcaggcgacggaccccctgagggatcaacttccggagccatgtctgatgacagtgagatgcgtgcagcagctggcggagctgcagtcgagggsggacaaggtgccgatggagtgggtaatgcctcgggtgattggcattgcgattccacctggtctgagggccacgtcacgaccaccagcaccagaacctgggtcttgcccacctacaacaaccacctntacaagcgactcggagagagcctgcagtccaacacctacaacggattctccaccccctggggatactttgacttcaaccgcttccactgccacttctcaccacgtgactggcagcgactcatcaacaacaactggggcatgcgacccaaagccatgcgggtcaaaatcttcaacatccaggtcaaggaggtcacgacgtcgaacggcgagacaacggtggctaataaccttaccagcacggttcagatctttgcggactcgtcgtacgaactgccgtacgtgatggatgcgggtcaagagggcagcctgcctccttttcccaacgacgtctttatggtgccccagtacggctactgtggactggtgaccggcaacacttcgcagcaacagactgacagaaatgccttctactgcctggagtactttccttcgcagatgctgcggactggcaacaactttgaaattacgtacagttttgagaaggtgcctttccactcgatgtacgcgcacagccagagcctggaccggctgatgaaccctctcatcgaccagtacctgtggggactgcaatcgaccaccaccggaaccaccctgaatgccgggactgccaccaccaactttaccaagctgcggcctaccaacttttccaactttaaaaagaactggctgcccgggccttcaatcaagcagcagggcttctcaaagactgccaatcaaaactacaagatccctgccaccgggtcagacagtctcatcaaatacgagacgcacagcactctggacggaagatggagtgccctgacccccggacctccaatggccacggctggacctgcggacagcaagttcagcaacagccagctcatctttgcggggcctaaacagaacggcaacacggccaccgtacccgggactctgatcttcacctctgaggaggagctggcagccaccaacgccaccgatacggacatgtggggcaacctacctggcggtgaccagagcaacagcaacctgccgaccgtggacagactgacagccttgggagccgtgcctggaatggtctggcaaaacagagacatttactaccagggtcccatttgggccaagattcctcataccgatggacactttcacccctcaccgctgattggtgggtttgggctgaaacacccgcctcctcaaatttttatcaagaacaccccggtacctgcgaatcctgcaacgaccttcagctctactccggtaaactccttcattactcagtacagcactggccaggtgtcggtgcagattgactgggagatccagaaggagcggtccaaacgctggaaccccgaggtccagtttacctccaactacggacagcaaaactctctgttgtgggctcccgatgcggctgggaaatacactgagcctagggctatcggtacccgctacctcacccaccacctgtaataa

SEQ ID NO: 43 - DNA, 2208 bp, Adeno-associated virus 4
  misc_feature (750)..(750): n is a, c, t, or g
atgactgacggttaccttccagattggctagaggacaacctctctgaaggcgttcgagagtggtgggcgctgcaacctggagcccctaaacccaaggcaaatcaacaacatcaggacaacgctcggggtcttgtgcttccgggttacaaatacctcggacccggcaacggactcgacaagggggaacccgtcaacgcagcggacgcggcagccctcgagcacgacaaggcctacgaccagcagctcaaggccggtgacaacccctacctcaagtacaaccacgccgacgcggagttccagcagcggcttcagggcgacacatcgtttgggggcaacctcggcagagcagtcttccaggccaaaaagagggttcttgaacctcttggtctggttgagcaagcgggtgagacggctcctggaaagaagagaccgttgattgaatccccccagcagcccgactcctccacgggtatcggcaaaaaaggcaagcagccggctaaaaagaagctcgttttcgaagacgaaactggagcaggcgacggaccccctgagggatcaacttccggagccatgtctgatgacagtgagatgcgtgcagcagctggcggagctgcagtcgagggsggacaaggtgccgatggagtgggtaatgcctcgggtgattggcattgcgattccacctggtctgagggccacgtcacgaccaccagcaccagaacctgggtcttgcccacctacaacaaccacctntacaagcgactcggagagagcctgcagtccaacacctacaacggattctccaccccctggggatactttgacttcaaccgcttccactgccacttctcaccacgtgactggcagcgactcatcaacaacaactggggcatgcgacccaaagccatgcgggtcaaaatcttcaacatccaggtcaaggaggtcacgacgtcgaacggcgagacaacggtggctaataaccttaccagcacggttcagatctttgcggactcgtcgtacgaactgccgtacgtgatggatgcgggtcaagagggcagcctgcctccttttcccaacgacgtctttatggtgccccagtacggctactgtggactggtgaccggcaacacttcgcagcaacagactgacagaaatgccttctactgcctggagtactttccttcgcagatgctgcggactggcaacaactttgaaattacgtacagttttgagaaggtgcctttccactcgatgtacgcgcacagccagagcctggaccggctgatgaaccctctcatcgaccagtacctgtggggactgcaatcgaccaccaccggaaccaccctgaatgccgggactgccaccaccaactttaccaagctgcggcctaccaacttttccaactttaaaaagaactggctgcccgggccttcaatcaagcagcagggcttctcaaagactgccaatcaaaactacaagatccctgccaccgggtcagacagtctcatcaaatacgagacgcacagcactctggacggaagatggagtgccctgacccccggacctccaatggccacggctggacctgcggacagcaagttcagcaacagccagctcatctttgcggggcctaaacagaacggcaacacggccaccgtacccgggactctgatcttcacctctgaggaggagctggcagccaccaacgccaccgatacggacatgtggggcaacctacctggcggtgaccagagcaacagcaacctgccgaccgtggacagactgacagccttgggagccgtgcctggaatggtctggcaaaacagagacatttactaccagggtcccatttgggccaagattcctcataccgatggacactttcacccctcaccgctgattggtgggtttgggctgaaacacccgcctcctcaaatttttatcaagaacaccccggtacctgcgaatcctgcaacgaccttcagctctactccggtaaactccttcattactcagtacagcactggccaggtgtcggtgcagattgactgggagatccagaaggagcggtccaaacgctggaaccccgaggtccagtttacctccaactacggacagcaaaactctctgttgtgggctcccgatgcggctgggaaatacactgagcctagggctatcggtacccgctacctcacccaccacctgtaataa

SEQ ID NO: 44 - DNA, 1872 bp, Adeno-associated virus 4
atgccggggttctacgagatcgtgctgaaggtgcccagcgacctggacgagcacctgcccggcatttctgactcttttgtgagctgggtggccgagaaggaatgggagctgccgccggattctgacatggacttgaatctgattgagcaggcacccctgaccgtggccgaaaagctgcaacgcgagttcctggtcgagtggcgccgcgtgagtaaggccccggaggccctcttctttgtccagttcgagaagggggacagctacttccacctgcacatcctggtggagaccgtgggcgtcaaatccatggtggtgggccgctacgtgagccagattaaagagaagctggtgacccgcatctaccgcggggtcgagccgcagcttccgaactggttcgcggtgaccaagacgcgtaatggcgccggaggcgggaacaaggtggtggacgactgctacatccccaactacctgctccccaagacccagcccgagctccagtgggcgtggactaacatggaccagtatataagcgcctgtttgaatctcgcggagcgtaaacggctggtggcgcagcatctgacgcacgtgtcgcagacgcaggagcagaacaaggaaaaccagaaccccaattctgacgcgccggtcatcaggtcaaaaacctccgccaggtacatggagctggtcgggtggctggtggaccgcgggatcacgtcagaaaagcaatggatccaggaggaccaggcgtcctacatctccttcaacgccgcctccaactcgcggtcacaaatcaaggccgcgctggacaatgcctccaaaatcatgagcctgacaaagacggctccggactacctggtgggccagaacccgccggaggacatttccagcaaccgcatctaccgaatcctcgagatgaacgggtacgatccgcagtacgcggcctccgtcttcctgggctgggcgcaaaagaagttcgggaagaggaacaccatctggctctttgggccggccacgacgggtaaaaccaacatcgcggaagccatcgcccacgccgtgcccttctacggctgcgtgaactggaccaatgagaactttccgttcaacgattgcgtcgacaagatggtgatctggtgggaggagggcaagatgacggccaaggtcgtagagagcgccaaggccatcctgggcggaagcaaggtgcgcgtggaccaaaagtgcaagtcatcggcccagatcgacccaactcccgtgatcgtcacctccaacaccaacatgtgcgcggtcatcgacggaaactcgaccaccttcgagcaccaacaaccactccaggaccggatgttcaagttcgagctcaccaagcgcctggagcacgactttggcaaggtcaccaagcaggaagtcaaagactttttccggtgggcgtcagatcacgtgaccgaggtgactcacgagttttacgtcagaaagggtggagctagaaagaggcccgcccccaatgacgcagatataagtgagcccaagcgggcctgtccgtcagttgcgcagccatcgacgtcagacgcggaagctccggtggactacgcggacaggtaccaaaacaaatgttctcgtcacgtgggtatgaatctgatgctttttccctgccggcaatgcgagagaatgaatcagaatgtggacatttgcttcacgcacggggtcatggactgtgccgagtgcttccccgtgtcagaatctcaacccgtgtctgtcgtcagaaagcggacgtatcagaaactgtgtccgattcatcacatcatggggagggcgcccgaggtggcctgctcggcctgcgaactggccaatgtggacttggatgactgtgacatggaacaataa

SEQ ID NO: 45 - DNA, 1611 bp, Adeno-associated virus 4
atgccggggttctacgagatcgtgctgaaggtgcccagcgacctggacgagcacctgcccggcatttctgactcttttgtgagctgggtggccgagaaggaatgggagctgccgccggattctgacatggacttgaatctgattgagcaggcacccctgaccgtggccgaaaagctgcaacgcgagttcctggtcgagtggcgccgcgtgagtaaggccccggaggccctcttctttgtccagttcgagaagggggacagctacttccacctgcacatcctggtggagaccgtgggcgtcaaatccatggtggtgggccgctacgtgagccagattaaagagaagctggtgacccgcatctaccgcggggtcgagccgcagcttccgaactggttcgcggtgaccaagacgcgtaatggcgccggaggcgggaacaaggtggtggacgactgctacatccccaactacctgctccccaagacccagcccgagctccagtgggcgtggactaacatggaccagtatataagcgcctgtttgaatctcgcggagcgtaaacggctggtggcgcagcatctgacgcacgtgtcgcagacgcaggagcagaacaaggaaaaccagaaccccaattctgacgcgccggtcatcaggtcaaaaacctccgccaggtacatggagctggtcgggtggctggtggaccgcgggatcacgtcagaaaagcaatggatccaggaggaccaggcgtcctacatctccttcaacgccgcctccaactcgcggtcacaaatcaaggccgcgctggacaatgcctccaaaatcatgagcctgacaaagacggctccggactacctggtgggccagaacccgccggaggacatttccagcaaccgcatctaccgaatcctcgagatgaacgggtacgatccgcagtacgcggcctccgtcttcctgggctgggcgcaaaagaagttcgggaagaggaacaccatctggctctttgggccggccacgacgggtaaaaccaacatcgcggaagccatcgcccacgccgtgcccttctacggctgcgtgaactggaccaatgagaactttccgttcaacgattgcgtcgacaagatggtgatctggtgggaggagggcaagatgacggccaaggtcgtagagagcgccaaggccatcctgggcggaagcaaggtgcgcgtggaccaaaagtgcaagtcatcggcccagatcgacccaactcccgtgatcgtcacctccaacaccaacatgtgcgcggtcatcgacggaaactcgaccaccttcgagcaccaacaaccactccaggaccggatgttcaagttcgagctcaccaagcgcctggagcacgactttggcaaggtcaccaagcaggaagtcaaagactttttccggtgggcgtcagatcacgtgaccgaggtgactcacgagttttacgtcagaaagggtggagctagaaagaggcccgcccccaatgacgcagatataagtgagcccaagcgggcctgtccgtcagttgcgcagccatcgacgtcagacgcggaagctccggtggactacgcggacagattggctagaggacaacctctctga

SEQ ID NO: 46 - DNA, 1872 bp, Adeno-associated virus 4; identical to SEQ ID NO: 44

SEQ ID NO: 47 - DNA, 1617 bp, Adeno-associated virus 4
  misc_feature (162)..(162): n is a, c, t, or g
atgcgtgcagcagctggcggagctgcagtcgagggsggacaaggtgccgatggagtgggtaatgcctcgggtgattggcattgcgattccacctggtctgagggccacgtcacgaccaccagcaccagaacctgggtcttgcccacctacaacaaccacctntacaagcgactcggagagagcctgcagtccaacacctacaacggattctccaccccctggggatactttgacttcaaccgcttccactgccacttctcaccacgtgactggcagcgactcatcaacaacaactggggcatgcgacccaaagccatgcgggtcaaaatcttcaacatccaggtcaaggaggtcacgacgtcgaacggcgagacaacggtggctaataaccttaccagcacggttcagatctttgcggactcgtcgtacgaactgccgtacgtgatggatgcgggtcaagagggcagcctgcctccttttcccaacgacgtctttatggtgccccagtacggctactgtggactggtgaccggcaacacttcgcagcaacagactgacagaaatgccttctactgcctggagtactttccttcgcagatgctgcggactggcaacaactttgaaattacgtacagttttgagaaggtgcctttccactcgatgtacgcgcacagccagagcctggaccggctgatgaaccctctcatcgaccagtacctgtggggactgcaatcgaccaccaccggaaccaccctgaatgccgggactgccaccaccaactttaccaagctgcggcctaccaacttttccaactttaaaaagaactggctgcccgggccttcaatcaagcagcagggcttctcaaagactgccaatcaaaactacaagatccctgccaccgggtcagacagtctcatcaaatacgagacgcacagcactctggacggaagatggagtgccctgacccccggacctccaatggccacggctggacctgcggacagcaagttcagcaacagccagctcatctttgcggggcctaaacagaacggcaacacggccaccgtacccgggactctgatcttcacctctgaggaggagctggcagccaccaacgccaccgatacggacatgtggggcaacctacctggcggtgaccagagcaacagcaacctgccgaccgtggacagactgacagccttgggagccgtgcctggaatggtctggcaaaacagagacatttactaccagggtcccatttgggccaagattcctcataccgatggacactttcacccctcaccgctgattggtgggtttgggctgaaacacccgcctcctcaaatttttatcaagaacaccccggtacctgcgaatcctgcaacgaccttcagctctactccggtaaactccttcattactcagtacagcactggccaggtgtcggtgcagattgactgggagatccagaaggagcggtccaaacgctggaaccccgaggtccagtttacctccaactacggacagcaaaactctctgttgtgggctcccgatgcggctgggaaatacactgagcctagggctatcggtacccgctacctcacccaccacctgtaa

SEQ ID NO: 48 - DNA, 939 bp, Adeno-associated virus 4
atggagctggtcgggtggctggtggaccgcgggatcacgtcagaaaagcaatggatccaggaggaccaggcgtcctacatctccttcaacgccgcctccaactcgcggtcacaaatcaaggccgcgctggacaatgcctccaaaatcatgagcctgacaaagacggctccggactacctggtgggccagaacccgccggaggacatttccagcaaccgcatctaccgaatcctcgagatgaacgggtacgatccgcagtacgcggcctccgtcttcctgggctgggcgcaaaagaagttcgggaagaggaacaccatctggctctttgggccggccacgacgggtaaaaccaacatcgcggaagccatcgcccacgccgtgcccttctacggctgcgtgaactggaccaatgagaactttccgttcaacgattgcgtcgacaagatggtgatctggtgggaggagggcaagatgacggccaaggtcgtagagagcgccaaggccatcctgggcggaagcaaggtgcgcgtggaccaaaagtgcaagtcatcggcccagatcgacccaactcccgtgatcgtcacctccaacaccaacatgtgcgcggtcatcgacggaaactcgaccaccttcgagcaccaacaaccactccaggaccggatgttcaagttcgagctcaccaagcgcctggagcacgactttggcaaggtcaccaagcaggaagtcaaagactttttccggtgggcgtcagatcacgtgaccgaggtgactcacgagttttacgtcagaaagggtggagctagaaagaggcccgcccccaatgacgcagatataagtgagcccaagcgggcctgtccgtcagttgcgcagccatcgacgtcagacgcggaagctccggtggactacgcggacagattggctagaggacaacctctctga

SEQ ID NO: 49 - DNA, 1197 bp, Adeno-associated virus 4
atggagctggtcgggtggctggtggaccgcgggatcacgtcagaaaagcaatggatccaggaggaccaggcgtcctacatctccttcaacgccgcctccaactcgcggtcacaaatcaaggccgcgctggacaatgcctccaaaatcatgagcctgacaaagacggctccggactacctggtgggccagaacccgccggaggacatttccagcaaccgcatctaccgaatcctcgagatgaacgggtacgatccgcagtacgcggcctccgtcttcctgggctgggcgcaaaagaagttcgggaagaggaacaccatctggctctttgggccggccacgacgggtaaaaccaacatcgcggaagccatcgcccacgccgtgcccttctacggctgcgtgaactggaccaatgagaactttccgttcaacgattgcgtcgacaagatggtgatctggtgggaggagggcaagatgacggccaaggtcgtagagagcgccaaggccatcctgggcggaagcaaggtgcgcgtggaccaaaagtgcaagtcatcggcccagatcgacccaactcccgtgatcgtcacctccaacaccaacatgtgcgcggtcatcgacggaaactcgaccaccttcgagcaccaacaaccactccaggaccggatgttcaagttcgagctcaccaagcgcctggagcacgactttggcaaggtcaccaagcaggaagtcaaagactttttccggtgggcgtcagatcacgtgaccgaggtgactcacgagttttacgtcagaaagggtggagctagaaagaggcccgcccccaatgacgcagatataagtgagcccaagcgggcctgtccgtcagttgcgcagccatcgacgtcagacgcggaagctccggtggactacgcggacaggtaccaaaacaaatgttctcgtcacgtgggtatgaatctgatgctttttccctgccggcaatgcgagagaatgaatcagaatgtggacatttgcttcacgcacggggtcatggactgtgccgagtgcttccccgtgtcagaatctcaacccgtgtctgtcgtcagaaagcggacgtatcagaaactgtgtccgattcatcacatcatggggagggcgcccgaggtggcctgctcggcctgcgaactggccaatgtggacttggatgactgtgacatggaacaa

SEQ ID NO: 50 - DNA, 245 bp, Adeno-associated virus 4
ctccatcatctaggtttgcccactgacgtcaatgtgacgtcctagggttagggaggtccctgtattagcagtcacgtgagtgtcgtatttcgcggagcgtagcggagcgcataccaagctgccacgtcacagccacgtggtccgtttgcgacagtttgcgacaccatgtggtcaggagggtatataaccgcgagtgagccagcgaggagctccattttgcccgcgaattttgaacgagcagcagc

SEQ ID NO: 51 - protein, 313 aa, Adeno-associated virus 4
  MOD_RES (313)..(313): Xaa = any amino acid
MELVGWLVDRGITSEKQWIQEDQASYISFNAASNSRSQIKAALDNASKIMSLTKTAPDYLVGQNPPEDISSNRIYRILEMNGYDPQYAASVFLGWAQKKFGKRNTIWLFGPATTGKTNIAEAIAHAVPFYGCVNWTNENFPFNDCVDKMVIWWEEGKMTAKVVESAKAILGGSKVRVDQKCKSSAQIDPTPVIVTSNTNMCAVIDGNSTTFEHQQPLQDRMFKFELTKRLEHDFGKVTKQEVKDFFRWASDHVTEVTHEFYVRKGGARKRPAPNDADISEPKRACPSVAQPSTSDAEAPVDYADRLARGQPLX

SEQ ID NO: 52 - protein, 399 aa, Adeno-associated virus 4
MELVGWLVDRGITSEKQWIQEDQASYISFNAASNSRSQIKAALDNASKIMSLTKTAPDYLVGQNPPEDISSNRIYRILEMNGYDPQYAASVFLGWAQKKFGKRNTIWLFGPATTGKTNIAEAIAHAVPFYGCVNWTNENFPFNDCVDKMVIWWEEGKMTAKVVESAKAILGGSKVRVDQKCKSSAQIDPTPVIVTSNTNMCAVIDGNSTTFEHQQPLQDRMFKFELTKRLEHDFGKVTKQEVKDFFRWASDHVTEVTHEFYVRKGGARKRPAPNDADISEPKRACPSVAQPSTSDAEAPVDYADRYQNKCSRHVGMNLMLFPCRQCERMNQNVDICFTHGVMDCAECFPVSESQPVSVVRKRTYQKLCPIHHIMGRAPEVACSACELANVDLDDCDMEQ

SEQ ID NO: 53 - protein, 623 aa, Adeno-associated virus 4
MPGFYEIVLKVPSDLDEHLPGISDSFVSWVAEKEWELPPDSDMDLNLIEQAPLTVAEKLQREFLVEWRRVSKAPEALFFVQFEKGDSYFHLHILVETVGVKSMVVGRYVSQIKEKLVTRIYRGVEPQLPNWFAVTKTRNGAGGGNKVVDDCYIPNYLLPKTQPELQWAWTNMDQYISACLNLAERKRLVAQHLTHVSQTQEQNKENQNPNSDAPVIRSKTSARYMELVGWLVDRGITSEKQWIQEDQASYISFNAASNSRSQIKAALDNASKIMSLTKTAPDYLVGQNPPEDISSNRIYRILEMNGYDPQYAASVFLGWAQKKFGKRNTIWLFGPATTGKTNIAEAIAHAVPFYGCVNWTNENFPFNDCVDKMVIWWEEGKMTAKVVESAKAILGGSKVRVDQKCKSSAQIDPTPVIVTSNTNMCAVIDGNSTTFEHQQPLQDRMFKFELTKRLEHDFGKVTKQEVKDFFRWASDHVTEVTHEFYVRKGGARKRPAPNDADISEPKRACPSVAQPSTSDAEAPVDYADRYQNKCSRHVGMNLMLFPCRQCERMNQNVDICFTHGVMDCAECFPVSESQPVSVVRKRTYQKLCPIHHIMGRAPEVACSACELANVDLDDCDMEQ

SEQ ID NO: 54 - protein, 537 aa, Adeno-associated virus 4
  MOD_RES (537)..(537): Xaa = any amino acid
MPGFYEIVLKVPSDLDEHLPGISDSFVSWVAEKEWELPPDSDMDLNLIEQAPLTVAEKLQREFLVEWRRVSKAPEALFFVQFEKGDSYFHLHILVETVGVKSMVVGRYVSQIKEKLVTRIYRGVEPQLPNWFAVTKTRNGAGGGNKVVDDCYIPNYLLPKTQPELQWAWTNMDQYISACLNLAERKRLVAQHLTHVSQTQEQNKENQNPNSDAPVIRSKTSARYMELVGWLVDRGITSEKQWIQEDQASYISFNAASNSRSQIKAALDNASKIMSLTKTAPDYLVGQNPPEDISSNRIYRILEMNGYDPQYAASVFLGWAQKKFGKRNTIWLFGPATTGKTNIAEAIAHAVPFYGCVNWTNENFPFNDCVDKMVIWWEEGKMTAKVVESAKAILGGSKVRVDQKCKSSAQIDPTPVIVTSNTNMCAVIDGNSTTFEHQQPLQDRMFKFELTKRLEHDFGKVTKQEVKDFFRWASDHVTEVTHEFYVRKGGARKRPAPNDADISEPKRACPSVAQPSTSDAEAPVDYADRLARGQPLX

SEQ ID NO: 55 - protein, 623 aa, Adeno-associated virus 4; identical to SEQ ID NO: 53

SEQ ID NO: 56 - protein, 544 aa, Adeno-associated virus 4
MSDDSEMRAAAGGAAVEGGQGADGVGNASGDWHCDSTWSEGHVTTTSTRTWVLPTYNNHLYKRLGESLQSNTYNGFSTPWGYFDFNRFHCHFSPRDWQRLINNNWGMRPKAMRVKIFNIQVKEVTTSNGETTVANNLTSTVQIFADSSYELPYVMDAGQEGSLPPFPNDVFMVPQYGYCGLVTGNTSQQQTDRNAFYCLEYFPSQMLRTGNNFEITYSFEKVPFHSMYAHSQSLDRLMNPLIDQYLWGLQSTTTGTTLNAGTATTNFTKLRPTNFSNFKKNWLPGPSIKQQGFSKTANQNYKIPATGSDSLIKYETHSTLDGRWSALTPGPPMATAGPADSKFSNSQLIFAGPKQNGNTATVPGTLIFTSEEELAATNATDTDMWGNLPGGDQSNSNLPTVDRLTALGAVPGMVWQNRDIYYQGPIWAKIPHTDGHFHPSPLIGGFGLKHPPPQIFIKNTPVPANPATTFSSTPVNSFITQYSTGQVSVQIDWEIQKERSKRWNPEVQFTSNYGQQNSLLWAPDAAGKYTEPRAIGTRYLTHHL

SEQ ID NO: 57 - protein, 734 aa, Adeno-associated virus 4
MTDGYLPDWLEDNLSEGVREWWALQPGAPKPKANQQHQDNARGLVLPGYKYLGPGNGLDKGEPVNAADAAALEHDKAYDQQLKAGDNPYLKYNHADAEFQQRLQGDTSFGGNLGRAVFQAKKRVLEPLGLVEQAGETAPGKKRPLIESPQQPDSSTGIGKKGKQPAKKKLVFEDETGAGDGPPEGSTSGAMSDDSEMRAAAGGAAVEGGQGADGVGNASGDWHCDSTWSEGHVTTTSTRTWVLPTYNNHLYKRLGESLQSNTYNGFSTPWGYFDFNRFHCHFSPRDWQRLINNNWGMRPKAMRVKIFNIQVKEVTTSNGETTVANNLTSTVQIFADSSYELPYVMDAGQEGSLPPFPNDVFMVPQYGYCGLVTGNTSQQQTDRNAFYCLEYFPSQMLRTGNNFEITYSFEKVPFHSMYAHSQSLDRLMNPLIDQYLWGLQSTTTGTTLNAGTATTNFTKLRPTNFSNFKKNWLPGPSIKQQGFSKTANQNYKIPATGSDSLIKYETHSTLDGRWSALTPGPPMATAGPADSKFSNSQLIFAGPKQNGNTATVPGTLIFTSEEELAATNATDTDMWGNLPGGDQSNSNLPTVDRLTALGAVPGMVWQNRDIYYQGPIWAKIPHTDGHFHPSPLIGGFGLKHPPPQIFIKNTPVPANPATTFSSTPVNSFITQYSTGQVSVQIDWEIQKERSKRWNPEVQFTSNYGQQNSLLWAPDAAGKYTEPRAIGTRYLTHHL

SEQ ID NO: 58 - protein, 598 aa, Adeno-associated virus 4
TAPGKKRPLIESPQQPDSSTGIGKKGKQPAKKKLVFEDETGAGDGPPEGSTSGAMSDDSEMRAAAGGAAVEGGQGADGVGNASGDWHCDSTWSEGHVTTTSTRTWVLPTYNNHLYKRLGESLQSNTYNGFSTPWGYFDFNRFHCHFSPRDWQRLINNNWGMRPKAMRVKIFNIQVKEVTTSNGETTVANNLTSTVQIFADSSYELPYVMDAGQEGSLPPFPNDVFMVPQYGYCGLVTGNTSQQQTDRNAFYCLEYFPSQMLRTGNNFEITYSFEKVPFHSMYAHSQSLDRLMNPLIDQYLWGLQSTTTGTTLNAGTATTNFTKLRPTNFSNFKKNWLPGPSIKQQGFSKTANQNYKIPATGSDSLIKYETHSTLDGRWSALTPGPPMATAGPADSKFSNSQLIFAGPKQNGNTATVPGTLIFTSEEELAATNATDTDMWGNLPGGDQSNSNLPTVDRLTALGAVPGMVWQNRDIYYQGPIWAKIPHTDGHFHPSPLIGGFGLKHPPPQIFIKNTPVPANPATTFSSTPVNSFITQYSTGQVSVQIDWEIQKERSKRWNPEVQFTSNYGQQNSLLWAPDAAGKYTEPRAIGTRYLTHHL

SEQ ID NO: 59 - DNA, 129 bp, Adeno-associated virus 4
ttggccactccctctatgcgcgctcgctcactcactcggccctgcggccagaggccggcagtctggagacctttggtgtccagggcagggccgagtgagtgagcgagcgcgcatagagggagtggccaa

SEQ ID NO: 60 - DNA, 125 bp, Adeno-associated virus 4
ttggccactccctctatgcgcgctcgctcactcactcggccctggagaccaaaggtctccagactgccggcctctggccggcagggccgagtgagtgagcgagcgcgcatagagggagtggccaa

SEQ ID NO: 61 - DNA, 4768 bp, Adeno-associated virus 4
  misc_feature (3009)..(3009): n is a, c, t, or g
ttggccactccctctatgcgcgctcgctcactcactcggccctggagaccaaaggtctccagactgccggcctctggccggcagggccgagtgagtgagcgagcgcgcatagagggagtggccaactccatcatctaggtttgcccactgacgtcaatgtgacgtcctagggttagggaggtccctgtattagcagtcacgtgagtgtcgtatttcgcggagcgtagcggagcgcataccaagctgccacgtcacagccacgtggtccgtttgcgacagtttgcgacaccatgtggtcaggagggtatataaccgcgagtgagccagcgaggagctccattttgcccgcgaattttgaacgagcagcagccatgccggggttctacgagatcgtgctgaaggtgcccagcgacctggacgagcacctgcccggcatttctgactcttttgtgagctgggtggccgagaaggaatgggagctgccgccggattctgacatggacttgaatctgattgagcaggcacccctgaccgtggccgaaaagctgcaacgcgagttcctggtcgagtggcgccgcgtgagtaaggccccggaggccctcttctttgtccagttcgagaagggggacagctacttccacctgcacatcctggtggagaccgtgggcgtcaaatccatggtggtgggccgctacgtgagccagattaaagagaagctggtgacccgcatctaccgcggggtcgagccgcagcttccgaactggttcgcggtgaccaagacgcgtaatggcgccggaggcgggaacaaggtggtggacgactgctacatccccaactacctgctccccaagacccagcccgagctccagtgggcgtggactaacatggaccagtatataagcgcctgtttgaatctcgcggagcgtaaacggctggtggcgcagcatctgacgcacgtgtcgcagacgcaggagcagaacaaggaaaaccagaaccccaattctgacgcgccggtcatcaggtcaaaaacctccgccaggtacatggagctggtcgggtggctggtggaccgcgggatcacgtcagaaaagcaatggatccaggaggaccaggcgtcctacatctccttcaacgccgcctccaactcgcggtcacaaatcaaggccgcgctggacaatgcctccaaaatcatgagcctgacaaagacggctccggactacctggtgggccagaacccgccggaggacatttccagcaaccgcatctaccgaatcctcgagatgaacgggtacgatccgcagtacgcggcctccgtcttcctgggctgggcgcaaaagaagttcgggaagaggaacaccatctggctctttgggccggccacgacgggtaaaaccaacatcgcggaagccatcgcccacgccgtgcccttctacggctgcgtgaactggaccaatgagaactttccgttcaacgattgcgtcgacaagatggtgatctggtgggaggagggcaagatgacggccaaggtcgtagagagcgccaaggccatcctgggcggaagcaaggtgcgcgtggaccaaaagtgcaagtcatcggcccagatcgacccaactcccgtgatcgtcacctccaacaccaacatgtgcgcggtcatcgacggaaactcgaccaccttcgagcaccaacaaccactccaggaccggatgttcaagttcgagctcaccaagcgcctggagcacgactttggcaaggtcaccaagcaggaagtcaaagactttttccggtgggcgtcagatcacgtgaccgaggtgactcacgagttttacgtcagaaagggtggagctagaaagaggcccgcccccaatgacgcagatataagtgagcccaagcgggcctgtccgtcagttgcgcagccatcgacgtcagacgcggaagctccggtggactacgcggacaggtaccaaaacaaatgttctcgtcacgtgggtatgaatctgatgctttttccctgccggcaatgcgagagaatgaatcagaatgtggacatttgcttcacgcacggggtcatggactgtgccgagtgcttccccgtgtcagaatctcaacccgtgtctgtcgtcagaaagcggacgtatcagaaactgtgtccgattcatcacatcatggggagggcgcccgaggtggcctgctcggcctgcgaactggccaatgtggacttggatgactgtgacatggaacaataaatgactcaaaccagatatgactgacggttaccttccagattggctagaggacaacctctctgaaggcgttcgagagtggtgggcgctgcaacctggagcccctaaacccaaggcaaatcaacaacatcaggacaacgctcggggtcttgtgcttccgggttacaaatacctcggacccggcaacggactcgacaagggggaacccgtcaacgcagcggacgcggcagccctcgagcacgacaaggcctacgaccagcagctcaaggccggtgacaacccctacctcaagtacaaccacgccgacgcggagttccagcagcggcttcagggcgacacaccgtttgggggcaacctcggcagagcagtcttccaggccaaaaagagggttcttgaacctcttggtctggttgagcaagcgggtgagacggctcctggaaagaagagaccgttgattgaatccccccagcagcccgactcctccacgggtatcggcaaaaaaggcaagcagccggctaaaaagaagctcgttttcgaagacgaaactggagcaggcgacggaccccctgagggatcaacttccggagccatgtctgatgacagtgagatgcgtgcagcagctggcggagctgcagtcgagggsggacaaggtgccgatggagtgggtaatgcctcgggtgattggcattgcgattccacctggtctgagggccacgtcacgaccaccagcaccagaacctgggtcttgcccacctacaacaaccacctntacaagcgactcggagagagcctgcagtccaacacctacaacggattctccaccccctggggatactttgacttcaaccgcttccactgccacttctcaccacgtgactggcagcgactcatcaacaacaactggggcatgcgacccaaagccatgcgggtcaaaatcttcaacatccaggtcaaggaggtcacgacgtcgaacggcgagacaacggtggctaataaccttaccagcacggttcagatctttgcggactcgtcgtacgaactgccgtacgtgatggatgcgggtcaagagggcagcctgcctccttttcccaacgacgtctttatggtgccccagtacggctactgtggactggtgaccggcaacacttcgcagcaacagactgacagaaatgccttctactgcctggagtactttccttcgcagatgctgcggactggcaacaactttgaaattacgtacagttttgagaaggtgcctttccactcgatgtacgcgcacagccagagcctggaccggctgatgaaccctctcatcgaccagtacctgtggggactgcaatcgaccaccaccggaaccaccctgaatgccgggactgccaccaccaactttaccaagctgcggcctaccaacttttccaactttaaaaagaactggctgcccgggccttcaatcaagcagcagggcttctcaaagactgccaatcaaaactacaagatccctgccaccgggtcagacagtctcatcaaatacgagacgcacagcactctggacggaagatggagtgccctgacccccggacctccaatggccacggctggacctgcggacagcaagttcagcaacagccagctcatctttgcggggcctaaacagaacggcaacacggccaccgtacccgggactctgatcttcacctctgaggaggagctggcagccaccaacgccaccgatacggacatgtggggcaacctacctggcggtgaccagagcaacagcaacctgccgaccgtggacagactgacagccttgggagccgtgcctggaatggtctggcaaaacagagacatttactaccagggtcccatttgggccaagattcctcataccgatggacactttcacccctcaccgctgattggtgggtttgggctgaaacacccgcctcctcaaatttttatcaagaacaccccggtacctgcgaatcctgcaacgaccttcagctctactccggtaaactccttcattactcagtacagcactggccaggtgtcggtgcagattgactgggagatccagaaggagcggtccaaacgctggaaccccgaggtccagtttacctccaactacggacagcaaaactctctgttgtgggctcccgatgcggctgggaaatacactgagcctagggctatcggtacccgctacctcacccaccacctgtaataacctgttaatcaataaaccggtttattcgtttcagttgaactttggtctccgtgtccttcttatcttatctcgtttccatggctactgcgtacataagcagcggcctgcggcgcttgcgcttcgcggtttacaactgccggttaatcagtaacttctggcaaaccatgatgatggagttggccactccctctatgcgcgctcgctcactcactcggccctggagaccaaaggtctccagactgccggcctctggccggcagggccgagtgagtgagcgagcgcgcatagagggagtggccaa

SEQ ID NO: 62 - DNA, 3098 bp, Adeno-associated virus
gaattcgccctttctacggctgcgtcaactggaccaatgagaactttcccttcaacgattgcgtcgacaagatggtgatctggtgggaggagggcaagatgacggccaaggtcgtggagtccgccaaggccattctcggcggcagcaaggtgcgcgtggaccaaaagtgcaagtcttccgcccagatcgatcccacccccgtgatcgtcacttccaacaccaacatgtgcgctgtgattgacgggaacagcaccaccttcgagcaccagcagccgttacaagaccggatgttcaaatttgaactcacccgccgtctggagcacgactttggcaaggtgacaaagcaggaagtcaaagagttcttccgctgggcgcaggatcacgtgaccgaggtggcgcatgagttctacgtcagaaagggtggagccaacaagagacccgcccccgatgacgcggataaaagcgagcccaagcgggcctgcccctcagtcgcggatccatcgacgtcagacgcggaaggagctccggtggactttgccgacaggtaccaaaacaaatgttctcgtcacgcgggcatgcttcagatgctgtttccctgcaagacatgcgagagaatgaatcagaatttcaacatttgcttcacgcacgggaccagagactgttcagaatgtttccccggcgtgtcagaatctcaaccggtcgtcagaaagaggacgtatcggaaactctgtgccattcatcatctgctggggcgggctcccgagattgcttgctcggcctgcgatctggtcaacgtggacctggatgaccgtgtttctgagcaataaatgacttaaaccaggtatggctgccgatggttatcttccagattggctcgaggacaacctctctgagggcattcgcgagtggtgggacttgaaacctggagccccgaaacccaaagccaaccagcaaaagcaggacgacggccggggtctggtgcttcctggctacaagtacctcggacccttcaacggactcgacaagggagagccggtcaacgaggcagacgccgcggccctcgagcacgacaaggcctacgacaagcagctcgagcagggggacaacccgtacctcaagtacaaccacgccgacgccgagtttcaggagcgtcttcaagaagatacgtcttttgggggcaacctcgggcgagcagtcttccaggccaagaagcgggttctcgaacctctcggtctggttgaggaaggcgctaagacggctcctggaaagaagagacccatagaatcccccgactcctccacgggcatcggcaagaaaggccagcagcccgctaaaaagaagctcaactttgggcagactggcgactcagagtcagtgcccgacccccaacctctcggagaacctcccgccgcgccctcaggtctgggatctggtacaatggctgcaggcggtggcgcaccaatggcagacaataacgaaggcgccgacggagtgggtaatgcctccggaaattggcattgcgattccacatggctgggcgacagagtcatcaccaccagcacccgcacctgggccctgcccacctacaacaaccacctctacaagcagatatcaagtcagagcggggctaccaacgacaaccacttcttcggctacagcaccccctggggctattttgacttcaacagattccactgccacttctcaccacgtgactggcagcgactcatcaacaacaactggggattccggcccagaaagctgcggttcaagttgttcaacatccaggtcaaggaggtcacgacgaacgacggcgttacgaccatcgctaataaccttaccagcacgattcaggtcttctcggactcggagtaccaactgccgtacgtcctcggctctgcgcaccagggctgcctccctccgttccctgcggacgtgttcatgattcctcagtacggatatctgactctaaacaacggcagtcagtctgtgggacgttcctccttctactgcctggagtactttccttctcagatgctgagaacgggcaataactttgaattcagctacacctttgaggaagtgcctttccacagcagctatgcgcacagccagagcctggaccggctgatgaatcccctcatcgaccagtacctgtactacctggcccggacccagagcactacggggtccacaagggagctgcagttccatcaggctgggcccaacaccatggccgagcaatcaaagaactggctgcccggaccctgttatcggcagcagagactgtcaaaaaacatagacagcaacaacaacagtaactttgcctggaccggggccactaaataccatctgaatggtagaaattcattaaccaacccgggcgtagccatggccaccaacaaggacgacgaggaccagttctttcccatcaacggagtgctggtttttggcgaaacgggggctgccaacaagacaacgctggaaaacgtgctaatgaccagcgaggaggagatcaaaaccaccaatcccgtggctacagaagaatacggtgtggtctccagcaacctgcaatcgtctacggccggaccccagacacagactgtcaacagccagggggctctgcccggcatggtctggcagaaccgggacgtgtacctgcagggtcccatctgggccaaaattcctcacacggacggcaactttcacccgtctcccctgatgggcggatttggactcaaacacccgcctcctcaaattctcatcaaaaacaccccggtacctgctaatcctccagaggtgtttactcctgccaagtttgcctcatttatcacgcagtacagcaccggccaggtcagcgtggagatcgagtgggaactgcagaaagaaaacagcaaacgctggaatccagagattcagtacacctcaaattatgccaagtctaataatgtggaatttgctgtcaacaacgaaggggtttatactgagcctcgccccattggcacccgttacctcacccgtaacctgtaattgcctgttaatcaataaaccggttaattcgtttcagttgaactttggtctctgcgaagggcgaattc

SEQ ID NO: 63 - protein, 728 aa, Artificial Sequence
  Description of Artificial Sequence: Synthetic polypeptide
MAADGYLPDWLEDNLSEGIREWWDLKPGAPKPKANQQKQDDGRGLVLPGYKYLGPFNGLDKGEPVNEADAAALEHDKAYDKQLEQGDNPYLKYNHADAEFQERLQEDTSFGGNLGRAVFQAKKRVLEPLGLVEEGAKTAPGKKRPIESPDSSTGIGKKGQQPAKKKLNFGQTGDSESVPDPQPLGEPPAAPSGLGSGTMAAGGGAPMADNNEGADGVGNASGNWHCDSTWLGDRVITTSTRTWALPTYNNHLYKQISSQSGATNDNHFFGYSTPWGYFDFNRFHCHFSPRDWQRLINNNWGFRPRKLRFKLFNIQVKEVTTNDGVTTIANNLTSTIQVFSDSEYQLPYVLGSAHQGCLPPFPADVFMIPQYGYLTLNNGSQSVGRSSFYCLEYFPSQMLRTGNNFEFSYTFEEVPFHSSYAHSQSLDRLMNPLIDQYLYYLARTQSTTGSTRELQFHQAGPNTMAEQSKNWLPGPCYRQQRLSKNIDSNNNSNFAWTGATKYHLNGRNSLTNPGVAMATNKDDEDQFFPINGVLVFGETGAANKTTLENVLMTSEEEIKTTNPVATEEYGVVSSNLQSSTAGPQTQTVNSQGALPGMVWQNRDVYLQGPIWAKIPHTDGNFHPSPLMGGFGLKHPPPQILIKNTPVPANPPEVFTPAKFASFITQYSTGQVSVEIEWELQKENSKRWNPEIQYTSNYAKSNNVEFAVNNEGVYTEPRPIGTRYLTRNL

SEQ ID NO: 64 - DNA, 2495 bp, Adeno-associated virus
gaattcgccctttctacggctgcgtcaactagaccaatgagaactttcccttcaacgattgcgtcgacaagatggtgatctggtgggaggagggcaagatgacggccaaggtcgtggagtccgccaaggccattcatcatctgctggggcgggctcccgagattgcttgctcggcctgcgatctggtcaacgtggacctggatgactgtgtttctgagcaataaatgacttaaaccaggtatggctgccgatggttatcttccagattggctcgaggacaacctctctgagggcattcgcgagtggtgggacttgaaacctggagccccgaaacccaaagccaaccagcaaaagcaggacgacggccggggtctggtgcttcctggctacaagtacctcggacccttcaacggactcgacaagggagagccggtcaacgaggcagacgccgcggccctcgagcacgacaaggcctacgacaagcagctcgagcagggggacaacccgtacctcaagtacaaccacgccgacgccgagtttcaggagcgtcttcaagaagatacgtcttttgggggcaacctcgggcgagcagtcttccaggccaagaagcgggttctcgaacctctcggtctggttgaggaaggcgctaagacggctcctggaaagaagagacccatagaatcccccgactcctccacgggcatcggcaagaaaggccagcagcccgctaaaaagaagctcaactttgggcagactggcgactcagagtcagtgcccgaccctcaaccaatcggagaaccccccgcaggcccctctggtctgggatctggtacaatggctgcaggcggtggcgctccaatggcagacaataacgaaggcgccgacggagtgggtaatgcctccggaaattggcattgcgattccacatggctgggcgacagagtcatcaccaccagcacccgcacctgggccctgcccacctacaacaaccacctctacaagcagatatcaagtcagagcggggctaccaacgacaaccacttcttcggctacagcaccccctggggctattttgacttcaacagattccactgccacttctcaccacgtgactggcagcgactcatcaacaacaactggggattccggcccagaaagctgcggttcaagttgttcaacatccaggtcaaggaggtcacgacgaacgacggcgttacgaccatcgctaataaccttaccagcacgattcaggtcttctcggactcggagtaccaactgccgtacgtcctcggctctgcgcaccagggctgcctccctccgttccctgcggacgtgttcatgattcctcagtacggatatctgactctaaacaacggcagtcagtctgtgggacgttcctccttctactgcctggagtactttccttctcagatgctgagaacgggcaataactttgaattcagctacacctttgaggaagtgcctttccacagcagctatgcgcacagccagagcctggaccggctgatgaatcccctcatcgaccagtacctgtactacctggcccggacccagagcactacggggtccacaagggagctgcagttccatcaggctgggcccaacaccatggccgagcaatcaaagaactggctgcccggaccctgttatcggcagcagagactgtcaaaaaacatagacagcaacaacaccagtaactttgcctggaccggggccactaaataccatctgaatggtagaaattcattaaccaacccgggcgtagccatggccaccaacaaggacgacgaggaccagttctttcccatcaacggagtgctggtttttggcaaaacgggggctgccaacaagacaacgctggaaaacgtgctaatgaccagcgaggaggagatcaaaaccaccaatcccgtggctacagaacagtacggtgtggtctccagcaacctgcaatcgtctacggccggaccccagacacagactgtcaacagccagggggctctgcccggcatggtctggcagaaccgggacgtgtacctgcagggtcccatctgggccaaaattcctcacacggacggcaactttcacccgtctcccctgatgggcggatttggactcaaacacccgcctcctcaaattctcatcaaaaacaccccggtacctgctaatcctccagaggtgtttactcctgccaagtttgcctcatttatcacgcagtacagcaccggccaggtcagcgtggagatcgagtgggaactgcagaaagaaaacagcaaacgctggaatccagagattcagtacacctcaaattatgccaagtctaataatgtggaatttgctgtcaacaacgaaggggtttatactgagcctcgccccattggcacccgttacctcacccgtaacctgtaattgcctgttaatcaataaaccggttaattcgtttcagttgaactttggtctctgcgaagggcgaattc

SEQ ID NO: 65 - protein, 728 aa, Artificial Sequence
  Description of Artificial Sequence: Synthetic polypeptide
MAADGYLPDWLEDNLSEGIREWWDLKPGAPKPKANQQKQDDGRGLVLPGYKYLGPFNGLDKGEPVNEADAAALEHDKAYDKQLEQGDNPYLKYNHADAEFQERLQEDTSFGGNLGRAVFQAKKRVLEPLGLVEEGAKTAPGKKRPIESPDSSTGIGKKGQQPAKKKLNFGQTGDSESVPDPQPIGEPPAGPSGLGSGTMAAGGGAPMADNNEGADGVGNASGNWHCDSTWLGDRVITTSTRTWALPTYNNHLYKQISSQSGATNDNHFFGYSTPWGYFDFNRFHCHFSPRDWQRLINNNWGFRPRKLRFKLFNIQVKEVTTNDGVTTIANNLTSTIQVFSDSEYQLPYVLGSAHQGCLPPFPADVFMIPQYGYLTLNNGSQSVGRSSFYCLEYFPSQMLRTGNNFEFSYTFEEVPFHSSYAHSQSLDRLMNPLIDQYLYYLARTQSTTGSTRELQFHQAGPNTMAEQSKNWLPGPCYRQQRLSKNIDSNNTSNFAWTGATKYHLNGRNSLTNPGVAMATNKDDEDQFFPINGVLVFGKTGAANKTTLENVLMTSEEEIKTTNPVATEQYGVVSSNLQSSTAGPQTQTVNSQGALPGMVWQNRDVYLQGPIWAKIPHTDGNFHPSPLMGGFGLKHPPPQILIKNTPVPANPPEVFTPAKFASFITQYSTGQVSVEIEWELQKENSKRWNPEIQYTSNYAKSNNVEFAVNNEGVYTEPRPIGTRYLTRNL

SEQ ID NO: 66 - DNA, 2504 bp, Adeno-associated virus
gaattcgccctttctacggctgcgtcaactggaccaatgagaactttcccttcaacgattgcgtcgacaagatggtgatctggtgggaggagggcaagatgacggccaaggtcgtggagtccgccaaggccattcatcatctgctggggcgggctcccgagattgcttgctcggcctgcgatctggtcaacgtggacctggatgactgtgtttctgagcaataaatgacttaaaccaggtatggctgccgatggttatcttccagattggctcgaggacaacctctctgagggcattcgcgagtggtgggacttgaaacctggagccccgaaacccaaagccaaccagcaaaagcaggacgacggccggggtctggtgcttcctggctacaagtacctcggacccttcaacggactcgacaagggagagccggtcaacgaggcagacgccgcggccctcgagcacgacaaggcctacgacaagcagctcgagcagggggacaacccgtacctcaagtacaaccacgccgacgccgagtttcaggagcgtcttcaagaagatacgtcttttgggggcaacctcgggcgagcagtcttccaggccaagaagcgggttctcgaacctctcggtctggttgaggaaggcgctaagacggctcctggaaagaagagacccatagaatcccccgactcctccacgggcatcggcaagaaaggccagcagcccgctaaaaagaagctcaactttgggcagactggcgactcagagtcagtgcccgaccctcaaccaatcggagaaccccccgcaggcccctctggtctgggatctggtacaatggctgcaggcggtggcgctccaatggcagacaataacgaaggcgccgacggagtgggtaatgcctccggaaattggcattgcgattccacatggctgggcgacagagtcatcaccaccagcacccgcacctgggccctgcccacctacaacaaccacctctacaagcagatatcaagtcagagcggggctaccaacgacaaccacttcttcggctacagcaccccctggggctattttgacttcaacagattccactgccacttctcatcacgtgactggcagcgactcatcaacaacaactggggattccggcccaagagactcaacttcaagctcttcaacatccaggtcaaggaggtcacgcagaatgaaggcaccaagaccatcgccaataaccttaccagcacgattcaggtctttacggactcggaataccggctcccgtacgtcctcggctctgcgcaccagggctgcctgcctccgttcccggcggacgtcttcatgattcctcagtacgggtacctgactctgaacaacggcagtcaggccgtgggccgttcctccttctactgcctggagtactttccttctcaaatgctgagaacgggcaacaactttgagttcagctaccagtttgaggacgtgccttttcacagcagctacgcgcacagccaaagcctggaccggctgatgaaccccctcatcgaccagtacctgtactacctgtctcggactcagtccacgggaggtaccgcaggaactcagcagttgctattttctcaggccgggcctaataacatgtcggctcaggccaaaaactggctacccgggccctgctaccggcagcaacgcgtctccacgacactgtcgcaaaataacaacagcaactttgcttggaccggtgccaccaagtatcatctgaatggcagagactctctggtaaatcccggtgtcgctatggcaacgcacaaggacgacgaagagcgattttttccatccagcggagtcttgatgtttgggaaacagggagctggaaaagacaacgtggactatagcagcgttatgctaaccagtgaggaagaaatcaaaaccaccaacccagtggccacagaacagtacggcgtggtggccgataacctgcaacagcaaaacgccgctcctattgtaggggccgtcaacagtcaaggagccttacctggcatggtctggcagaaccgggacgtgtacctgcagggtcctatctgggccaagattcctcacacggacggcaactttcatccttcgccgctgatgggaggctttggactgaaacacccgcctcctcagatcctgattaagaatacacctgttcccgcggatcctccaactaccttcagtcaagccaagccggcgtcgttcatcacgcagtacagcaccggacaggtcagcgtggaaattgaatgggagctgcagaaagagaacagcaagcgctggaacccagagattcagtatacttccaactactacaaatctacaaatgtggactttgctgtcaatactgagggtacttattcagagcctcgccccattggcacccgttacctcacccgtaacctgtaattgcctgttaatcaataaaccggttaattcgtttcagttgaactttggtctctgcgaagggcgaattc

SEQ ID NO: 67 - protein, 731 aa, Artificial Sequence
  Description of Artificial Sequence: Synthetic polypeptide
MAADGYLPDWLEDNLSEGIREWWDLKPGAPKPKANQQKQDDGRGLVLPGYKYLGPFNGLDKGEPVNEADAAALEHDKAYDKQLEQGDNPYLKYNHADAEFQERLQEDTSFGGNLGRAVFQAKKRVLEPLGLVEEGAKTAPGKKRPIESPDSSTGIGKKGQQPAKKKLNFGQTGDSESVPDPQPIGEPPAGPSGLGSGTMAAGGGAPMADNNEGADGVGNASGNWHCDSTWLGDRVITTSTRTWALPTYNNHLYKQISSQSGATNDNHFFGYSTPWGYFDFNRFHCHFSSRDWQRLINNNWGFRPKRLNFKLFNIQVKEVTQNEGTKTIANNLTSTIQVFTDSEYRLPYVLGSAHQGCLPPFPADVFMIPQYGYLTLNNGSQAVGRSSFYCLEYFPSQMLRTGNNFEFSYQFEDVPFHSSYAHSQSLDRLMNPLIDQYLYYLSRTQSTGGTAGTQQLLFSQAGPNNMSAQAKNWLPGPCYRQQRVSTTLSQNNNSNFAWTGATKYHLNGRDSLVNPGVAMATHKDDEERFFPSSGVLMFGKQGAGKDNVDYSSVMLTSEEEIKTTNPVATEQYGVVADNLQQQNAAPIVGAVNSQGALPGMVWQNRDVYLQGPIWAKIPHTDGNFHPSPLMGGFGLKHPPPQILIKNTPVPADPPTTFSQAKPASFITQYSTGQVSVEIEWELQKENSKRWNPEIQYTSNYYKSTNVDFAVNTEGTYSEPRPIGTRYLTRNL

SEQ ID NO: 68 - DNA, 3128 bp, Adeno-associated virus
gaattcgccctttctacggctgcgtcaactggaccaatgagaactttcccttcaacgattgcgtcgacaagatggtgatctggtgggaggagggcaagatgacggccaaggtcgtggagtccgccaaggccattctcggcggcagcaaggtgcgcgtggaccaaaagtgcaagtcttccgcccagatcgatcccacccccgtgatcgtcacttccaacaccaacatgtgcgccgtgattgacgggaacagcaccaccttcgagcaccagcagccgttacaagaccggatgttcaaatttgaactcacccgccgtctggagcacgactttggcaaggtgacaaagcaggaagtcaaagagttcttccgctgggcgcaggatcacgtgaccgaggtggcgcatgagttctacgtcagaaagggtggagccaacaagagacccgcccccgatgacgcggataaaagcgagcccaagcgggcctgcccctcagtcgcggatccatcgacgtcagacgcggaaggagctccggtggactttgccgacaggtaccaaaacaaatgttctcgtcacgcgggcatgcttcagatgctgtttccctgcaagacatgcgagagaatgaatcagaatttcaacatttgcttcacgcacgggaccagagactgttcagaatgtttccccggcgtgtcagaatctcaaccggtcgtcagaaagaggacgtatcggaaactctgtgccattcatcatctgctagggcgggctcccgagattgcttgctcggcctgcgatctggtcaacgtggacctggatgactgtgtttctgagcaataaatgacttaaaccaggtatggctgccgatggttatcttccagattggctcgaggacaacctctctgagggcattcgcgagtggtgggacttgaaacctggagccccgaaacccaaagccaaccagcaaaagcaggacgacggccggggtctggtgcttcctggctacaagtacctcggacccttcaacggactcgacaagggggagcccgtcaacgcggcggacgcagcggccctcgagcacgacaaggcctacgaccagcagctcaaagcgggtgacaatccgtacctgcggtataaccacgccgacgccgagtttcaggagcgtctgcaagaagatacgtcttttgggggcaacctcgggcgagcagtcttccaggccaagaagcgggttctcgaacctctcggtctggttgaggaaggcgctaagacggctcctggaaagaagagaccggtagagccatcaccccagcgttctccagactcctctacgggcatcggcaagacaggccagcagcccgcgaaaaagagactcaactttgggcagactggcgactcagagtcagtgcccgaccctcaaccaatcggagaaccccccgcaggcccctctggtctgggatctggtacaatggctgcaggcggtggcgctccaatggcagacaataacgaaggcgccgacggagtgggtagttcctcaggaaattggcattgcgattccacatggctgggcgacagagtcatcaccaccagcacccgaacctgggccctccccacctacaacaaccacctctacaagcaaatctccaacgggacatcgggaggaagcaccaacgacaacacctacttcggctacagcaccccctgggggtattttgactttaacagattccactgccacttctcaccacgtgactggcagcgactcatcaacaacaactggggattccggcccaagagactcaacttcaagctcttcaacatccaggtcaaggaggtcacgcagaatgaaggcaccaagaccatcgccaataaccttaccagcacgattcaggtctttacggactcggaataccagctcccgtacgtcctcggctctgcgcaccagggctgcctgcctccgttcccggcggacgtcttcatgattcctcagtacgggtacctgactctgaacaacggcagtcaggccgtgggccgttcctccttctactgcctggagtactttccttctcaaatgctgagaacgggcaacaactttgagttcagctaccagtttgaggacgtgccttttcacagcagctacgcgcacagccaaagcctggaccggctgatgaaccccctcatcgaccagtacctgtactacctgtctcggactcagtccacgggaggtaccgcaggaactcagcagttgctattttctcaggccgggcctaataacatgtcggctcaggccaaaaactggctacccgggccctgctaccggcagcaacgcgtctccacgacactgtcgcaaaataacaacagcaactttgcttggaccggtgccaccaagtatcatctgaatggcagagactctctggtaaatcccggtgtcgctatggcaacgcacaaggacgacgaagagcgattttttccatccagcggagtcttgatgtttgggaaacagggagctggaaaagacaacgtggactatagcagcgttatgctaaccagtgaggaagaaatcaaaaccaccaacccagtggccacagaacagtacggcgtggtggccgataacctgcaacagcaaaacgccgctcctattgtaggggccgtcaacagtcaaggagccttacctggcatggtctggcagaaccgggacgtgtacctgcagggtcctatctgggccaagattcctcacacggacggcaactttcatccttcgccgctgatgggaggctttggactgaaacacccgcctcctcagatcctgattaagaatacacctgttcccgcggatcctccaactaccttcagtcaagccaagctggcgtcgttcatcacgcagtacagcaccggacaggtcagcgtggaaattgaatgggagctgcagaaagagaacagcaagcgctggaacccagagattcagtatacttccaactactacaaatctacaaatgtggactttgctgtcaatactgagggtacttattcagagcctcgccccattggcacccgttacctcacccgtaacctgtaattgcctgttaatcaataaaccggctaattcgtttcagttgaactttggtctctgcgaagggcgaattc

SEQ ID NO: 69 - protein, 738 aa, Artificial Sequence
  Description of Artificial Sequence: Synthetic polypeptide
MAADGYLPDWLEDNLSEGIREWWDLKPGAPKPKANQQKQDDGRGLVLPGYKYLGPFNGLDKGEPVNAADAAALEHDKAYDQQLKAGDNPYLRYNHADAEFQERLQEDTSFGGNLGRAVFQAKKRVLEPLGLVEEGAKTAPGKKRPVEPSPQRSPDSSTGIGKTGQQPAKKRLNFGQTGDSESVPDPQPIGEPPAGPSGLGSGTMAAGGGAPMADNNEGADGVGSSSGNWHCDSTWLGDRVITTSTRTWALPTYNNHLYKQISNGTSGGSTNDNTYFGYSTPWGYFDFNRFHCHFSPRDWQRLINNNWGFRPKRLNFKLFNIQVKEVTQNEGTKTIANNLTSTIQVFTDSEYQLPYVLGSAHQGCLPPFPADVFMIPQYGYLTLNNGSQAVGRSSFYCLEYFPSQMLRTGNNFEFSYQFEDVPFHSSYAHSQSLDRLMNPLIDQYLYYLSRTQSTGGTAGTQQLLFSQAGPNNMSAQAKNWLPGPCYRQQRVSTTLSQNNNSNFAWTGATKYHLNGRDSLVNPGVAMATHKDDEERFFPSSGVLMFGKQGAGKDNVDYSSVMLTSEEEIKTTNPVATEQYGVVADNLQQQNAAPIVGAVNSQGALPGMVWQNRDVYLQGPIWAKIPHTDGNFHPSPLMGGFGLKHPPPQILIKNTPVPADPPTTFSQAKLASFITQYSTGQVSVEIEWELQKENSKRWNPEIQYTSNYYKSTNVDFAVNTEGTYSEPRPIGTRYLTRNL

SEQ ID NO: 70 - DNA, 3084 bp, Adeno-associated virus
gaattcgccctttctacggctgcatcaactggaccaatgagaactttcccttcaacgattgcgtcgacaagatggtgatctggtgggaggagggcaagatgacggccaaggtcgtggagtccgccaaggccattctcggcggcagcaaggtgcgcgtggaccaaaagtgcaagtcgtccgcccagatcgaccccacccccgtgatcgtcacctccaacaccaacatgtgcgccgtgattgacgggaacagcaccaccttcgagcaccagcagccgttgcaggaccggatgttcaagttcgaactcacccgccgtctggagcacgactttggcaaggtgaccaagcaggaagtcaaagagttcttccgctgggcgcaggatcacgtgaccgaggtggcgcatgagttctacgtcagaaagggcggagccagcaaaagacccgcccccgatgacgcggatataagcgagcccaagcgggcctgcccctcagtcgcggatccatcgacgtcagacgcggaaggagctccggtggactttgccgacaggtaccaaaacaaatgttctcgtcacgcgggcatgcttcagatgctgtttccctgcaaaacgtgcgagaaaatgaatcagaatttcaacatttgcttcacgcacggggtcagagactgctcagaatgtttccccggtgcatcagaatctcaaccggtcgtcagaaaaaaaacgtatcagaaactgtgtgccattcatcatctgctggggcgggcacccgagattgcttgctcggcctgcgatctggtcaacgtggacctggacgactgtgtttctgagcaataaatgacttaaaccaggtatggctgccgatggttatcttccagattggcttgaggacaacctctctgagggcattcgcgagtggtgggacctgaaacctggagccccgaaacccaaagccaaccagcaaaagcaggacgacggccggggtctggtgcttcctggctacaagtacctcggacccttcaacggactcgacaagggggagcccgtcaacgcggcggacgcagcggccctcgagcacgacaaggcctacgaccagcagctcaaagcgggtgacaatccgtacctgcggtataaccacgccgacgccgagtttcaggagcgtctgcaagaagatacgtcttttgggggcaacctcgggcgagcagtcttccaggccaagaagcgggttctcgaacctctcggtctggttgaggaaggcgctaagacggctcctggaaagaagagaccggtagagccatcacctcagcgttcccccgactcctccacgggcatcggcaagaaaggccaccagcccgcgagaaagagactgaactttgggcagactggcgactcggagtcagtccccgaccctcaaccaatcggagaaccaccagcaggcccctctggtctgggatctggtacaatggctgcaggcggtggcgctccaatggcagacaataacgaaggcgccgacggagtgggtagttcctcaggaaattggcattgcgattccacatggctgggcgacagagtcatcaccaccagcacccgaacctgggccctgcccacctacaacaaccatctctacaagcaaatctccaacgggacatcgggaggaagcactaacgacaacacctactttggctacagcaccccctgggggtattttgacttcaacagattccactgccacttctcaccacgtgactggcagcgactcatcaacaataactggggattccggcccaagagactcaacttcaagctcttcaacatccaggtcaaggaggtcacgcagaatgaaggcaccaagaccatcgccaataaccttaccagcacgattcaggtgtttacggactcggaataccagctcccgtacgtccccggctctgcgcaccagggctgcctccctccgttcccggcggacgtcttcatgattcctcagtacgggtatctgaccctaaacaatggcagtcaggctgtgggccgttcctccttctactgcctggaatacttcccttctcaaatgctgaggacgggcaacaactttgaattcagctacaccttcgaggacgtgcctttccacagcagctacgcgcacagccagagcctggaccggctgatgaaccctctcatcgaccagtacctgtattacttatccagaactcagtccacaggaggaactcaaggtactcagcaattgttattttctcaagccgggcccgcaaacatgtcggctcaggccaagaactggctacctggaccgtgttaccgtcagcaacgagtttccacgacactgtcgcaaaacaacaacagcaattttgcttggaccggtgccaccaagtatcacctgaatggcagagactccctggttaatcccggcgttgccatggctacccacaaggacgacgaggagcgcttcttcccgtcaagcggagttctaatgtttggcaagcagggggctggaaaagacaatgtggactacagcagcgtgatgctcaccagcgaagaagaaattaaaactactaacccagtggctacagagcagtatggtgtggtggcagacaacctgcagcagaccaacggagctcccattgtgggaactgtcaacagccagggggccttacctggtatggtctggcaaaaccgggacgtgtacctgcagggccccatctgggccaaaattcctcacacggacggcaactttcatccttcgccgctgatgggaggctttggactgaaacacccgcctcctcagatcctggtgaaaaacactcctgttcctgcggatcctccgaccaccttcagccaggccaagctggcttcttttatcacgcagtacagcaccggacaggtcagcgtggaaatcgaatgggagctgcagaaagaaaacagcaagcgctggaacccagagattcagtatacttccaactactacaaatctacaaatgtggactttgctgtcaatactgagggtacttattcagagcctcgccccattggcactcgttatctcacccgtaatctgtaattgcttgttaatcaataaaccggt

SEQ ID NO: 71 - protein, 738 aa, Artificial Sequence
  Description of Artificial Sequence: Synthetic polypeptide
MAADGYLPDWLEDNLSEGIREWWDLKPGAPKPKANQQKQDDGRGLVLPGYKYLGPFNGLDKGEPVNAADAAALEHDKAYDQQLKAGDNPYLRYNHADAEFQERLQEDTSFGGNLGRAVFQAKKRVLEPLGLVEEGAKTAPGKKRPVEPSPQRSPDSSTGIGKKGHQPARKRLNFGQTGDSESVPDPQPIGEPPAGPSGLGSGTMAAGGGAPMADNNEGADGVGSSSGNWHCDSTWLGDRVITTSTRTWALPTYNNHLYKQISNGTSGGSTNDNTYFGYSTPWGYFDFNRFHCHFSPRDWQRLINNNWGFRPKRLNFKLFNIQVKEVTQNEGTKTIANNLTSTIQVFTDSEYQLPYVPGSAHQGCLPPFPADVFMIPQYGYLTLNNGSQAVGRSSFYCLEYFPSQMLRTGNNFEFSYTFEDVPFHSSYAHSQSLDRLMNPLIDQYLYYLSRTQSTGGTQGTQQLLFSQAGPANMSAQAKNWLPGPCYRQQRVSTTLSQNNNSNFAWTGATKYHLNGRDSLVNPGVAMATHKDDEERFFPSSGVLMFGKQGAGKDNVDYSSVMLTSEEEIKTTNPVATEQYGVVADNLQQTNGAPIVGTVNSQGALPGMVWQNRDVYLQGPIWAKIPHTDGNFHPSPLMGGFGLKHPPPQILVKNTPVPADPPTTFSQAKLASFITQYSTGQVSVEIEWELQKENSKRWNPEIQYTSNYYKSTNVDFAVNTEGTYSEPRPIGTRYLTRNL

SEQ ID NO: 72 - DNA, 3123 bp, Adeno-associated virus
gaattcgcccttggctgcgtcaactggaccaatgagaactttcccttcaacgattgcgtcgacaagatggtgatctggtgggaggagggcaagatgacggccaaggtcgtggagtccgccaaggccattctcggcggcagcaaggtgcgcgtggaccaaaagtgcaagtcgtccgcccagatcgaccccacccccgtgatcgtcacctccaacaccaacatgtgcgccgtgattgacgggaacagcaccaccttcgagcaccagcagccgttgcaggaccggatgttcaagttcgaactcacccgccgtctggagcacgactttggcaaggtgaccaagcaggaagtcaaagagttcttccgctgggcgcaggatcacgtgaccgaggtggcgcatgagttctacgtcagaaagggcggagccagcaaaagacccgcccccgatgacgcggatataagcgagcccaagcgggcctgcccctcagtcgcggatccatcgacgtcagacgcggaaggagctccggtggactttgccgacaggtaccaaaacaaatgttctcgtcacgcgggcatgctccagatgctgtttccctgcaaaacgtgcgagagaatgaatcagaatttcaacatttgcttcacgcacggggtcagagactgctcagaatgtttccccggtgcatcagaatctcaaccggtcgtcagaaaaaaaacgtatcagaaactgtgtgccattcatcatctgctggggcgggcacccgagattgcttgctcggcctgcgatctggtcaacgtggacctggacgactgtgtttctgagcaataaatgacttaaaccaggtatggctgccgatggttatcttccagattggcttgaggacaacctctctgagggcattcgcgagtggtgggacctgaaacctggagccccgaaacccaaagccaaccagcaaaagcaggacgacggccggggtctggtgcttcctggctacaagtacctcggacccttcaacggactcgacaagggggagcccgtcaacgcggcggacgcagcggccctcgagcacgacaaggcctacgaccagcagctcaaagcgggtgacaatccgtacctgcggtataaccacgccgacgccgagtttcaggagcgtctgcaagaagatacgtcttttgggggcaacctcgggcgagcagtcttccaggccaagaagcgggttctcgaacctctcggtctggttgaggaaggcgctaagacggctcctggaaagaagagaccggtagagccatcacctcagcgttcccccgactcctccacgggcatcggcaagaaaggccaccagcccgcgagaaagagactgaactttgggcagactggcgactcggagtcagtccccgaccctcaaccaatcggagaaccaccagcaggcccctctggtctgggatctggtacaatggctgcaggcggtggcgctccaatggcagacaataacgaaggcgccgacggagtgggtagttcctcaggaaattggcattgcgattccacatggctgggcgacagagtcatcaccaccagcacccgaacctgggccctgcccacctacaacaaccatctctacaagcaaatctccaacgggacatcgggaggaagcactaacgacaacacctactttggctacagcaccccctgggggtattttgacttcaacagattccactgccacttctcaccacgtgactggcagcgactcatcaacaataactggggattccggcccaagagactcaacttcaagctcttcaacatccaggtcaaggaggtcacgcagaatgaaggcaccaagaccatcgccaataaccttaccagcacgattcaggtgtttacggactcggaataccagctcccgtacgtcctcggctctgcgcaccagggctgcctccctccgttcccggcggacgtcttcatgattcctcagtacgggtatctgaccctaaacaatggcagtcaggctgtgggccgttcctccttctactgcctggaatacttcccttctcaaatgctgaggacgggcaacaactttgaattcagctacaccttcgaggacgtgcctttccacagcagctacgcgcacagccagagcctggaccggctgatgaaccctctcatcgaccagtacctgtattacttatccagaactcagtccacaggaggaactcaaggtactcagcaattgttattttctcaagccgggcccgcaaacatgtcggctcaggccaagaactggctacctggaccgtgttaccgtcagcaacgagtttccacgacactgtcgcaaaacaacaacagcaattttgcttggaccggtgccaccaagtatcacctgaatggcagagactccctggttaatcccggcgttgccatggctacccacaaggacgacgaggagcgcttcttcccgtcaagcggagttctaatgtttggcaagcagggggctggaaaagacaatgtggactacagcagcgtgatgctcaccagcgaagaagaaattaaaactactaacccagtggctacagagcagtatggtgtggtggcagacaacctgcagcagaccaacggagctcccattgtgggaactgtcaacagccagggggccttacctggtatggtctggcaaaaccgggacgtgtacctgcagggccccatctgggccaaaattcctcacacggacggcaactttcatccttcgccgctgatgggaggctttggactgaaacacccgcctcctcagatcctggtgaaaaacactcctgttcctgcggatcctccgaccaccttcagccaggccaagctggcttcttttatcacgcagtacagcaccggacaggtcagcgtggaaatcgaatgggagctgcagaaagaaaacagcaagcgctggaacccagagattcagtatacttccaactactacaaatctacaaatgtggactttgctgtcaatactgagggtacttattcagagcctcgccccattggcactcgttatctcacccgtaatctgtaattgcttgttaatcaataaaccggttaattcgtttcagttgaactttggtctctgcgaagggcgaattc

SEQ ID NO: 73 - protein, 738 aa, Artificial Sequence
  Description of Artificial Sequence: Synthetic polypeptide
MAADGYLPDWLEDNLSEGIREWWDLKPGAPKPKANQQKQDDGRGLVLPGYKYLGPFNGLDKGEPVNAADAAALEHDKAYDQQLKAGDNPYLRYNHADAEFQERLQEDTSFGGNLGRAVFQAKKRVLEPLGLVEEGAKTAPGKKRPVEPSPQRSPDSSTGIGKKGHQPARKRLNFGQTGDSESVPDPQPIGEPPAGPSGLGSGTMAAGGGAPMADNNEGADGVGSSSGNWHCDSTWLGDRVITTSTRTWALPTYNNHLYKQISNGTSGGSTNDNTYFGYSTPWGYFDFNRFHCHFSPRDWQRLINNNWGFRPKRLNFKLFNIQVKEVTQNEGTKTIANNLTSTIQVFTDSEYQLPYVLGSAHQGCLPPFPADVFMIPQYGYLTLNNGSQAVGRSSFYCLEYFPSQMLRTGNNFEFSYTFEDVPFHSSYAHSQSLDRLMNPLIDQYLYYLSRTQSTGGTQGTQQLLFSQAGPANMSAQAKNWLPGPCYRQQRVSTTLSQNNNSNFAWTGATKYHLNGRDSLVNPGVAMATHKDDEERFFPSSGVLMFGKQGAGKDNVDYSSVMLTSEEEIKTTNPVATEQYGVVADNLQQTNGAPIVGTVNSQGALPGMVWQNRDVYLQGPIWAKIPHTDGNFHPSPLMGGFGLKHPPPQILVKNTPVPADPPTTFSQAKLASFITQYSTGQVSVEIEWELQKENSKRWNPEIQYTSNYYKSTNVDFAVNTEGTYSEPRPIGTRYLTRNL

SEQ ID NO: 74 - DNA, 3122 bp, Adeno-associated virus
gaattcgccctttctacggctgcgtcaactggaccaatgagaactttcccttcaacgattgcgtcgacaagatggtgatctggtgggaggagggcaagatgacggccaaggtcgtggagtccgccaaggccattctcggcggcagcaaggtgcgtgtggaccaaaagtgcaagtcttccgcccagatcgatcccacccccgtgatcgtcacctccaacaccaacatgtgcgccgtgattgacgggaacagcgccaccttcgagcaccagcagccgttgcaggaccggatgttcaaatttgaactcacccgccgtctggagcatgactttggcaaggtgacgaagcaggaagtcaaagagttcttccgctgggcgcaggatcacgtgaccgaggtggcgcatgagttccacgtcagaaagggtggagccaacaagagacccgcccccgatgacgcggatataagcgagcccaagcgggcctgcccctcagtcgcggatccatcgacgtcagacgcggaaggagctccggtggactttgccgacaggtaccaaaacaaatgttctcgtcacgcgggcatgcttcagatgctgtttccctgcaagacatgcgagagaatgaatcagaatttcaacatttgcttcacgcacgggaccagagactgttcagaatgtttccccggcgtgtcagaatctcaaccggtcgtcagaaagaggacgtatcggaaactctgtgcgattcatcatctgctggggcgggctcccgagattgcttgctcggcctgcgatctggtcaacgtggacctggatgactgtgtttctgagcaataaatgacttaaaccaggtatggctgccgatggttatcttccagattggctcgaggacaacctctctgagggcattcgcgagtggtgggacttgaaacctggagccccgaaacccaaagccaaccagcaaaagcaggacgacggccggggtctggtgcttcctggctacaagtacctcggacccttcaacggactcgacaagggggagcccgtcaacgcggcggacgcagcggccctcgagcacgacaaagcctacgaccagcagctcaaagcgggtgacaatccgtacctgcggtataatcacgccgacgccgagtttcaggagcgtctgcaagaagatacgtcttttgggggcaacctcgggcgagcagtcttccaggccaagaagcgggttctcgaacctctcggtctggttgaggaaggcgctaagacggctcctggaaagaagagactggtagagcagtcgccacaagagccagactcctcctcgggcatcggcaagacaggccagcagcccgctaaaaagagactcaattttggtcagactggcgactcagagtcagtccccgacccacaacctctcggagaacctccagcagccccctcaggtctgggacctaatacaatggcttcaggcggtggcgctccaatggcagacaataacgaaggcgccgacggagtgggtaattcctcgggaaattggcattgcgattccacatggctgggggacagagtcatcaccaccagcacccgaacctgggccctgcccacctacaacaaccacctctacaagcaaatctccaacggcacctcgggaggaagcaccaacgacaacacctattttggctacagcaccccctgggggtattttgacttcaacagattccactgtcacttttcaccacgtgactggcaacgactcatcaacaacaattggggattccggcccaaaagactcaacttcaagctgttcaacatccaggtcaaggaagtcacgacgaacgaaggcaccaagaccatcgccaataatctcaccagcaccgtgcaggtctttacggactcggagtaccagttaccgtacgtgctaggatccgctcaccagggatgtctgcctccgttcccggcggacgtcttcacggttcctcagtacggctatttaactttaaacaatggaagccaagccctgggacgttcctccttctactgtctggagtatttcccatcgcagatgctgagaaccggcaacaactttcagttcagctacaccttcgaggacgtgcctttccacagcagctacgcgcacagccagagcctggacaggctgatgaatcccctcatcgaccagtacctgtactacctggtcagaacgcaaacgactggaactggagggacgcagactctggcattcagccaagcgggtcctagctcaatggccaaccaggctagaaattgggtgcccggaccttgctaccggcagcagcgcgtctccacgacaaccaaccagaacaacaacagcaactttgcctggacgggagctgccaagtttaagctgaacggccgagactctctaatgaatccgggcgtggcaatggcttcccacaaggatgacgacgaccgcttcttcccttcgagcggggtcctgatttttggcaagcaaggagccgggaacgatggagtggattacagccaagtgctgattacagatgaggaagaaatcaaggctaccaaccccgtggccacagaagaatatggagcagtggccatcaacaaccaggccgccaatacgcaggcgcagaccggactcgtgcacaaccagggggtgattcccggcatggtgtggcagaatagagacgtgtacctgcagggtcccatctgggccaaaattcctcacacggacggcaactttcacccgtctcccctgatgggcggctttggactgaagcacccgcctcctcaaattctcatcaagaacacaccggttccagcggacccgccgcttaccttcaaccaggccaagctgaactctttcatcacgcagtacagcaccggacaggtcagcgtggaaatcgagtgggagctgcagaaagaaaacagcaaacgctggaatccagagattcaatacacttccaactactacaaatctacaaatgtggactttgctgtcaacacggaaggagtttatagcgagcctcgccccattggcacccgttacctcacccgcaacctgtaattacatgttaatcaataaaccggttaattcgtttcagttgaactttggtctctgcgaagggcgaattc

SEQ ID NO: 75 - protein, 736 aa, Artificial Sequence
  Description of Artificial Sequence: Synthetic polypeptide
MAADGYLPDWLEDNLSEGIREWWDLKPGAPKPKANQQKQDDGRGLVLPGYKYLGPFNGLDKGEPVNAADAAALEHDKAYDQQLKAGDNPYLRYNHADAEFQERLQEDTSFGGNLGRAVFQAKKRVLEPLGLVEEGAKTAPGKKRLVEQSPQEPDSSSGIGKTGQQPAKKRLNFGQTGDSESVPDPQPLGEPPAAPSGLGPNTMASGGGAPMADNNEGADGVGNSSGNWHCDSTWLGDRVITTSTRTWALPTYNNHLYKQISNGTSGGSTNDNTYFGYSTPWGYFDFNRFHCHFSPRDWQRLINNNWGFRPKRLNFKLFNIQVKEVTTNEGTKTIANNLTSTVQVFTDSEYQLPYVLGSAHQGCLPPFPADVFTVPQYGYLTLNNGSQALGRSSFYCLEYFPSQMLRTGNNFQFSYTFEDVPFHSSYAHSQSLDRLMNPLIDQYLYYLVRTQTTGTGGTQTLAFSQAGPSSMANQARNWVPGPCYRQQRVSTTTNQNNNSNFAWTGAAKFKLNGRDSLMNPGVAMASHKDDDDRFFPSSGVLIFGKQGAGNDGVDYSQVLITDEEEIKATNPVATEEYGAVAINNQAANTQAQTGLVHNQGVIPGMVWQNRDVYLQGPIWAKIPHTDGNFHPSPLMGGFGLKHPPPQILIKNTPVPADPPLTFNQAKLNSFITQYSTGQVSVEIEWELQKENSKRWNPEIQYTSNYYKSTNVDFAVNTEGVYSEPRPIGTRYLTRNL

SEQ ID NO: 76 - DNA, 3117 bp, Adeno-associated virus
gaattcgcccttggctgcgtcaactggaccaatgagaactttcccttcaacgattgcgtcgacaagatggtgatctggtgggaggagggcaagatgacggccaaggtcgtggagtccgccaaggccattctcggcggcagcaaggtgcgtgtggaccaaaagtgcaagtcttccgcccagatcgatcccacccccgtgatcgtcacctccaacaccaacatgtgcgccgtgattgacgggaacagcaccaccttcgagcaccagcagccgttgcaggaccggatgttcaaatttgaactcacccgccgtctggagcatgactttggcaaggtgacgaagcaggaagtcaaagagttcttccgctgggcgcaggatcacgtgaccgaggtggcgcatgagttccacgtcagaaagggtggagccaacaagagacccgcccccgatgacgcggatataagcgagcccaagcgggcctgcccctcagtcgcggatccatcgacgtcagacgcggaaggagctccggtggactttgccgacaggtaccaaaacaaatgttctcgtcacgcgggcatgcttcagatgctgtttccctgcaagacatgcgagagaatgaatcagaatttcaacatttgcttcacgcacgggaccagagactgttcagaatgtttccccggcgtgtcagaatctcaaccggtcgtcagaaagaggacgtatcggaaactctgtgcgattcatcatctgctggggcgggctcccgagattgcttgctcggcctgcgatctggtcaacgtggacctggatgactgtgtttctgagcaataaatgacttaaaccaggtatggctgccgatggttatcttccagattggctcgaggacaacctctctgagggcattcgcgagtggtgggacttgaaacctggagccccgaaacccaaagccaaccagcaaaagcaggacgacggccggggtctggtgcttcctggctacaagtacctcggacccttcaacggactcgacaagggggagcccgtcaacgcggcggacgcagcggccctcgagcacgacaaagcctacgaccagcagctcaaagcgggtgacaatccgtacctgcggtataatcacgccgacgccgagtttcaggagcgtctgcaagaagatacgtcttttgggggcaacctcgggcgagcagtcttccaggccaagaagcgggttctcgaacctctcggtctggttgaggaaggcgctaagacggctcctggaaagaagagaccggtagagcagtcgccacaagagccagactcctcctcgggcatcggcaagacaggccagcagcccgctaaaaagagactcaattttggtcagactggcgactcagagtcagtccccgacccacaacctctcggagaacctccagcagccccctcaggtctgggacctaatacaatggcttcaggcggtggcgctccaatggcagacaataacgaaggcgccgacggagtgggtaattcctcgggaaattggcattgcgattccacatggctgggggacagagtcatcaccaccagcacccgaacctgggccctgcccacctacaacaaccacctctacaagcaaatctccaacggcacctcgggaggaagcaccaacgacaacacctattttggctacagcaccccctgggggtattttgacttcaacagattccactgtcacttttcaccacgtgactggcaacgactcatcaacaacaattggggattccggcccaaaagactcaacttcaagctgttcaacatccaggtcaaggaagtcacgacgaacgaaggcaccaagaccatcgccaataatctcaccagcaccgtgcgggtctttacggactcggagtaccagttaccgtacgtgctaggatccgctcaccagggatgtctgcctccgttcccggcggacgtcttcatggttcctcagtacggctatttaactttaaacaatggaagccaagccctgggacgttcctccttctactgtctggagtatttcccatcgcagatgctgagaaccggcaacaactttcagttcagctacaccttcgaggacgtgcctttccacagcagctacgcgcacagccagagcctggacaggctgatgaatcccctcatcgaccagtacctgtactacctggtcagaacgcaaacgactggaactggagggacgcagactctggcattcagccaagcgggtcctagctcaatggccaaccaggctagaaattgggtgcccggaccttgctaccggcagcagcgcgtctccacgacaaccaaccagagcaacaacagcaactttgcctggacgggagctgccaagtttaagctgaacggccgagactctctaatgaatccgggcgtggcaatggcttcccacaaggatgacgacgaccgcttcttcccttcgagcggggtcctgatttttggcaagcaaggagccgggaacgatggagtggattacagccaagtgctgattacagatgaggaagaaatcaaggctaccaaccccgtggccacagaagaatatggagcagtggccatcaacaaccaggccgccaatacgcaggcgcagaccggactcgtgcacaaccagggggtgattcccggcatggtgtggcagaatagagacgtgtacctgcagggtcccatctgggccaaaattcctcacacggacggcaactttcacccgtctcccctgatgggcggctttggactgaagcacccgcctcctcaaattctcatcaagaacacaccggttccagcggacccgccgcttaccttcaaccaggccaagctgaactctttcatcacgcagtacagcaccggacaggtcagcgtggaaatcgagtgggagctgcagaaagaaaacagcaaacgctggaatccagagattcaatacacttccaactactacaaatctacaaatgtggactttgctgtcaacacggaaggagtttatagcgagcctcgccccattggcacccgttacctcacccgcaacctgtaattacatgttaatcaataaaccggttaattcgtttcagttgaactttggtctctgcgaagggcgaattc

SEQ ID NO: 77 - protein, 736 aa, Artificial Sequence
  Description of Artificial Sequence: Synthetic polypeptide
MAADGYLPDWLEDNLSEGIREWWDLKPGAPKPKANQQKQDDGRGLVLPGYKYLGPFNGLDKGEPVNAADAAALEHDKAYDQQLKAGDNPYLRYNHADAEFQERLQEDTSFGGNLGRAVFQAKKRVLEPLGLVEEGAKTAPGKKRPVEQSPQEPDSSSGIGKTGQQPAKKRLNFGQTGDSESVPDPQPLGEPPAAPSGLGPNTMASGGGAPMADNNEGADGVGNSSGNWHCDSTWLGDRVITTSTRTWALPTYNNHLYKQISNGTSGGSTNDNTYFGYSTPWGYFDFNRFHCHFSPRDWQRLINNNWGFRPKRLNFKLFNIQVKEVTTNEGTKTIANNLTSTVRVFTDSEYQLPYVLGSAHQGCLPPFPADVFMVPQYGYLTLNNGSQALGRSSFYCLEYFPSQMLRTGNNFQFSYTFEDVPFHSSYAHSQSLDRLMNPLIDQYLYYLVRTQTTGTGGTQTLAFSQAGPSSMANQARNWVPGPCYRQQRVSTTTNQSNNSNFAWTGAAKFKLNGRDSLMNPGVAMASHKDDDDRFFPSSGVLIFGKQGAGNDGVDYSQVLITDEEEIKATNPVATEEYGAVAINNQAANTQAQTGLVHNQGVIPGMVWQNRDVYLQGPIWAKIPHTDGNFHPSPLMGGFGLKHPPPQILIKNTPVPADPPLTFNQAKLNSFITQYSTGQVSVEIEWELQKENSKRWNPEIQYTSNYYKSTNVDFAVNTEGVYSEPRPIGTRYLTRNL

SEQ ID NO: 78 - DNA, 3121 bp, Adeno-associated virus
gaattcgcccttctacggctgcgtcaactggaccaatgagaactttcccttcaacgattgcgtcgacaagatggtgatctggtgggaggagggcaagatgacggccaaggtcgtggagtccgccaaggccattctcggcggcagcaaggtgcgtgtggaccaaaagtgcaagtcttccgcccagatcgatcccacccccgtgatcgtcacctccaacaccaacatgtgcgccgtgattgacgggaacagcaccaccttcgagcaccagcagccgttgcaggaccggatgttcaaatttgaactcacccgccgtctggagcatgactttggcaaggtgacgaagcaggaagtcaaagagttcttccgctgggcgcaggatcacgtgaccgaggtggcgcatgagttccacgtcagaaagggtggcgccaacaagagacccgcccccgatgacgcggatataagcgagcccaagcgggcctgcccctcagtcgcggatccatcgacgtcagacgcggaaggagctccggtggactttgccgacaggtaccaaaacaaatgttctcgtcacgcgggcatgcttcagatgctgtttccctgcaagacatgcgagagaatgaatcagaatttcaacatttgcttcacgcacgggaccagagactgttcagaatgtttccccggcgtgtcagaatctcaaccggtcgtcagaaagaggacgtatcggaaactctgtgcgattcatcatctgctggggcgggctcccgagattgcttgctcggcctgcgatctggtcaacgtggacctggatgactgtgtttctgagcaataaatgacttaaaccaggtatggctgccgatggttatcttccagattggctcgaggacaacctctctgagggcattcgcgagtggtgggacttgaaacctggagccccgaaacccaaagccaaccagcaaaagcaggacgacggccggggtctggtgcttcctggctacaagtacctcggacccttcaacggactcgacaagggggagcccgtcaacgcggcggacgcagcggccctcgagcacgacaaagcctacgaccagcagctcaaagcgggtgacaatccgtacctgcggtataatcacgccgacgccgagtttcaggagcgtctgcaagaagatacgtcctttgggggcaacctcgggcgagcagtcttccaggccaagaagcgggttctcgaacctctcggtctggttgaggaaggcgctaagacggctcctggaaagaagagaccggtagagcagtcgccacaagagccagactcctcctcgggcatcggcaagacaggccagcagcccgctaaaaagagactcaattttggtcagactggcgactcagagtcagtccccgacccacaacctctcggagaacctccagcagccccctcaggtctgggacctaatacaatggcttcaggcggtggcgctccaatggcagacaataacgaaggcgccgacggagtgggtaattcctcgggaaattggcattgcgattccacatggctgggggacagagtcatcaccaccagcacccgaacctgggccctgcccacctacaacaaccacctctacaagcaaatctccaacggcacctcgggaggaagcaccaacgacaacacctattttggctacagcaccccctgggggtattttgacttcaacagattccactgtcacttttcaccacgtgactggcaacgactcatcaacaacaattggggattccggcccaaaagactcaacttcaagctgttcaacatccaggtcaaggaagtcacgacgaacgaaggcaccaagaccatcgccaataatctcaccagcaccgtgcaggtctttacggacttggagtaccagttaccgtacgtgctaggatccgctcaccagggatgtctgcctccgttcccggcggacgtcttcatggttcctcagtacggctatttaactttaaacaatggaagccaagccctgggacgttcctccttctactgtctggagtatttcccatcgcagatgccgagaaccggcaacaactttcagttcagctacaccttcgaggacgtgcctttccacagcagctacgcgcacagccagagcctggacaggctgatgaatcccctcatcgaccagtacctgtactacctggtcagaacgcaaacgactggaactggagggacgcagactctggcattcagccaagcgggtcctagctcaatggccaaccaggctagaaattgggtgcccggaccttgctaccggcagcagcgcgtctccacgacaaccaaccagaacaacaacagcaactttgcctggacgggagctgccaagtttaagctgaacggccgagactctctaatgaatccgggcgtggcaatggcttcccacaaggatgacgacgaccgcttcttcccttcgagcggggtcctgatttttggcaagcaaggagccgggaacgatggagtggattacagccaagtgctgattacagatgaggaagaaatcaaggctaccaaccccgtggccacagaagaatatggagcagtggccatcaacaaccaggccgccaatacgcaggcgcagaccggactcgtgcacaaccagggggtgattcccggcatggtgtggcagaatagagacgtgtacctgcagggtcccatctgggccaaaattcctcacacggacggcaactttcacccgtctcccctgatgggcggctttggactgaagcacccgcctcctcaaattctcatcaagaacacaccggttccagcggacccgccgcttaccttcaaccaggccaagctgaactctttcatcacgcagtacagcaccggacaggtcagcgtggaaatcgagtgggagctgcagaaagaaaacagcaaacgctggaatccagagattcaatacacttccaactactacaaatctacaaatgtggactttgctgtcaacacggaaggagtttatagcgagcctcgccccattggcacccgttacctcacccgcaacctgtaattacatgttaatcaataaaccggttaattcgtttcagttgaactttggtctctgcgaagggcgaattc

SEQ ID NO: 79 - protein, 736 aa, Artificial Sequence
  Description of Artificial Sequence: Synthetic polypeptide
MAADGYLPDWLEDNLSEGIREWWDLKPGAPKPKANQQKQDDGRGLVLPGYKYLGPFNGLDKGEPVNAADAAALEHDKAYDQQLKAGDNPYLRYNHADAEFQERLQEDTSFGGNLGRAVFQAKKRVLEPLGLVEEGAKTAPGKKRPVEQSPQEPDSSSGIGKTGQQPAKKRLNFGQTGDSESVPDPQPLGEPPAAPSGLGPNTMASGGGAPMADNNEGADGVGNSSGNWHCDSTWLGDRVITTSTRTWALPTYNNHLYKQISNGTSGGSTNDNTYFGYSTPWGYFDFNRFHCHFSPRDWQRLINNNWGFRPKRLNFKLFNIQVKEVTTNEGTKTIANNLTSTVQVFTDLEYQLPYVLGSAHQGCLPPFPADVFMVPQYGYLTLNNGSQALGRSSFYCLEYFPSQMPRTGNNFQFSYTFEDVPFHSSYAHSQSLDRLMNPLIDQYLYYLVRTQTTGTGGTQTLAFSQAGPSSMANQARNWVPGPCYRQQRVSTTTNQNNNSNFAWTGAAKFKLNGRDSLMNPGVAMASHKDDDDRFFPSSGVLIFGKQGAGNDGVDYSQVLITDEEEIKATNPVATEEYGAVAINNQAANTQAQTGLVHNQGVIPGMVWQNRDVYLQGPIWAKIPHTDGNFHPSPLMGGFGLKHPPPQILIKNTPVPADPPLTFNQAKLNSFITQYSTGQVSVEIEWELQKENSKRWNPEIQYTSNYYKSTNVDFAVNTEGVYSEPRPIGTRYLTRNL

SEQ ID NO: 80 - DNA, 3122 bp, Adeno-associated virus
gaattcgccctttctacggctgcgtcaactggaccaatgagaactttcccttcaacgattgcgtcgacaagatggtgatctggtgggaggagggcaagatgacggccaaggtcgtggagtccgccaaggccattctcggcggcagcaaggtgcgtgtggaccaaaagtgcaagtcttccgcccagatcgatcccacccccgtgatcgtcacctccaacaccaacatgtgcgccgtgattgacgggaacagcaccaccttcgagcaccagcagccgttgcaggaccggatgttcaaatttgaactcacccgccgtctggagcatgactttggcaaggtgacgaagcaggaagtcaaagggttcttccgctgggcgcaggatcacgtgaccgaggtggcgcatgagttccacgtgcgagcccaagcgggcctgcccctcagtcgcggatccatcgacgtcagaccagaaagggtggagccaacaagagacccgcccccgatgacgcggatataagcggaaggagctccggtggactttgccgacaggtaccaaaacaaatgttctcgtcacgcgggcatgcttcagatgctgtttccctgcaagacatgcgagagaatgaatcagaatttcaacatttgcttcacgcacgggaccagagactgttcagaatgtttccccggcgtgtcagaatctcaaccggtcgtcagaaagaggacgtatcggaaactctgtgcgattcatcatctgctggggcgggctcccgagattgcttgctcggcctgcgatctggtcaacgtggacctggatgactgtgtttctgagcaataaatgacttaaaccaggtatggctgccgatggttatcttccagattggctcgaggacaacctctctgagggcattcgcgagtggtgggacttgaaacctggagccccgaaacccaaagccaaccagcaaaagcaggacgacggccggggtctggtgcttcctggctacaagtacctcggacccttcaacggactcgacaagggggagcccgtcaacgcggcggacgcagcggccctcgagcacgacaaagcctacgaccagcagctcaaagcgggtgacaatccgtacctgcggtataatcacgccgacgccgagtttcaggagcgtctgcaagaagatacgtcttttgggggcaacctcgggcgagcagtcttccaggccaagaagcgggttctcgaacctctcggtctggttgaggaaggcgctaagacggctcctggaaagaagagaccggtagagcagtcgccacaagagccagactcctcctcgggcatcggcaagacaggccagcagcccgctaaaaagagactcaattttggtcagactggcgactcagagtcagtccccgacccacaacctctcggagaacctccagcagccccctcaggtctgggacctaatacaatggcttcaggcggtggcgctccaatggcagacaataacgaaggcgccgacggagtgggtaattcctcgggaaattggcattgcgattccacatggctgggggacagagtcatcaccaccagcacccgaacctgggccctgcccacctacaacaaccacctctacaagcaaatctccaacggcacctcgggaggaagcaccaacgacaacacctattttggctacagcaccccctgggggtattttgacttcaacagattccactgtcacttttcaccacgtgactggcaacgactcatcaacaacaattggggattccggcccaaaagactcaacttcaagctgttcaacatccaggtcaaggaagtcacgacgaacgaaggcaccaagaccatcgccaataatctcaccagcaccgtgcaggtctttacggactcggagtaccagttaccgtacgtgctaggatccgctcaccagggatgtctgcctccgttcccggcggacgtcttcatggttcctcagtacggctatttaactttaaacaatggaagccaagccctgggacgttcctccttctactgtctggagtatttcccatcgcagatgctgagaaccggcaacaactttcagttcagctacaccttcgaggacgtgcctttccacagcagctacgcgcacagccagagcctggacaggctgatgaatcccctcatcgaccagtacctgtactacctggtcagaacgcaaacgactggaactggagggacgcagactctggcattcagccaagcgggtcctagctcaatggccaaccaggctagaaattgggtgcccggaccttgctaccggcagcagcgcgtctccacgacaaccaaccagaacaacaacagcaactttgcctggacgggagctgccaagtttaagctgaacggccgagactctctaatgaatccgggcgtggcaatggcttcccacaaggatgacgacgaccgcttcttcccttcgagcggggtcctgatttttggcaagcaaggagccgggaacgatggagtggattacagccaagtgctgattacagatgaggaagaaatcaaggctaccaaccccgtggccacagaagaatatggagcagtggccatcaacaaccaggccgccaatacgcaggcgcagaccggactcgtgcacaaccagggggtgattcccggcatggtgtggcagaatagagacgtgtacctgcagggtcccatctgggccaaaattcctcacacggacggcaactttcacccgtctcccctgatgggcggctttggactgaagcacccgcctcctcaaattctcatcaagaacacaccggttccagcggacccgccgcttaccttcaaccaggccaagctgaactctttcatcacgcagtacagcaccggacaggtcagcgtggaaatcgagtgggagctgcagaaagaaaacagcaaacgctggaatccagagattcaatacacttccaactactacaaatctacaaatgtggactttgctgtcaacacggagggggtttatagcgagcctcgccccattggcacccgttacctcacccgcaacctgtaattacatgttaatcaataaaccggttaattcgtttcagttgaactttggtctctgcgaagggcgaattc

SEQ ID NO: 81 - protein, 736 aa, Artificial Sequence
  Description of Artificial Sequence: Synthetic polypeptide
MAADGYLPDWLEDNLSEGIREWWDLKPGAPKPKANQQKQDDGRGLVLPGYKYLGPFNGLDKGEPVNAADAAALEHDKAYDQQLKAGDNPYLRYNHADAEFQERLQEDTSFGGNLGRAVFQAKKRVLEPLGLVEEGAKTAPGKKRPVEQSPQEPDSSSGIGKTGQQPAKKRLNFGQTGDSESVPDPQPLGEPPAAPSGLGPNTMASGGGAPMADNNEGADGVGNSSGNWHCDSTWLGDRVITTSTRTWALPTYNNHLYKQISNGTSGGSTNDNTYFGYSTPWGYFDFNRFHCHFSPRDWQRLINNNWGFRPKRLNFKLFNIQVKEVTTNEGTKTIANNLTSTVQVFTDSEYQLPYVLGSAHQGCLPPFPADVFMVPQYGYLTLNNGSQALGRSSFYCLEYFPSQMLRTGNNFQFSYTFEDVPFHSSYAHSQSLDRLMNPLIDQYLYYLVRTQTTGTGGTQTLAFSQAGPSSMANQARNWVPGPCYRQQRVSTTTNQNNNSNFAWTGAAKFKLNGRDSLMNPGVAMASHKDDDDRFFPSSGVLIFGKQGAGNDGVDYSQVLITDEEEIKATNPVATEEYGAVAINNQAANTQAQTGLVHNQGVIPGMVWQNRDVYLQGPIWAKIPHTDGNFHPSPLMGGFGLKHPPPQILIKNTPVPADPPLTFNQAKLNSFITQYSTGQVSVEIEWELQKENSKRWNPEIQYTSNYYKSTNVDFAVNTEGVYSEPRPIGTRYLTRNL

SEQ ID NO: 82 - DNA, 2370 bp, Adeno-associated virus
gaattcgccctttctacggctgcgtcaactggaccaatgagaactttcccttcaacgattgcgtcgacaagatggtgatctggtgggaggagggcaagatgacggccaaggtcgtggagtccgccaaggccattctcggcggcagcaaggtgcgcgtggaccaaaagtgcaagtcgtccgcccagatcgaccccacccccgtgatcgtcacctccaacaccaacatgtgcgccgtgattgacgggaacagcaccaccttcgagcaccagcagccgttgcaggaccggatgttcaagttcgaactcacccgccgtctggagcacgactttggcaaggtgaccaagcaggaagtcaaagagttcttccgctgggcgcaggatcacgtgaccgaggtggcgcatgagttctacgtcagaaagggcggagccagcaaaagacccgcccccgatgacgcggatataagcgagcccaagcgggcctgcccctcagtcgcggatccatcgacgtcagacgcggaaggagctccggtggactttgccgacaggtaccaaaacaaatgttctcgtcacgcgggcatgcttcagacgctgtttccctgcaaaacgtgcgagagaatgaatcagaatttcaacatttgcttcacgcacggggtcagagactgctcagaatgtttccccggtgcatcagaatctcaaccggtcgtcagaaaaaaaacgtatcagaaactgtgtgccattcatcatctgctggggcgggcacccgagattgcttgctcggcctgcgatctggtcaacgtggacctggacgactgtgtttctgagcaataaatgacttaaaccaggtatggctgccgatggttatcttccagattggcttgaggacaacctctctgagggcattcgcgagtggtgggacctgaaacctggagccccgaaacccaaagccaaccagcaaaagcaggacgacggccggggtctggtgcttcctggctacaagtacctcggacccttcaacggactcgacaagggggagcccgtcaacgcggcggacgcagcggccctcgagcacgacaaggcctacgaccagcagctcaaagcgggtgacaatccgtacctgcggtataaccacgccgacgccgagtttcaggagcgtctgcaagaagatacgtcttttgggggcaacctcgggcgagcagtcttccaggccaagaagcgggttctcgaacctctcggtctggttgaggaaggcgctaagacggctcctggaaagaagagaccggtagagccatcacctcagcgttcccccgactcctccacgggcatcggcaagaaaggccaccagcccgcgagaaagagactgaactttgggcagactggcgactcggagtcagtccccgaccctcaaccaatcggagaaccaccagcaggcccctctggtctgggatctggtacaatggctgcaggcggtggcgctccaatggcagacaataacgaaggcgccgacggagtgggtagttcctcaggaaattggcattgcgattccacatggctgggcgacagagtcatcaccaccagcacccgaacctgggccctgcccacctacaacaaccatctctacaagcaaatctccaacgggacatcgggaggaagcactaacgacaacacctactttggctacagcaccccctgggggtattttgacttcaacagattccactgccacttctcaccacgtgactggcagcgactcatcaacaataactggggattccggcccaagagactcaacttcaagctcttcaacatccaggtcaaggaggtcacgcagaatgaaggcaccaagaccatcgccaataaccttaccagcacgattcaggtgtttacggactcggaataccagctcccgtacgtcctcggctctgcgcaccagggctgcctccctccgttcccggcggacgtcttcatgattcctcagtacgggtatctgaccctaaacaatggcagtcaggctgtgggccgttcctccttctactgcctggaatacttcccttctcaaatgctgaggacgggcaacaactttgaattcagctacaccttcgaggacgtgcctttccacagcagctacgcgcacagccagagcctggaccggctgatgaaccctctcatcgaccagtacctgtattacttatccagaactcagtccacaggaggaactcaaggtactcagcaattgttattttctcaagccgggcccgcaaacatgtyggctcaggccaagaactggctacctggaccgtgttaccgtcagcaacgagtttccacgacactgtcgcaaaacaacaacagcaattttgctggaccggtgccacca

SEQ ID NO: 83 - protein, 738 aa, Artificial Sequence; identical to SEQ ID NO: 73
  Description of Artificial Sequence: Synthetic polypeptide

SEQ ID NO: 84 - DNA, 2205 bp, Adeno-associated virus
atgactgacggttaccttccagattggctagaggacaacctctctgaaggcgttcgagagtggtgggcgctgcaacctggagcccctaaacccaaggcaaatcaacaacatcaggacaacgctcggggtcttgtgcttccgggttacaaatacctcggacccggcaacggactcgacaagggggaacccgtcaacgcagcggacgcggcagccctcgagcacgacaaggcctacgaccagcagctcaaggccggtgacaacccctacctcaagtacaaccacgccgacgcggagttccagcagcggcttcagggcgacacatcgtttgggggcaacctcggcagagcagtcttccaggccaaaaagagggttcttgaacctcttggtctggttgagcaagcgggtgagacggctcctggaaagaagagaccgttgattgaatccccccagcagcccgactcctccacgggtatcggcaaaaaaggcaagcagccggctaaaaagaagctcgttttcgaagacgaaactggagcaggcgacggaccccctgagggatcaacttccggagccatgtctgatgacagtgagatgcgtgcagcagctggcggagctgcagtcgagggcggacaaggtgccgatggagtgggtaatgcctcgggtgattggcattgcgattccacctggtctgagggccacgtcacgaccaccagcaccagaacctgggtcttgcccacctacaacaaccacctctacaagcgactcggagagagcctgcagtccaacacctacaacggattctccaccccctggggatactttgacttcaaccgcttccactgccacttctcaccacgtgactggcagcgactcatcaacaacaactggggcatgcgacccaaagccatgcgggtcaaaatcttcaacatccaggtcaaggaggtcacgacgtcgaacggcgagacaacggtggctaataaccttaccagcacggttcagatctttgcggactcgtcgtacgaactgccgtacgtgatggatgcgggtcaagagggcagcctgcctccttttcccaacgacgtctttatggtgccccagtacggctactgtggactggtgaccggcaacacttcgcagcaacagactgacagaaatgccttctactgcctggagtactttccttcgcagatgctgcggactggcaacaactttgaaattacgtacagttttgagaaggtgcctttccactcgatgtacgcgcacagccagagcctggaccggctgatgaaccctctcatcgaccagtacctgtggggactgcaatcgaccaccaccggaaccaccctgaatgccgggactgccaccaccaactttaccaagctgcggcctaccaacttttccaactttaaaaagaactggctgcccgggccttcaatcaagcagcagggcttctcaaagactgccaatcaaaactacaagatccctgccaccgggtcagacagtctcatcaaatacgagacgcacagcactctggacggaagatggagtgccctgacccccggacctccaatggccacggctggacctgcggacagcaagttcagcaacagccagctcatctttgcggggcctaaacagaacggcaacacggccaccgtacccgggactctgatcttcacctctgaggaggagctggcagccaccaacgccaccgatacggacatgtggggcaacctacctggcggtgaccagagcaacagcaacctgccgaccgtggacagactgacagccttgggagccgtgcctggaatggtctggcaaaacagagacatttactaccagggtcccatttgggccaagattcctcataccgatggacactttcacccctcaccgctgattggtgggtttgggctgaaacacccgcctcctcaaatttttatcaagaacaccccggtacctgcgaatcctgcaacgaccttcagctctactccggtaaactccttcattactcagtacagcactggccaggtgtcggtgcagattgactgggagatccagaaggagcggtccaaacgctggaaccccgaggtccagtttacctccaactacggacagcaaaactctctgttgtgggctcccgatgcggctgggaaatacactgagcctagggctatcggtacccgctacctcacccaccacctgtaa

SEQ ID NO: 85 - protein, 734 aa, Adeno-associated virus; identical to SEQ ID NO: 57

SEQ ID NO: 86 - DNA, 3128 bp, Adeno-associated virus
gaattcgccctttctacggctgcgtcaactggaccaatgagaactttcccttcaacgattgcgtcgacaagatgttgatctggtgggaggagggcaagatgacggccaaggtcgtggagtccgccaaggccattctcggcggcagcaaagtgcgcgtggaccaaaagtgcaagccgtccgcccagatcgaccccacccccgtgatcgtcacctccaacaccaacatgtgcgccgtgattgacgggaacagcaccaccttcgagcaccagcagccgttgcgggaccggatgttcaagtttgaactcacccgccgtctggagcacgactttggcaaggtgacaaagcaggaagtcagagagttcttccgctgggcgcaggatcacgtgaccgaggtggcgcacgagttctacgtcagaaagggtggagccaacaagagacccgcccccgatgacgcggataaaagcgagcccaagcgggcctgcccctcagtcgcggatccatcgacgtcagacgcggaaggagctccggtggactttgccgacaggtaccaaaacaaatgttctcgtcacgcgggcatgcttcagatgctgtttccctgcaaaacatgcgagagaatgaatcagaatttcaacatttgcttcacgcacgggaccagagactgttcagaatgtttccccggcgtgtcagaatctcaaccggtcgtcagaaaaaagacgtatcggaaactctgtgcgattcatcatctgctggggcgggcacccgagattgcttgctcggcctgcgatctggtcaacgtggacctagatgactgtgtttctgagcaataaatgacttaaaccaggtatggctgccgatggttatcttccagattggctcgaggacaacctctctgagggcattcgcgagtggtgggacttgaaacctggagccccgaaacccaaagccaaccagcaaaagcaggacgacggccggggtctggtgcttcctggctacaagtacctcggacccttcaacggactcgacaagggggagcccgtcaacgcggcggacgcagcggccctcgagcacgacaaggcctacgaccagcagctcaaagcgggtgacaatccgtacctgcggtataaccacgccgacgccgagtttcaggagcgtctgcaagaagatacgtcttttgggggcaacctcgggcgagcagtcttccaggccaagaagcgggttctcgaacctctcggtctggttgaggaaggcgctaagacggctcctggaaagaagagaccggtagagccatcaccccagcgttctccagactcctctacgggcatcggcaagaaaggccagcagcccgcgaaaaagagactcaactttgggcagactggcgactcagagtcagtgcccgaccctcaaccaatcggagaaccccccgcaggcccctctggtctgggatctggtacaatggctgcaggcggtggcgctccaatggcagacaataacgaaggcgccgacggagtgggtagttcctcaggaaattggcattgcgattccacatggctgggcgacagagtcatcaccaccagcacccgaacctgggccctccccacctacaacaaccacctctacaagcaaatctccaacgggacttcgggaggaagcaccaacgacaacacctacttcggctacagcaccccctgggggtattttgactttaacagattccactgccacttctcaccacgtgactggcagcgactcatcaacaacaactggggattccggcccaagagactcaacttcaagctcttcaacatccaggtcaaggaggtcacgcagaatgaaggcaccaagaccatcgccaataaccttaccagcacgattcaggtctttacggactcggaataccagctcccgtacgtcctcggctctgcgcaccagggctgcctgcctccgttcccggcggacgtcttcatgattcctcagtacgggtacctgactctgaacaatggcagtcaggccgtgggccgttcctccttctactgcctggagtactttccttctcaaatgctgagaacgggcaacaactttgagttcagctaccagtttgaggacgtgccttttcacagcagctacgcgcacagccaaagcctggaccggctgatgaaccccctcatcgaccagtacctgtactacctgtctcggactcagtccacgggaggtaccgcaggaactcagcagttgctattttctcaggccgggcctaataacatgtcggctcaggccaaaaactggctacccgggccctgctaccggcagcaacgcgtctccacgacactgtcgcaaaataacaacagcaactgtaaatcccggtgtcgctatggcaacccacaaggacgacgaagagcgattttgcctggaccggtgccaccaagtatcatctgaatggcagagactctctgttttccgtccagcggagtcttaatgtttgggaaacagggagctggaaaagacaacgtggactatagcagcgttatgctaaccagtgaggaagaaattaaaaccaccaacccagtggccacggaacagtacggcgtggtggccgataacctgcaacagcaaaacgccgctcctattgtaggggccgtcaacagtcaaggagccttacctggcatggtctggcagaaccgggacgtgtacctgcagggtcctatctgggccaagattcctcacacggacggaaactttcatccctcgccgctgatgggaggctttggactgaaacacccgcctcctcagatcctgattaagaatacacctgttcccgcggatcctccaactaccttcagtcaagctaagctggcgtcgttcatcacgcagtacagcaccggacaggtcagcgtggaaattgaatgggagctgcagaaagaaaacagcaaacgctggaacccagagattcaatacacttccaactactacaaatctacaaatgtggacttcgctgttaacacagatggcacttattctgagcctcgccccattggcacccgttacctcacccgtaatctgtaattgctcgttaatcaataaaccggttgattcgtttcagttgaactttggtctctgcgaagggcgaattc

SEQ ID NO: 87 - protein, 738 aa, Artificial Sequence; identical to SEQ ID NO: 7
  Description of Artificial Sequence: Synthetic polypeptide

SEQ ID NO: 88 - DNA, 3128 bp, Adeno-associated virus
gaattcgccctttctacggctgcgtcaactggaccaatgagaactttcccttcaacgattgcgtcgacaagatggtgatctggtgggaggagggcaagatgacggccaaggtcgtggagtccgccaaggccattctcggcggcagcaaagtgcgcgtggaccaaaagtgcaagtcgtccgcccagatcgaccccacccccgtgatcgtcacctccaacaccaacatgtgcgccgtgattgacgggaacagcaccaccttcgagcaccagcagccgttgcaggaccggatgttcaagtttgaactcacccgccgtctggagcacgactttggcaaggtgacaaagcaggaagtcagagagttcttccgctgggcgcaggatcacgtgaccgaggtggcgcacgagttctacgtcagaaagggtggagccaacaagagacccgcccccgatgacgcggataaaagcgagcccaagcgggcctgcccctcagtcgcggatccatcgacgtcagacgcggaaggagctccggtggactttgccgacaggtaccaaaacaaatgttctcgtcacgcgggcatgcttcagatgctgtttccctgcaaaacatgcgagagaatgaatcagaatttcaacatttgcttcacgcacgggaccagagactgttcagaatgtttccccggcgtgtcagaatctcaaccggttgtcagaaaaaagacgtatcggaaactctgtgcgattcatcatctgctggggcgggcacccgagattgcttgctcggcctgcgatctggtcaacgtggacctagatgactgtgtttctgagcaataaatgacttaaaccaggtatggctgccgatggttatcttccagattggctcgaggacaacctctctgagggcattcgcgagtggtgggacttgaaacctggagccccgaaacccaaagccaaccagcaaaagcaggacgacggccggggtctggtgcttcctggctacaagtacctcggacccttcaacggactcgacaagggggagcccgtcaacgcggcggacgcagcggccctcgagcacgacaaggcctacgaccagcagctcaaagcgggtgacaatccgtacctgcggtataaccacgccgacgccgagtttcaggagcgtctgcaagaagatacgtcttttgggggcaacctcgggcgagcagtcttccaggccaagaagcgggttctcgaacctctcggtctggttgaggaaggcgctaagacggctcctggaaagaagagaccggtagagccatcaccccagcgttctccagactcctctacgggcatcggcaagaaaggccagcagcccgcgaaaaagagactcaactttgggcagactggcgactcagagtcagtgcccgaccctcaaccaatcggagaaccccccgcaggcccctctggtctgggatctggtacaatggctgcaggcggtggcgctccaatggcagacaataacgaaggcgccgacggagtgggtagttcctcaggaaattggcattgcgattccacatggctgggcgacagagtcatcaccaccagcacccgaacctgggccctccccacctacaacaaccacctctacaagcaaatctccaacgggacttcgggaggaagcaccaacgacaacacctacttcggctacagcaccccctgggggtattttgactttaacagattccactgccacttctcaccacgtgactggcagcgactcatcaacaacaactggggattccggcccaagagacccaacttcaagctcttcaacatccaggtcaaggaggtcacgcagaatgaaggcaccaagaccatcgccaataaccttaccagcacgattcaggtctttacggactcggaataccagctcccgtacgtcctcggctctgcgcaccagggctgcctgcctccgttcccggcggacgtcttcatgattcctcagtacgggtacctgactctgaacaatggcagtcaggccgtgggccgttcctccttctactgcctggagtactttccttctcaaatgctgagaacgggcaacaactttgagttcagctaccagtttgaggacgtgccttttcacagcagctacgcgcacagccaaagcctggaccggctgatgaaccccctcatcgaccagtacctgtactacctgtctcggactcagtccacgggaggtaccgcaggaactcagcagttgctattttctcaggccgggcctaataacatgtcggctcaggccaaaaactggctacccgggccctgctaccggcagcaacgcgtctccacgacactgtcgcaaaataacaacagcaactttgcctggaccggtgccaccaagtatcatctgaatggcagagactctctggtaaatcccggtgtcgctatggcaacccacaaggacgacgaagagcgattttttccgtccagcggagtcttaatgtttgggaaacagggagctggaaaagacaacgtggactatagcagcgttatgctaaccagtgaggaagaaattaaaaccaccaacccagtggccacagaacagtacggcgtggtggccgataacctgcaacagcaaaacgccgctcctattgtaggggccgtcaacagtcaaggagccttacctggcatggtctggcagaaccgggacgtgtacctgcagggtcctatctgggccaagattcctcacacggacggaaactttcatccctcgccgctgatgggaggctttggactgaaacacccgcctcctcagatcctgattaagaatacacctgttcccgcggatcctccaactaccttcagtcaagctaagctggcgtcgttcatcacgcagtacagcaccggacaggtcagcgtggaaattgaatgggagctgcagaaagaaaacagcaaacgctggaacccagagattcaatacacttccaactactacaaatctacaaatgtggactttgctgttaacacagatggcacttattctgagcctcgccccattggcacccgttacctcacccgtaatctgtaattgcttgttaatcaataaaccggttgattcgtttcagttgaactttggtctctgcgaagggcgaattc

SEQ ID NO: 89 - protein, 738 aa, Artificial Sequence
  Description of Artificial Sequence: Synthetic polypeptide
MAADGYLPDWLEDNLSEGIREWWDLKPGAPKPKANQQKQDDGRGLVLPGYKYLGPFNGLDKGEPVNAADAAALEHDKAYDQQLKAGDNPYLRYNHADAEFQERLQEDTSFGGNLGRAVFQAKKRVLEPLGLVEEGAKTAPGKKRPVEPSPQRSPDSSTGIGKKGQQPAKKRLNFGQTGDSESVPDPQPIGEPPAGPSGLGSGTMAAGGGAPMADNNEGADGVGSSSGNWHCDSTWLGDRVITTSTRTWALPTYNNHLYKQISNGTSGGSTNDNTYFGYSTPWGYFDFNRFHCHFSPRDWQRLINNNWGFRPKRPNFKLFNIQVKEVTQNEGTKTIANNLTSTIQVFTDSEYQLPYVLGSAHQGCLPPFPADVFMIPQYGYLTLNNGSQAVGRSSFYCLEYFPSQMLRTGNNFEFSYQFEDVPFHSSYAHSQSLDRLMNPLIDQYLYYLSRTQSTGGTAGTQQLLFSQAGPNNMSAQAKNWLPGPCYRQQRVSTTLSQNNNSNFAWTGATKYHLNGRDSLVNPGVAMATHKDDEERFFPSSGVLMFGKQGAGKDNVDYSSVMLTSEEEIKTTNPVATEQYGVVADNLQQQNAAPIVGAVNSQGALPGMVWQNRDVYLQGPIWAKIPHTDGNFHPSPLMGGFGLKHPPPQILIKNTPVPADPPTTFSQAKLASFITQYSTGQVSVEIEWELQKENSKRWNPEIQYTSNYYKSTNVDFAVNTDGTYSEPRPIGTRYLTRNL

SEQ ID NO: 90 - protein, 738 aa, Adeno-associated virus
MAADGYLPDWLEDNLSEGIREWWDLKPGAPKPKANQQKQDDGRGLVLPGYKYLGPFNGLDKGEPVNAADAAALEHDKAYDQQLKAGDNPYLRYNHADAEFQERLQEDTSFGGNLGRAVFQAKKRVLEPLGLVEEAAKTAPGKKRPVEPSPQRSPDSSTGIGKKGQQPAKKRLNFGQTGDSESVPDPQPIGEPPAGPSGLGSGTMAAGGGAPMADNNEGADGVGSSSGNWHCDSTWLGDRVITTSTRTWALPTYNNHLYKQISNGTSGGSTNDNTYFGYSTPWGYFDFNRFHCHFSPRDWQRLINNNWGFRPKRLSFKLFNIQVKEVTQNEGTKTIANNLTSTIQVFTDSEYQLPYVLGSAHQGCLPPFPADVFMIPQYGYLTLNNGSQAVGRSSFYCLEYFPSQMLRTGNNFEFSYTFEDVPFHSSYAHSQSLDRLMNPLIDQYLYYLSRTQSTGGTQGTQQLLFSQAGPANMSAQAKNWLPGPCYRQQRVSTTLSQNNNSNFAWTGATKYHLNGRDSLVNPGVAMATHKDDEERFFPSSGVLMFGKQGAGRDNVDYSSVMLTSEEEIKTTNPVATEQYGVVADNLQQTNTGPIVGNVNSQGALPGMVWQNRDVYLQGPIWAKIPHTDGNFHPSPLMGGFGLKHPPPQILIKNTPVPADPPTTFSQAKLASFITQYSTGQVSVEIEWELQKENSKRWNPEIQYTSNYYKSTNVDFAVNTEGTYSEPRPIGTRYLTRNL

SEQ ID NO: 91 - DNA, 2172 bp, Artificial Sequence
  Description of Artificial Sequence: Synthetic polynucleotide
atgtcttttgttgatcaccctccagattggttggaagaagttggtgaaggtcttcgcgagtttttgggccttgaagcgggcccaccgaaaccaaaacccaatcagcagcatcaagatcaagcccgtggtcttgtgctgcctggttataactatctcggacccggaaacggtctcgatcgaggagagcctgtcaacagggcagacgaggtcgcgcgagagcacgacatctcgtacaacgagcagcttgaggcgggagacaacccctacctcaagtacaaccacgcggacgccgagtttcaggagaagctcgccgacgacacatccttcgggggaaacctcggaaaggcagtctttcaggccaagaaaagggttctcgaaccttttggcctggttgaagagggtgctaagacggcccctaccggaaagcggatagacgaccactttccaaaaagaaagaaggctcggaccgaagaggactccaagccttccacctcgtcagacgccgaagctggacccagcggatcccagcagctgcaaatcccagcccaaccagcctcaagtttgggagctgatacaatgtctgcgggaggtggcggcccattgggcgacaataaccaaggtgccgatggagtgggcaatgcctcgggagattggcattgcgattccacgtggatgggggacagagtcgtcaccaagtccacccgaacctgggtgctgcccagctacaacaaccaccagtaccgagagatcaaaagcggctccgtcgacggaagcaacgccaacgcctactttggatacagcaccccctgggggtactttgactttaaccgcttccacagccactggagcccccgagactggcaaagactcatcaacaactactggggcttcagaccccggtccctcagagtcaaaatcttcaacattcaagtcaaagaggtcacggtgcaggactccaccaccaccatcgccaacaacctcacctccaccgtccaagtgtttacggacgacgactaccagctgccctacgtcgtcggcaacgggaccgagggatgcctgccggccttccctccgcaggtctttacgctgccgcagtacggttacgcgacgctgaaccgcgacaacacagaaaatcccaccgagaggagcagcttcttctgcctagagtactttcccagcaagatgctgagaacgggcaacaactttgagtttacctacaactttgaggaggtgcccttccactccagcttcgctcccagtcagaacctgttcaagctggccaacccgctggtggaccagtacttgtaccgcttcgtgagcacaaataacactggcggagtccagttcaacaagaacctggccgggagatacgccaacacctacaaaaactggttcccggggcccatgggccgaacccagggctggaacctgggctccggggtcaaccgcgccagtgtcagcgccttcgccacgaccaataggatggagctcgagggcgcgagttaccaggtgcccccgcagccgaacggcatgaccaacaacctccagggcagcaacacctatgccctggagaacactatgatcttcaacagccagccggcgaacccgggcaccaccgccacgtacctcgagggcaacatgctcatcaccagcgagagcgagacgcagccggtgaaccgcgtggcgtacaacgtcggcgggcagatggccaccaacaaccagagctccaccactgcccccgcgaccggcacgtacaacctccaggaaatcgtgcccggcagcgtgtggatggagagggacgtgtacctccaaggacccatctgggccaagatcccagagacgggggcgcactttcacccctctccggccatgggcggattcggactcaaacacccaccgcccatgatgctcatcaagaacacgcctgtgcccggaaatatcaccagcttctcggacgtgcccgtcagcagcttcatcacccagtacagcaccgggcaggtcaccgtggagatggagtgggagctcaagaaggaaaactccaagaggtggaacccagagatccagtacacaaacaactacaacgacccccagtttgtggactttgccccggacagcaccggggaatacagaaccaccagacctatcggaacccgataccttacccgacccctt

SEQ ID NO: 92 - protein, 720 aa, Artificial Sequence
  Description of Artificial Sequence: Synthetic polypeptide
MSFVDHPPDWLEEVGEGLREFLGLEAGPPKPKPNQQHQDQARGLVLPGYNYLGPGNGLDRGEPVNRADEVAREHDISYNEQLEAGDNPYLKYNHADAEFQEKLADDTSFGGNLGKAVFQAKKRVLEPFGLVEEGAKTAPTGKRIDDHFPKRKKARTEEDSKPSTSSDAEAGPSGSQQLQIPAQPASSLGADTMSAGGGGPLGDNNQGADGVGNASGDWHCDSTWMGDRVVTKSTRTWVLPSYNNHQYREIKSGSVDGSNANAYFGYSTPWGYFDFNRFHSHWSPRDWQRLINNYWGFRPRSLRVKIFNIQVKEVTVQDSTTTIANNLTSTVQVFTDDDYQLPYVVGNGTEGCLPAFPPQVFTLPQYGYATLNRDNTENPTERSSFFCLEYFPSKMLRTGNNFEFTYNFEEVPFHSSFAPSQNLFKLANPLVDQYLYRFVSTNNTGGVQFNKNLAGRYANTYKNWFPGPMGRTQGWNLGSGVNRASVSAFATTNRMELEGASYQVPPQPNGMTNNLQGSNTYALENTMIFNSQPANPGTTATYLEGNMLITSESETQPVNRVAYNVGGQMATNNQSSTTAPATGTYNLQEIVPGSVWMERDVYLQGPIWAKIPETGAHFHPSPAMGGFGLKHPPPMMLIKNTPVPGNITSFSDVPVSSFITQYSTGQVTVEMEWELKKENSKRWNPEIQYTNNYNDPQFVDFAPDSTGEYRTTRPIGTRYL

SEQ ID NO: 93 - protein, 724 aa, Adeno-associated virus 5
MSFVDHPPDWLEEVGEGLREFLGLEAGPPKPKPNQQHQDQARGLVLPGYNYLGPGNGLDRGEPVNRADEVAREHDISYNEQLEAGDNPYLKYNHADAEFQEKLADDTSFGGNLGKAVFQAKKRVLEPFGLVEEGAKTAPTGKRIDDHFPKRKKARTEEDSKPSTSSDAEAGPSGSQQLQIPAQPASSLGADTMSAGGGGPLGDNNQGADGVGNASGDWHCDSTWMGDRVVTKSTRTWVLPSYNNHQYREIKSGSVDGSNANAYFGYSTPWGYFDFNRFHSHWSPRDWQRLINNYWGFRPRSLRVKIFNIQVKEVTVQDSTTTIANNLTSTVQVFTDDDYQLPYVVGNGTEGCLPAFPPQVFTLPQYGYATLNRDNTENPTERSSFFCLEYFPSKMLRTGNNFEFTYNFEEVPFHSSFAPSQNLFKLANPLVDQYLYRFVSTNNTGGVQFNKNLAGRYANTYKNWFPGPMGRTQGWNLGSGVNRASVSAFATTNRMELEGASYQVPPQPNGMTNNLQGSNTYALENTMIFNSQPANPGTTATYLEGNMLITSESETQPVNRVAYNVGGQMATNNQSSTTAPATGTYNLQEIVPGSVWMERDVYLQGPIWAKIPETGAHFHPSPAMGGFGLKHPPPMMLIKNTPVPGNITSFSDVPVSSFITQYSTGQVTVEMEWELKKENSKRWNPEIQYTNNYNDPQFVDFAPDSTGEYRTTRPIGTRYLTRPL

SEQ ID NO: 94 - DNA, 2175 bp, Adeno-associated virus 5
atgtcttttgttgatcaccctccagattggttggaagaagttggtgaaggtcttcgcgagtttttgggccttgaagcgggcccaccgaaaccaaaacccaatcagcagcatcaagatcaagcccgtggtcttgtgctgcctggttataactatctcggacccggaaacggtctcgatcgaggagagcctgtcaacagggcagacgaggtcgcgcgagagcacgacatctcgtacaacgagcagcttgaggcgggagacaacccctacctcaagtacaaccacgcggacgccgagtttcaggagaagctcgccgacgacacatccttcgggggaaacctcggaaaggcagtctttcaggccaagaaaagggttctcgaaccttttggcctggttgaagagggtgctaagacggcccctaccggaaagcggatagacgaccactttccaaaaagaaagaaggctcggaccgaagaggactccaagccttccacctcgtcagacgccgaagctggacccagcggatcccagcagctgcaaatcccagcccaaccagcctcaagtttgggagctgatacaatgtctgcgggaggtggcggcccattgggcgacaataaccaaggtgccgatggagtgggcaatgcctcgggagattggcattgcgattccacgtggatgggggacagagtcgtcaccaagtccacccgaacctgggtgctgcccagctacaacaaccaccagtaccgagagatcaaaagcggctccgtcgacggaagcaacgccaacgcctactttggatacagcaccccctgggggtactttgactttaaccgcttccacagccactggagcccccgagactggcaaagactcatcaacaactactggggcttcagaccccggtccctcagagtcaaaatcttcaacattcaagtcaaagaggtcacggtgcaggactccaccaccaccatcgccaacaacctcacctccaccgtccaagtgtttacggacgacgactaccagctgccctacgtcgtcggcaacgggaccgagggatgcctgccggccttccctccgcaggtctttacgctgccgcagtacggttacgcgacgctgaaccgcgacaacacagaaaatcccaccgagaggagcagcttcttctgcctagagtactttcccagcaagatgctgagaacgggcaacaactttgagtttacctacaactttgaggaggtgcccttccactccagcttcgctcccagtcagaacctgttcaagctggccaacccgctggtggaccagtacttgtaccgcttcgtgagcacaaataacactggcggagtccagttcaacaagaacctggccgggagatacgccaacacctacaaaaactggttcccggggcccatgggccgaacccagggctggaacctgggctccggggtcaaccgcgccagtgtcagcgccttcgccacgaccaataggatggagctcgagggcgcgagttaccaggtgcccccgcagccgaacggcatgaccaacaacctccagggcagcaacacctatgccctggagaacactatgatcttcaacagccagccggcgaacccgggcaccaccgccacgtacctcgagggcaacatgctcatcaccagcgagagcgagacgcagccggtgaaccgcgtggcgtacaacgtcggcgggcagatggccaccaacaaccagagctccaccactgcccccgcgaccggcacgtacaacctccaggaaatcgtgcccggcagcgtgtggatggagagggacgtgtacctccaaggacccatctgggccaagatcccagagacgggggcgcactttcacccctctccggccatgggcggattcggactcaaacacccaccgcccatgatgctcatcaagaacacgcctgtgcccggaaatatcaccagcttctcggacgtgcccgtcagcagcttcatcacccagtacagcaccgggcaggtcaccgtggagatggagtgggagctcaagaaggaaaactccaagaggtggaacccagagatccagtacacaaacaactacaacgacccccagtttgtggactttgccccggacagcaccggggaatacagaaccaccagacctatcggaacccgataccttacccgacccctttaa

SEQ ID NO: 95 - DNA, 2208 bp, Adeno-associated virus
atggctgccgatggttatcttccagattggctcgaggacaacctctctgagggcattcgcgagtggtgggacttgaaacctggagccccgaaacccaaagccaaccagcaaaagcaggacgacggccggggtctggtgcttcctggctacaagtacctcggacccttcaacggactcgacaagggggagcccgtcaacgcggcggatgcagcggccctcgagcacgacaaggcctacgaccagcagctcaaagcgggtgacaatccgtacctgcggtataaccacgccgacgccgagtttcaggagcgtctgcaagaagatacgtcttttgggggcaacctcgggcgagcagtcttccaggccaagaagagggttctcgaaccttttggtctggttgaggaaggtgctaagacggctcctggaaagaaacgtccggtagagcagtcgccacaagagccagactcctcctcgggcattggcaagacaggccagcagcccgctaaaaagagactcaattttggtcagactggcgactcagagtcagtccccgacccacaacctctcggagaacctccagcaacccccgctgctgtgggacctactacaatggcttcaggcggtggcgcaccaatggcagacaataacgaaggcgccgacggagtgggtaatgcctcaggaaattggcattgcgattccacatggctgggcgacagagtcatcaccaccagcacccgaacatgggccttgcccacctataacaaccacctctacaagcaaatctccagtgcttcaacgggggccagcaacgacaaccactacttcggctacagcaccccctgggggtattttgatttcaacagattccactgccatttctcaccacgtgactggcagcgactcatcaacaacaattggggattccggcccaagagactcaacttcaagctcttcaacatccaagtcaaggaggtcacgacgaatgatggcgtcacgaccatcgctaataaccttaccagcacggttcaagtcttctcggactcggagtaccagttgccgtacgtcctcggctctgcgcaccagggctgcctccctccgttcccggcggacgtgttcatgattccgcagtacggctacctaacgctcaacaatggcagccaggcagtgggacggtcatccttttactgcctggaatatttcccatcgcagatgctgagaacgggcaataactttaccttcagctacaccttcgaggacgtgcctttccacagcagctacgcgcacagccagagcctggaccggctgatgaatcctctcatcgaccagtacctgtattacctgaacagaactcagaatcagtccggaagtgcccaaaacaaggacttgctgtttagccgggggtctccagctggcatgtctgttcagcccaaaaactggctacctggaccctgttaccggcagcagcgcgtttctaaaacaaaaacagacaacaacaacagcaactttacctggactggtgcttcaaaatataaccttaatgggcgtgaatctataatcaaccctggcactgctatggcctcacacaaagacgacaaagacaagttctttcccatgagcggtgtcatgatttttggaaaggagagcgccggagcttcaaacactgcattggacaatgtcatgatcacagacgaagaggaaatcaaagccactaaccccgtggccaccgaaagatttgggactgtggcagtcaatctccagagcagcagcacagaccctgcgaccggagatgtgcatgttatgggagccttacctggaatggtgtggcaagacagagacgtatacctgcagggtcctatttgggccaaaattcctcacacggatggacactttcacccgtctcctctcatgggcggctttggacttaagcacccgcctcctcagatcctcatcaaaaacacgcctgttcctgcgaatcctccggcagagttttcggctacaaagtttgcttcattcatcacccagtattccacaggacaagtgagcgtggagattgaatgggagctgcagaaagaaaacagcaaacgctggaatcccgaagtgcagtatacatctaactatgcaaaatctgccaacgttgatttcactgtggacaacaatggactttatactgagcctcgccccattggcacccgttacctcacccgtcccctg

SEQ ID NO: 96 - protein, 736 aa, Adeno-associated virus 6
MAADGYLPDWLEDNLSEGIREWWDLKPGAPKPKANQQKQDDGRGLVLPGYKYLGPFNGLDKGEPVNAADAAALEHDKAYDQQLKAGDNPYLRYNHADAEFQERLQEDTSFGGNLGRAVFQAKKRVLEPFGLVEEGAKTAPGKKRPVEQSPQEPDSSSGIGKTGQQPAKKRLNFGQTGDSESVPDPQPLGEPPATPAAVGPTTMASGGGAPMADNNEGADGVGNASGNWHCDSTWLGDRVITTSTRTWALPTYNNHLYKQISSASTGASNDNHYFGYSTPWGYFDFNRFHCHFSPRDWQRLINNNWGFRPKRLNFKLFNIQVKEVTTNDGVTTIANNLTSTVQVFSDSEYQLPYVLGSAHQGCLPPFPADVFMIPQYGYLTLNNGSQAVGRSSFYCLEYFPSQMLRTGNNFTFSYTFEDVPFHSSYAHSQSLDRLMNPLIDQYLYYLNRTQNQSGSAQNKDLLFSRGSPAGMSVQPKNWLPGPCYRQQRVSKTKTDNNNSNFTWTGASKYNLNGRESIINPGTAMASHKDDKDKFFPMSGVMIFGKESAGASNTALDNVMITDEEEIKATNPVATERFGTVAVNLQSSSTDPATGDVHVMGALPGMVWQDRDVYLQGPIWAKIPHTDGHFHPSPLMGGFGLKHPPPQILIKNTPVPANPPAEFSATKFASFITQYSTGQVSVEIEWELQKENSKRWNPEVQYTSNYAKSANVDFTVDNNGLYTEPRPIGTRYLTRPL

SEQ ID NO: 97 - protein, 623 aa, Adeno-associated virus 6
MPGFYEIVIKVPSDLDEHLPGISDSFVNWVAEKEWELPPDSDMDLNLIEQAPLTVAEKLQRDFLVQWRRVSKAPEALFFVQFEKGESYFHLHILVETTGVKSMVLGRFLSQIRDKLVQTIYRGIEPTLPNWFAVTKTRNGAGGGNKVVDECYIPNYLLPKTQPELQWAWTNMEEYISACLNLAERKRLVAHDLTHVSQTQEQNKENLNPNSDAPVIRSKTSARYMELVGWLVDRGITSEKQWIQEDQASYISFNAASNSRSQIKAALDNAGKIMALTKSAPDYLVGPAPPADIKTNRIYRILELNGYDPAYAGSVFLGWAQKRFGKRNTIWLFGPATTGKTNIAEAIAHAVPFYGCVNWTNENFPFNDCVDKMVIWWEEGKMTAKVVESAKAILGGSKVRVDQKCKSSAQIDPTPVIVTSNTNMCAVIDGNSTTFEHQQPLQDRMFKFELTRRLEHDFGKVTKQEVKEFFRWAQDHVTEVAHEFYVRKGGANKRPAPDDADKSEPKRACPSVADPSTSDAEGAPVDFADRYQNKCSRHAGMLQMLFPCKTCERMNQNFNICFTHGTRDCSECFPGVSESQPVVRKRTYRKLCAIHHLLGRAPEIACSACDLVNVDLDDCVSEQ

SEQ ID NO: 98 - DNA, 4683 bp, Adeno-associated virus 6
ttggccactccctctctgcgcgctcgctcgctcactgaggccgggcgaccaaaggtcgcccgacgcccgggctttgcccgggcggcctcagtgagcgagcgagcgcgcagagagggagtggccaactccatcactaggggttcctggaggggtggagtcgtgacgtgaattacgtcatagggttagggaggtcctgtattagaggtcacgtgagtgttttgcgacattttgcgacaccatgtggtcacgctgggtatttaagcccgagtgagcacgcagggtctccattttgaagcgggaggtttgaacgcgcagcgccatgccggggttttacgagattgtgattaaggtccccagcgaccttgacgagcatctgcccggcatttctgacagctttgtgaactgggtggccgagaaggaatgggagttgccgccagattctgacatggatctgaatctgattgagcaggcacccctgaccgtggccgagaagctgcagcgcgacttcctggtccagtggcgccgcgtgagtaaggccccggaggccctcttctttgttcagttcgagaagggcgagtcctacttccacctccatattctggtggagaccacgggggtcaaatccatggtgctgggccgcttcctgagtcagattagggacaagctggtgcagaccatctaccgcgggatcgagccgaccctgcccaactggttcgcggtgaccaagacgcgtaatggcgccggaggggggaacaaggtggtggacgagtgctacatccccaactacctcctgcccaagactcagcccgagctgcagtgggcgtggactaacatggaggagtatataagcgcgtgtttaaacctggccgagcgcaaacggctcgtggcgcacgacctgacccacgtcagccagacccaggagcagaacaaggagaatctgaaccccaattctgacgcgcctgtcatccggtcaaaaacctccgcacgctacatggagctggtcgggtggctggtggaccggggcatcacctccgagaagcagtggatccaggaggaccaggcctcgtacatctccttcaacgccgcctccaactcgcggtcccagatcaaggccgctctggacaatgccggcaagatcatggcgctgaccaaatccgcgcccgactacctggtaggccccgctccgcccgccgacattaaaaccaaccgcatttaccgcatcctggagctgaacggctacgaccctgcctacgccggctccgtctttctcggctgggcccagaaaaggttcggaaaacgcaacaccatctggctgtttgggccggccaccacgggcaagaccaacatcgcggaagccatcgcccacgccgtgcccttctacggctgcgtcaactggaccaatgagaactttcccttcaacgattgcgtcgacaagatggtgatctggtgggaggagggcaagatgacggccaaggtcgtggagtccgccaaggccattctcggcggcagcaaggtgcgcgtggaccaaaagtgcaagtcgtccgcccagatcgatcccacccccgtgatcgtcacctccaacaccaacatgtgcgccgtgattgacgggaacagcaccaccttcgagcaccagcagccgttgcaggaccggatgttcaaatttgaactcacccgccgtctggagcatgactttggcaaggtgacaaagcaggaagtcaaagagttcttccgctgggcgcaggatcacgtgaccgaggtggcgcatgagttctacgtcagaaagggtggagccaacaagagacccgcccccgatgacgcggataaaagcgagcccaagcgggcctgcccctcagtcgcggatccatcgacgtcagacgcggaaggagctccggtggactttgccgacaggtaccaaaacaaatgttctcgtcacgcgggcatgcttcagatgctgtttccctgcaaaacatgcgagagaatgaatcagaatttcaacatttgcttcacgcacgggaccagagactgttcagaatgtttccccggcgtgtcagaatctcaaccggtcgtcagaaagaggacgtatcggaaactctgtgccattcatcatctgctggggcgggctcccgagattgcttgctcggcctgcgatctggtcaacgtggatctggatgactgtgtttctgagcaataaatgacttaaaccaggtatggctgccgatggttatcttccagattggctcgaggacaacctctctgagggcattcgcgagtggtgggacttgaaacctggagccccgaaacccaaagccaaccagcaaaagcaggacgacggccggggtctggtgcttcctggctacaagtacctcggacccttcaacggactcgacaagggggagcccgtcaacgcggcggatgcagcggccctcgagcacgacaaggcctacgaccagcagctcaaagcgggtgacaatccgtacctgcggtataaccacgccgacgccgagtttcaggagcgtctgcaagaagatacgtcttttgggggcaacctcgggcgagcagtcttccaggccaagaagagggttctcgaaccttttggtctggttgaggaaggtgctaagacggctcctggaaagaaacgtccggtagagcagtcgccacaagagccagactcctcctcgggcattggcaagacaggccagcagcccgctaaaaagagactcaattttggtcagactggcgactcagagtcagtccccgacccacaacctctcggagaacctccagcaacccccgctgctgtgggacctactacaatggcttcaggcggtggcgcaccaatggcagacaataacgaaggcgccgacggagtgggtaatgcctcaggaaattggcattgcgattccacatggctgggcgacagagtcatcaccaccagcacccgaacatgggccttgcccacctataacaaccacctctacaagcaaatctccagtgcttcaacgggggccagcaacgacaaccactacttcggctacagcaccccctgggggtattttgatttcaacagattccactgccatttctcaccacgtgactggcagcgactcatcaacaacaattggggattccggcccaagagactcaacttcaagctcttcaacatccaagtcaaggaggtcacgacgaatgatggcgtcacgaccatcgctaataaccttaccagcacggttcaagtcttctcggactcggagtaccagttgccgtacgtcctcggctctgcgcaccagggctgcctccctccgttcccggcggacgtgttcatgattccgcagtacggctacctaacgctcaacaatggcagccaggcagtgggacggtcatccttttactgcctggaatatttcccatcgcagatgctgagaacgggcaataactttaccttcagctacaccttcgaggacgtgcctttccacagcagctacgcgcacagccagagcctggaccggctgatgaatcctctcatcgaccagtacctgtattacctgaacagaactcagaatcagtccggaagtgcccaaaacaaggacttgctgtttagccgggggtctccagctggcatgtctgttcagcccaaaaactggctacctggaccctgttaccggcagcagcgcgtttctaaaacaaaaacagacaacaacaacagcaactttacctggactggtgcttcaaaatataaccttaatgggcgtgaatctataatcaaccctggcactgctatggcctcacacaaagacgacaaagacaagttctttcccatgagcggtgtcatgatttttggaaaggagagcgccggagcttcaaacactgcattggacaatgtcatgatcacagacgaagaggaaatcaaagccactaaccccgtggccaccgaaagatttgggactgtggcagtcaatctccagagcagcagcacagaccctgcgaccggagatgtgcatgttatgggagccttacctggaatggtgtggcaagacagagacgtatacctgcagggtcctatttgggccaaaattcctcacacggatggacactttcacccgtctcctctcatgggcggctttggacttaagcacccgcctcctcagatcctcatcaaaaacacgcctgttcctgcgaatcctccggcagagttttcggctacaaagtttgcttcattcatcacccagtattccacaggacaagtgagcgtggagattgaatgggagctgcagaaagaaaacagcaaacgctggaatcccgaagtgcagtatacatctaactatgcaaaatctgccaacgttgatttcactgtggacaacaatggactttatactgagcctcgccccattggcacccgttacctcacccgtcccctgtaattgtgtgttaatcaataaaccggttaattcgtgtcagttgaactttggtctcatgtcgttattatcttatctggtcaccatagcaaccggttacacattaactgcttagttgcgcttcgcgaatacccctagtgatggagttgcccactccctctatgcgcgctcgctcgctcggtggggccggcagagcagagctctgccgtctgcggacctttggtccgcaggccccaccgagcgagcgagcgcgcatagagggagtgggcaa

SEQ ID NO: 99 - DNA, 2211 bp, Adeno-associated virus
atggctgccgatggttatcttccagattggctcgaggacaacctctctgagggcattcgcgagtggtgggacttgaaacctggagccccgaaacccaaagccaaccagcaaaagcaggacgacggccggggtctggtgcttcctggctacaagtacctcggacccttcaacggactcgacaagggggagcccgtcaacgcggcggatgcagcggccctcgagcacgacaaggcctacgaccagcagctcaaagcgggtgacaatccgtacctgcggtataaccacgccgacgccgagtttcaggagcgtctgcaagaagatacgtcttttgggggcaacctcgggcgagcagtcttccaggccaagaagagggttctcgaaccttttggtctggttgaggaaggtgctaagacggctcctggaaagaaacgtccggtagagcagtcgccacaagagccagactcctcctcgggcattggcaagacaggccagcagcccgctaaaaagagactcaattttggtcagactggcgactcagagtcagtccccgacccacaacctctcggagaacctccagcaacccccgctgctgtgggacctactacaatggcttcaggcggtggcgcaccaatggcagacaataacgaaggcgccgacggagtgggtaatgcctcaggaaattggcattgcgattccacatggctgggcgacagagtcatcaccaccagcacccgaacatgggccttgcccacctataacaaccacctctacaagcaaatctccagtgcttcaacgggggccagcaacgacaaccactacttcggctacagcaccccctgggggtattttgatttcaacagattccactgccatttctcaccacgtgactggcagcgactcatcaacaacaattggggattccggcccaagagactcaacttcaagctcttcaacatccaagtcaaggaggtcacgacgaatgatggcgtcacgaccatcgctaataaccttaccagcacggttcaagtcttctcggactcggagtaccagttgccgtacgtcctcggctctgcgcaccagggctgcctccctccgttcccggcggacgtgttcatgattccgcagtacggctacctaacgctcaacaatggcagccaggcagtgggacggtcatccttttactgcctggaatatttcccatcgcagatgctgagaacgggcaataactttaccttcagctacaccttcgaggacgtgcctttccacagcagctacgcgcacagccagagcctggaccggctgatgaatcctctcatcgaccagtacctgtattacctgaacagaactcagaatcagtccggaagtgcccaaaacaaggacttgctgtttagccgggggtctccagctggcatgtctgttcagcccaaaaactggctacctggaccctgttaccggcagcagcgcgtttctaaaacaaaaacagacaacaacaacagcaactttacctggactggtgcttcaaaatataaccttaatgggcgtgaatctataatcaaccctggcactgctatggcctcacacaaagacgacaaagacaagttctttcccatgagcggtgtcatgatttttggaaaggagagcgccggagcttcaaacactgcattggacaatgtcatgatcacagacgaagaggaaatcaaagccactaaccccgtggccaccgaaagatttgggactgtggcagtcaatctccagagcagcagcacagaccctgcgaccggagatgtgcatgttatgggagccttacctggaatggtgtggcaagacagagacgtatacctgcagggtcctatttgggccaaaattcctcacacggatggacactttcacccgtctcctctcatgggcggctttggacttaagcacccgcctcctcagatcctcatcaaaaacacgcctgttcctgcgaatcctccggcagagttttcggctacaaagtttgcttcattcatcacccagtattccacaggacaagtgagcgtggagattgaatgggagctgcagaaagaaaacagcaaacgctggaatcccgaagtgcagtatacatctaactatgcaaaatctgccaacgttgatttcactgtggacaacaatggactttatactgagcctcgccccattggcacccgttacctcacccgtcccctgtaa

SEQ ID NO: 100 - protein, 736 aa, Adeno-associated virus; identical to SEQ ID NO: 96

SEQ ID NO: 101 - protein, 736 aa, Adeno-associated virus
MAADGYLPDWLEDNLSEGIREWWDLKPGAPKPKANQQKQDDGRGLVLPGYKYLGPFNGLDKGEPVNAADAAALEHDKAYDQQLKAGDNPYLRYNHADAEFQERLQEDTSFGGNLGRAVFQAKKRVLEPFGLVEEGAKTAPGKKRPVEQSPQEPDSSSGIGKTGQQPAKKRLNFGQTGDSESVPDPQPLGEPPATPAAVGPTTMASGGGAPMADNNEGADGVGNASGNWHCDSTWLGDRVITTSTRTWALPTYNNHLYKQISSASTGASNDNHYFGYSTPWGYFDFNRFHCHFSPRDWQRLINNNWGFRPKRLNFKLFNIQVKEVTTNDGVTTIANNLTSTVQVFSDSEYQLPYVLGSAHQGCLPPFPADVFMIPQYGYLTLNNGSQAVGRSSFYCLEYFPSQMLRTGNNFTFSYTFEDVPFHSSYAHSQSLDRLMNPLIDQYLYYLNRTQNQSGSAQNKDLLFSRGSPAGMSVQPKNWLPGPCYRQQRVSKTKTDNNNSNFTWTGASKYNLNGRESIINPGTAMASHKDDEDKFFPMSGVMIFGKESAGASNTALDNVMITDEEEIKATNPVATERFGTVAVNLQSSSTDPATGDVHVMGALPGMVWQDRDVYLQGPIWAKIPHTDGHFHPSPLMGGFGLKHPPPQILIKNTPVPANPPAEFSATKFASFITQYSTGQVSVEIEWELQKENSKRWNPEVQYTSNYAKSANVDFTVDNNGLYTEPRPIGTRYLTRPL

SEQ ID NO: 102 - protein, 736 aa, Adeno-associated virus
MAADGYLPDWLEDNLSEGIREWWDLKPGAPKPKANQQKQDDGRGLVLPGYKYLGPFNGLDKGEPVNAADAAALEHDKAYDQQLKAGDNPYLRYNHADAEFQERLQEDTSFGGNLGRAVFQAKKRVLEPLGLVEEGAKTAPGKKRPVEQSPQEPDSSSGIGKTGQQPAKKRLNFGQTGDSESVPDPQPLGEPPATPAAVGPTTMASGGGAPMADNNEGADGVGNASGNWHCDSTWLGDRVITTSTRTWALPTYNNHLYKQISSASTGASNDNHYFGYSTPWGYFDFNRFHCHFSPRDWQRLINNNWGFRPKRLNFKLFNIQVKEVTTNDGVTTIANNLTSTVQVFSDSEYQLPYVLGSAHQGCLPPFPADVFMIPQYGYLTLNNGSQAVGRSSFYCLEYFPSQMLRTGNNFTFSYTFEDVPFHSSYAHSQSLDRLMNPLIDQYLYYLNRTQNQSGSAQNKDLLFSRGSPAGMSVQPKNWLPGPCYRQQRVSKTKTDNNNSNFTWTGASKYNLNGRESIINPGTAMASHKDDEDKFFPMSGVMIFGKESAGASNTALDNVMITDEEEIKATNPVATERFGTVAVNLQSSSTDPATGDVHVMGALPGMVWQDRDVYLQGPIWAKIPHTDGHFHPSPLMGGFGLKHPPPQILIKNTPVPANPPAEFSATKFASFITQYSTGQVSVEIEWELQKENSKRWNPEVQYTSNYAKSANVDFTVDNNGLYTEPRPIGTRYLTRPL

SEQ ID NO: 103 - protein, 736 aa, Adeno-associated virus
MAADGYLPDWLEDNLSEGIREWWDLKPGAPKPKANQQKQDDGRGLVLPGYKYLGPFNGLDKGEPVNAADAAALEHDKAYDQQLKAGDNPYLRYNHADAEFQERLQEDTSFGGNLGRAVFQAKKRVLEPLGLVEEGAKTAPGKKRPVEQSPQEPDSSSGIGKTGQQPAKKRLNFGQTGDSESVPDPQPLGEPPATPAAVGPTTMASGGGAPMADNNEGADGVGNASGNWHCDSTWLGDRVITTSTRTWALPTYNNHLYKQISSASTGASNDNHYFGYSTPWGYFDFNRFHCHFSPRDWQRLINNNWGFRPKRLNFKLFNIQVKEVTTNDGVTTIANNLTSTVQVFSDSEYQLPYVLGSAHQGCLPPFPADVFMIPQYGYLTLNNGSQAVGRSSFYCLEYFPSQMLRTGNNFTFSYTFEDVPFHSSYAHSQSLDRLMNPLIDQYLYYLNRTQNQSGSAQNKDLLFSRGSPAGMSVQPKNWLPGPCYRQQRVSKTKTDNNNSNFTWTGASKYNLNGRESIINPGTAMASHKDDKDKFFPMSGVMIFGKESAGASNTALDNVMITDEEEIKATNPVATERFGTVAVNLQSSSTDPATGDVHVMGALPGMVWQDRDVYLQGPIWAKIPHTDGHFHPSPLMGGFGLKHPPPQILIKNTPVPANPPAEFSATKFASFITQYSTGQVSVEIEWELQKENSKRWNPEVQYTSNYAKSANVDFTVDNNGLYTEPRPIGTRYLTRPL

SEQ ID NO: 104 - DNA, 2214 bp, Adeno-associated virus
atggctgccgatggttatcttccagattggctcgaggacaacctctctgagggcattcgcgagtggtgggacctgaaacctggagccccgaaacccaaagccaaccagcaaaagcaggacaacggccggggtctggtgcttcctggctacaagtacctcggacccttcaacggactcgacaagggggagcccgtcaacgcggcggacgcagcggccctcgagcacgacaaggcctacgaccagcagctcaaagcgggtgacaatccgtacctgcggtataaccacgccgacgccgagtttcaggagcgtctgcaagaagatacgtcatttgggggcaacctcgggcgagcagtcttccaggccaagaagcgggttctcgaacctctcggtctggttgaggaaggcgctaagacggctcctgcaaagaagagaccggtagagccgtcacctcagcgttcccccgactcctccacgggcatcggcaagaaaggccagcagcccgccagaaagagactcaatttcggtcagactggcgactcagagtcagtccccgaccctcaacctctcggagaacctccagcagcgccctctagtgtgggatctggtacagtggctgcaggcggtggcgcaccaatggcagacaataacgaaggtgccgacggagtgggtaatgcctcaggaaattggcattgcgattccacatggctgggcgacagagtcattaccaccagcacccgaacctgggccctgcccacctacaacaaccacctctacaagcaaatctccagtgaaactgcaggtagtaccaacgacaacacctacttcggctacagcaccccctgggggtattttgactttaacagattccactgccacttctcaccacgtgactggcagcgactcatcaacaacaactggggattccggcccaagaagctgcggttcaagctcttcaacatccaggtcaaggaggtcacgacgaatgacggcgttacgaccatcgctaataaccttaccagcacgattcaggtattctcggactcggaataccagctgccgtacgtcctcggctctgcgcaccagggctgcctgcctccgttcccggcggacgtcttcatgattcctcagtacggctacctgactctcaacaatggcagtcagtctgtgggacgttcctccttctactgcctggagtacttcccctctcagatgctgagaacgggcaacaactttgagttcagctacagcttcgaggacgtgcctttccacagcagctacgcacacagccagagcctggaccggctgatgaatcccctcatcgaccagtacttgtactacctggccagaacacagagtaacccaggaggcacagctggcaatcgggaactgcagttttaccagggcgggccttcaactatggccgaacaagccaagaattggttacctggaccttgcttccggcaacaaagagtctccaaaacgctggatcaaaacaacaacagcaactttgcttggactggtgccaccaaatatcacctgaacggcagaaactcgttggttaatcccggcgtcgccatggcaactcacaaggacgacgaggaccgctttttcccatccagcggagtcctgatttttggaaaaactggagcaactaacaaaactacattggaaaatgtgttaatgacaaatgaagaagaaattcgtcctactaatcctgtagccacggaagaatacgggatagtcagcagcaacttacaagcggctaatactgcagcccagacacaagttgtcaacaaccagggagccttacctggcatggtctggcagaaccgggacgtgtacctgcagggtcccatctgggccaagattcctcacacggatggcaactttcacccgtctcctttgatgggcggctttggacttaaacatccgcctcctcagatcctgatcaagaacactcccgttcccgctaatcctccggaggtgtttactcctgccaagtttgcttcgttcatcacacagtacagcaccggacaagtcagcgtggaaatcgagtgggagctgcagaaggaaaacagcaagcgctggaacccggagattcagtacacctccaactttgaaaagcagactggtgtggactttgccgttgacagccagggtgtttactctgagcctcgccctattggcactcgttacctcacccgtaatctgtaa

SEQ ID NO: 105 - protein, 738 aa, Adeno-associated virus
MAADGYLPDWLEDNLSEGIREWWALKPGAPKPKANQQKQDDGRGLVLPGYKYLGPFNGLDKGEPVNAADAAALEHDKAYDQQLQAGDNPYLRYNHADAEFQERLQEDTSFGGNLGRAVFQAKKRVLEPLGLVEEGAKTAPGKKRPVEPSPQRSPDSSTGIGKKGQQPARKRLNFGQTGDSESVPDPQPLGEPPAAPSGVGPNTMAAGGGAPMADNNEGADGVGSSSGNWHCDSTWLGDRVITTSTRTWALPTYNNHLYKQISNGTSGGATNDNTYFGYSTPWGYFDFNRFHCHFSPRDWQRLINNNWGFRPKRLSFKLFNIQVKEVTQNEGTKTIANNLTSTIQVFTDSEYQLPYVLGSAHQGCLPPFPADVFMIPQYGYLTLNNGSQAVGRSSFYCLEYFPSQMLRTGNNFQFTYTFEDVPFHSSYAHSQSLDRLMNPLIDQYLYYLSRTQTTGGTANTQTLGFSQGGPNTMANQAKNWLPGPCYRQQRVSTTTGQNNNSNFAWTAGTKYHLNGRNSLANPGIAMATHKDDEERFFPSNGILIFGKQNAARDNADYSDVMLTSEEEIKTTNPVATEEYGIVADNLQQQNTAPQIGTVNSQGALPGMVWQNRDVYLQGPIWAKIPHTDGNFHPSPLMGGFGLKHPPPQILIKNTPVPADPPTTFNQSKLNSFITQYSTGQVSVEIEWELQKENSKRWNPEIQYTSNYYKSTSVDFAVNTEGVYSEPRPIGTRYLTRNL

SEQ ID NO: 106 - protein, 737 aa, Adeno-associated virus 7
MAADGYLPDWLEDNLSEGIREWWDLKPGAPKPKANQQKQDNGRGLVLPGYKYLGPFNGLDKGEPVNAADAAALEHDKAYDQQLKAGDNPYLRYNHADAEFQERLQEDTSFGGNLGRAVFQAKKRVLEPLGLVEEGAKTAPAKKRPVEPSPQRSPDSSTGIGKKGQQPARKRLNFGQTGDSESVPDPQPLGEPPAAPSSVGSGTVAAGGGAPMADNNEGADGVGNASGNWHCDSTWLGDRVITTSTRTWALPTYNNHLYKQISSETAGSTNDNTYFGYSTPWGYFDFNRFHCHFSPRDWQRLINNNWGFRPKKLRFKLFNIQVKEVTTNDGVTTIANNLTSTIQVFSDSEYQLPYVLGSAHQGCLPPFPADVFMIPQYGYLTLNNGSQSVGRSSFYCLEYFPSQMLRTGNNFEFSYSFEDVPFHSSYAHSQSLDRLMNPLIDQYLYYLARTQSNPGGTAGNRELQFYQGGPSTMAEQAKNWLPGPCFRQQRVSKTLDQNNNSNFAWTGATKYHLNGRNSLVNPGVAMATHKDDEDRFFPSSGVLIFGKTGATNKTTLENVLMTNEEEIRPTNPVATEEYGIVSSNLQAANTAAQTQVVNNQGALPGMVWQNRDVYLQGPIWAKIPHTDGNFHPSPLMGGFGLKHPPPQILIKNTPVPANPPEVFTPAKFASFITQYSTGQVSVEIEWELQKENSKRWNPEIQYTSNFEKQTGVDFAVDSQGVYSEPRPIGTRYLTRNL

SEQ ID NO: 107 - protein, 623 aa, Artificial Sequence
  Description of Artificial Sequence: Synthetic polypeptide
MPGFYEIVIKVPSDLDEHLPGISDSFVNWVAEKEWELPPDSDMDLNLIEQAPLTVAEKLQRDFLVQWRRVSKAPEALFFVQFEKGESYFHLHVLVETTGVKSMVLGRFLSQIREKLVQTIYRGVEPTLPNWFAVTKTRNGAGGGNKVVDECYIPNYLLPKTQPELQWAWTNMEEYISACLNLAERKRLVAQHLTHVSQTQEQNKENLNPNSDAPVIRSKTSARYMELVGWLVDRGITSEKQWIQEDQASYISFNAASNSRSQIKAALDNAGKIMALTKSAPDYLVGPSLPADIKTNRIYRILELNGYDPAYAGSVFLGWAQKKFGKRNTIWLFGPATTGKTNIAEAIAHAVPFYGCVNWTNENFPFNDCVDKMVIWWEEGKMTAKVVESAKAILGGSKVRVDQKCKSSAQIDPTPVIVTSNTNMCAVIDGNSTTFEHQQPLQDRMFKFELTRRLEHDFGKVTKQEVKEFFRWASDHVTEVAHEFYVRKGGASKRPAPDDADISEPKRACPSVADPSTSDAEGAPVDFADRYQNKCSRHAGMIQMLFPCKTCERMNQNFNICFTHGVRDCLECFPGVSESQPVVRKKTYRKLCAIHHLLGRAPEIACSACDLVNVDLDDCVSEQ

SEQ ID NO: 108 - DNA, 4721 bp, Adeno-associated virus 7
ttggccactccctctatgcgcgctcgctcgctcggtggggcctgcggaccaaaggtccgcagacggcagagctctgctctgccggccccaccgagcgagcgagcgcgcatagagggagtggccaactccatcactaggggtaccgcgaagcgcctcccacgctgccgcgtcagcgctgacgtaaatcacgtcataggggagtggtcctgtattagctgtcacgtgagtgcttttgcgacattttgcgacaccacgtggccatttgaggtatatatggccgagtgagcgagcaggatctccattttgaccgcgaaatttgaacgagcagcagccatgccgggtttctacgagatcgtgatcaaggtgccgagcgacctggacgagcacctgccgggcatttctgactcgtttgtgaactgggtggccgagaaggaatgggagctgcccccggattctgacatggatctgaatctgatcgagcaggcacccctgaccgtggccgagaagctgcagcgcgacttcctggtccaatggcgccgcgtgagtaaggccccggaggccctgttctttgttcagttcgagaagggcgagagctacttccaccttcacgttctggtggagaccacgggggtcaagtccatggtgctaggccgcttcctgagtcagattcgggagaagctggtccagaccatctaccgcggggtcgagcccacgctgcccaactggttcgcggtgaccaagacgcgtaatggcgccggcggggggaacaaggtggtggacgagtgctacatccccaactacctcctgcccaagacccagcccgagctgcagtgggcgtggactaacatggaggagtatataagcgcgtgtttgaacctggccgaacgcaaacggctcgtggcgcagcacctgacccacgtcagccagacgcaggagcagaacaaggagaatctgaaccccaattctgacgcgcccgtgatcaggtcaaaaacctccgcgcgctacatggagctggtcgggtggctggtggaccggggcatcacctccgagaagcagtggatccaggaggaccaggcctcgtacatctccttcaacgccgcctccaactcgcggtcccagatcaaggccgcgctggacaatgccggcaagatcatggcgctgaccaaatccgcgcccgactacctggtggggccctcgctgcccgcggacattaaaaccaaccgcatctaccgcatcctggagctgaacgggtacgatcctgcctacgccggctccgtctttctcggctgggcccagaaaaagttcgggaagcgcaacaccatctggctgtttgggcccgccaccaccggcaagaccaacattgcggaagccatcgcccacgccgtgcccttctacggctgcgtcaactggaccaatgagaactttcccttcaacgattgcgtcgacaagatggtgatctggtgggaggagggcaagatgacggccaaggtcgtggagtccgccaaggccattctcggcggcagcaaggtgcgcgtggaccaaaagtgcaagtcgtccgcccagatcgaccccacccccgtgatcgtcacctccaacaccaacatgtgcgccgtgattgacgggaacagcaccaccttcgagcaccagcagccgttgcaggaccggatgttcaaatttgaactcacccgccgtctggagcacgactttggcaaggtgacgaagcaggaagtcaaagagttcttccgctgggccagtgatcacgtgaccgaggtggcgcatgagttctacgtcagaaagggcggagccagcaaaagacccgcccccgatgacgcggatataagcgagcccaagcgggcctgcccctcagtcgcggatccatcgacgtcagacgcggaaggagctccggtggactttgccgacaggtaccaaaacaaatgttctcgtcacgcgggcatgattcagatgctgtttccctgcaaaacgtgcgagagaatgaatcagaatttcaacatttgcttcacacacggggtcagagactgtttagagtgtttccccggcgtgtcagaatctcaaccggtcgtcagaaaaaagacgtatcggaaactctgcgcgattcatcatctgctggggcgggcgcccgagattgcttgctcggcctgcgacctggtcaacgtggacctggacgactgcgtttctgagcaataaatgacttaaaccaggtatggctgccgatggttatcttccagattggctcgaggacaacctctctgagggcattcgcgagtggtgggacctgaaacctggagccccgaaacccaaagccaaccagcaaaagcaggacaacggccggggtctggtgcttcctggctacaagtacctcggacccttcaacggactcgacaagggggagcccgtcaacgcggcggacgcagcggccctcgagcacgacaaggcctacgaccagcagctcaaagcgggtgacaatccgtacctgcggtataaccacgccgacgccgagtttcaggagcgtctgcaagaagatacgtcatttgggggcaacctcgggcgagcagtcttccaggccaagaagcgggttctcgaacctctcggtctggttgaggaaggcgctaagacggctcctgcaaagaagagaccggtagagccgtcacctcagcgttcccccgactcctccacgggcatcggcaagaaaggccagcagcccgccagaaagagactcaatttcggtcagactggcgactcagagtcagtccccgaccctcaacctctcggagaacctccagcagcgccctctagtgtgggatctggtacagtggctgcaggcggtggcgcaccaatggcagacaataacgaaggtgccgacggagtgggtaatgcctcaggaaattggcattgcgattccacatggctgggcgacagagtcattaccaccagcacccgaacctgggccctgcccacctacaacaaccacctctacaagcaaatctccagtgaaactgcaggtagtaccaacgacaacacctacttcggctacagcaccccctgggggtattttgactttaacagattccactgccacttctcaccacgtgactggcagcgactcatcaacaacaactggggattccggcccaagaagctgcggttcaagctcttcaacatccaggtcaaggaggtcacgacgaatgacggcgttacgaccatcgctaataaccttaccagcacgattcaggtattctcggactcggaataccagctgccgtacgtcctcggctctgcgcaccagggctgcctgcctccgttcccggcggacgtcttcatgattcctcagtacggctacctgactctcaacaatggcagtcagtctgtgggacgttcctccttctactgcctggagtacttcccctctcagatgctgagaacgggcaacaactttgagttcagctacagcttcgaggacgtgcctttccacagcagctacgcacacagccagagcctggaccggctgatgaatcccctcatcgaccagtacttgtactacctggccagaacacagagtaacccaggaggcacagctggcaatcgggaactgcagttttaccagggcgggccttcaactatggccgaacaagccaagaattggttacctggaccttgcttccggcaacaaagagtctccaaaacgctggatcaaaacaacaacagcaactttgcttggactggtgccaccaaatatcacctgaacggcagaaactcgttggttaatcccggcgtcgccatggcaactcacaaggacgacgaggaccgctttttcccatccagcggagtcctgatttttggaaaaactggagcaactaacaaaactacattggaaaatgtgttaatgacaaatgaagaagaaattcgtcctactaatcctgtagccacggaagaatacgggatagtcagcagcaacttacaagcggctaatactgcagcccagacacaagttgtcaacaaccagggagccttacctggcatggtctggcagaaccgggacgtgtacctgcagggtcccatctgggccaagattcctcacacggatggcaactttcacccgtctcctttgatgggcggctttggacttaaacatccgcctcctcagatcctgatcaagaacactcccgttcccgctaatcctccggaggtgtttactcctgccaagtttgcttcgttcatcacacagtacagcaccggacaagtcagcgtggaaatcgagtgggagctgcagaaggaaaacagcaagcgctggaacccggagattcagtacacctccaactttgaaaagcagactggtgtggactttgccgttgacagccagggtgtttactctgagcctcgccctattggcactcgttacctcacccgtaatctgtaattgcatgttaatcaataaaccggttgattcgtttcagttgaactttggtctcctgtgcttcttatcttatcggtttccatagcaactggttacacattaactgcttgggtgcgcttcacgataagaacactgacgtcaccgcggtacccctagtgatggagttggccactccctctatgcgcgctcgctcgctcggtggggcctgcggaccaaaggtccgcagacggcagagctctgctctgccggccccaccgagcgagcgagcgcgcatagagggagtggccaa

SEQ ID NO: 109 - DNA, 2214 bp, Adeno-associated virus; identical to SEQ ID NO: 104

SEQ ID NO: 110 - protein, 737 aa, Adeno-associated virus; identical to SEQ ID NO: 106

SEQ ID NO: 111 - DNA, 2217 bp, Adeno-associated virus
atggctgccgatggttatcttccagattggctcgaggacaacctctctgagggcattcgcgagtggtgggcgctgaaacctggagccccgaagcccaaagccaaccagcaaaagcaggacgacggccggggtctggtgcttcctggctacaagtacctcggacccttcaacggactcgacaagggggagcccgtcaacgcggcggacgcagcggccctcgagcacgacaaggcctacgaccagcagctgcaggcgggtgacaatccgtacctgcggtataaccacgccgacgccgagtttcaggagcgtctgcaagaagatacgtcttttgggggcaacctcgggcgagcagtcttccaggccaagaagcgggttctcgaacctctcggtctggttgaggaaggcgctaagacggctcctggaaagaagagaccggtagagccatcaccccagcgttctccagactcctctacgggcatcggcaagaaaggccaacagcccgccagaaaaagactcaattttggtcagactggcgactcagagtcagttccagaccctcaacctctcggagaacctccagcagcgccctctggtgtgggacctaatacaatggctgcaggcggtggcgcaccaatggcagacaataacgaaggcgccgacggagtgggtagttcctcgggaaattggcattgcgattccacatggctgggcgacagagtcatcaccaccagcacccgaacctgggccctgcccacctacaacaaccacctctacaagcaaatctccaacgggacatcgggaggagccaccaacgacaacacctacttcggctacagcaccccctgggggtattttgactttaacagattccactgccacttttcaccacgtgactggcagcgactcatcaacaacaactggggattccggcccaagagactcagcttcaagctcttcaacatccaggtcaaggaggtcacgcagaatgaaggcaccaagaccatcgccaataacctcaccagcaccatccaggtgtttacggactcggagtaccagctgccgtacgttctcggctctgcccaccagggctgcctgcctccgttcccggcggacgtgttcatgattccccagtacggctacctaacactcaacaacggtagtcaggccgtgggacgctcctccttctactgcctggaatactttccttcgcagatgctgagaaccggcaacaacttccagtttacttacaccttcgaggacgtgcctttccacagcagctacgcccacagccagagcttggaccggctgatgaatcctctgattgaccagtacctgtactacttgtctcggactcaaacaacaggaggcacggcaaatacgcagactctgggcttcagccaaggtgggcctaatacaatggccaatcaggcaaagaactggctgccaggaccctgttaccgccaacaacgcgtctcaacgacaaccgggcaaaacaacaatagcaactttgcctggactgctgggaccaaataccatctgaatggaagaaattcattggctaatcctggcatcgctatggcaacacacaaagacgacgaggagcgtttttttcccagtaacgggatcctgatttttggcaaacaaaatgctgccagagacaatgcggattacagcgatgtcatgctcaccagcgaggaagaaatcaaaaccactaaccctgtggctacagaggaatacggtatcgtggcagataacttgcagcagcaaaacacggctcctcaaattggaactgtcaacagccagggggccttacccggtatggtctggcagaaccgggacgtgtacctgcagggtcccatctgggccaagattcctcacacggacggcaacttccacccgtctccgctgatgggcggctttggcctgaaacatcctccgcctcagatcctgatcaagaacacgcctgtacctgcggatcctccgaccaccttcaaccagtcaaagctgaactctttcatcacgcaatacagcaccggacaggtcagcgtggaaattgaatgggagctgcagaaggaaaacagcaagcgctggaaccccgagatccagtacacctccaactactacaaatctacaagtgtggactttgctgttaatacagaaggcgtgtactctgaaccccgccccattggcacccgttacctcacccgtaatctgtaa

SEQ ID NO: 112 - DNA, 2213 bp, Adeno-associated virus 8
atggctgccgatggttatcttccagattggctcgaggacaacctctctgagggcattcgcgagtggtgggcgctgaaacctggagccccgaagcccaaagccaaccagcaaaagcaggacgacggccggggtctggtgcttcctggctacaagtacctcggacccttcaacggactcgacaagggggagcccgtcaacgcggcggacgcagcggccctcgagcacgacaaggcctacgaccagcagctgcaggcgggtgacaatccgtacctgcggtataaccacgccgacgccgagtttcaggagcgtctgcaagaagatacgtcttttgggggcaacctcgggcgagcagtcttccaggccaagaagcgggttctcgaacctctcggtctggttgaggaaggcgctaagacggctcctggaaagaagagaccggtagagccatcaccccagcgttctccagactcctctacgggcatcggcaagaaaggccaacagcccgccagaaaaagactcaattttggtcagactggcgactcagagtcagttccagaccctcaacctctcggagaacctccagcagcgccctctggtgtgggacctaatacaatggctgcaggcggtggcgcaccaatggcagacaataacgaaggcgccgacggagtgggtagttcctcgggaaattggcattgcgattccacatggctgggcgacagagtcatcaccaccagcacccgaacctgggccctgcccacctacaacaaccacctctacaagcaaatctccaacgggacatcgggaggagccaccaacgacaacacctacttcggctacagcaccccctgggggtattttgactttaacagattccactgccacttttcaccacgtgactggcagcgactcatcaacaacaactggggattccggcccaagagactcagcttcaagctcttcaacatccaggtcaaggaggtcacgcagaatgaaggcaccaagaccatcgccaataacctcaccagcaccatccaggtgtttacggactcggagtaccagctgccgtacgttctcggctctgcccaccagggctgcctgcctccgttcccggcggacgtgttcatgattccccagtacggctacctaacactcaacaacggtagtcaggccgtgggacgctcctccttctactgcctggaatactttccttcgcagatgctgagaaccggcaacaacttccagtttacttacaccttcgaggacgtgcctttccacagcagctacgcccacagccagagcttggaccggctgatgaatcctctgattgaccagtacctgtactacttgtctcggactcaaacaacaggaggcacggcaaatacgcagactctgggcttcagccaaggtgggcctaatacaatggccaatcaggcaaagaactggctgccaggaccctgttaccgccaacaacgcgtctcaacgacaaccgggcaaaacaacaatagcaactttgcctggactgctgggaccaaataccatctgaatggaagaaattcattggctaatcctggcatcgctatggcaacacacaaagacgacgaggagcgtttttttcccagtaacgggatcctgatttttggcaaacaaaatgctgccagagacaatgcggattacagcgatgtcatgctcaccagcgaggaagaaatcaaaaccactaaccctgtggctacagaggaatacggtatcgtggcagataacttgcagcagcaaaacacggctcctcaaattggaactgtcaacagccagggggccttacccggtatggtctggcagaaccgggacgtgtacctgcagggtcccatctgggccaagattcctcacacggacggcaacttccacccgtctccgctgatgggcggctttggcctgaaacatcctccgcctcagatcctgatcaagaacacgcctgtacctgcggatcctccgaccaccttcaaccagtcaaagctgaactctttcatcacgcaatacagcaccggacaggtcagcgtggaaattgaatgggagctgcagaaggaaaacagcaagcgctggaaccccgagatccagtacacctccaactactacaaatctacaagtgtggactttgctgtaatacagaaggcgtgtactctgaaccccgccccattggcacccgttacctcacccgtaatctg

SEQ ID NO: 113 - DNA, 4393 bp, Adeno-associated virus 8
cagagagggagtggccaactccatcactaggggtagcgcgaagcgcctcccacgctgccgcgtcagcgctgacgtaaattacgtcataggggagtggtcctgtattagctgtcacgtgagtgcttttgcggcattttgcgacaccacgtggccatttgaggtatatatggccgagtgagcgagcaggatctccattttgaccgcgaaatttgaacgagcagcagccatgccgggcttctacgagatcgtgatcaaggtgccgagcgacctggacgagcacctgccgggcatttctgactcgtttgtgaactgggtggccgagaaggaatgggagctgcccccggattctgacatggatcggaatctgatcgagcaggcacccctgaccgtggccgagaagctgcagcgcgacttcctggtccaatggcgccgcgtgagtaaggccccggaggccctcttctttgttcagttcgagaagggcgagagctactttcacctgcacgttctggtcgagaccacgggggtcaagtccatggtgctaggccgcttcctgagtcagattcgggaaaagcttggtccagaccatctacccgcggggtcgagccccaccttgcccaactggttcgcggtgaccaaagacgcggtaatggcgccggcgggggggaacaaggtggtggacgagtgctacatccccaactacctcctgcccaagactcagcccgagctgcagtgggcgtggactaacatggaggagtatataagcgcgtgcttgaacctggccgagcgcaaacggctcgtggcgcagcacctgacccacgtcagccagacgcaggagcagaacaaggagaatctgaaccccaattctgacgcgcccgtgatcaggtcaaaaacctccgcgcgctatatggagctggtcgggtggctggtggaccggggcatcacctccgagaagcagtggatccaggaggaccaggcctcgtacatctccttcaacgccgcctccaactcgcggtcccagatcaaggccgcgctggacaatgccggcaagatcatggcgctgaccaaatccgcgcccgactacctggtggggccctcgctgcccgcggacattacccagaaccgcatctaccgcatcctcgctctcaacggctacgaccctgcctacgccggctccgtctttctcggctgggctcagaaaaagttcgggaaacgcaacaccatctggctgtttggacccgccaccaccggcaagaccaacattgcggaagccatcgcccacgccgtgcccttctacggctgcgtcaactggaccaatgagaactttcccttcaatgattgcgtcgacaagatggtgatctggtgggaggagggcaagatgacggccaaggtcgtggagtccgccaaggccattctcggcggcagcaaggtgcgcgtggaccaaaagtgcaagtcgtccgcccagatcgaccccacccccgtgatcgtcacctccaacaccaacatgtgcgccgtgattgacgggaacagcaccaccttcgagcaccagcagcctctccaggaccggatgtttaagttcgaactcacccgccgtctggagcacgactttggcaaggtgacaaagcaggaagtcaaagagttcttccgctgggccagtgatcacgtgaccgaggtggcgcatgagttttacgtcagaaagggcggagccagcaaaagacccgcccccgatgacgcggataaaagcgagcccaagcgggcctgcccctcagtcgcggatccatcgacgtcagacgcggaaggagctccggtggactttgccgacaggtaccaaaacaaatgttctcgtcacgcgggcatgcttcagatgctgtttccctgcaaaacgtgcgagagaatgaatcagaatttcaacatttgcttcacacacggggtcagagactgctcagagtgtttccccggcgtgtcagaatctcaaccggtcgtcagaaagaggacgtatcggaaactctgtgcgattcatcatctgctggggcgggctcccgagattgcttgctcggcctgcgatctggtcaacgtggacctggatgactgtgtttctgagcaataaatgacttaaaccaggtatggctgccgatggttatcttccagattggctcgaggacaacctctctgagggcattcgcgagtggtgggcgctgaaacctggagccccgaagcccaaagccaaccagcaaaagcaggacgacggccggggtctggtgcttcctggctacaagtacctcggacccttcaacggactcgacaagggggagcccgtcaacgcggcggacgcagcggccctcgagcacgacaaggcctacgaccagcagctgcaggcgggtgacaatccgtacctgcggtataaccacgccgacgccgagtttcaggagcgtctgcaagaagatacgtcttttgggggcaacctcgggcgagcagtcttccaggccaagaagcgggttctcgaacctctcggtctggttgaggaaggcgctaagacggctcctggaaagaagagaccggtagagccatcaccccagcgttctccagactcctctacgggcatcggcaagaaaggccaacagcccgccagaaaaagactcaattttggtcagactggcgactcagagtcagttccagaccctcaacctctcggagaacctccagcagcgccctctggtgtgggacctaatacaatggctgcaggcggtggcgcaccaatggcagacaataacgaaggcgccgacggagtgggtagttcctcgggaaattggcattgcgattccacatggctgggcgacagagtcatcaccaccagcacccgaacctgggccctgcccacctacaacaaccacctctacaagcaaatctccaacgggacatcgggaggagccaccaacgacaacacctacttcggctacagcaccccctgggggtattttgactttaacagattccactgccacttttcaccacgtgactggcagcgactcatcaacaacaactggggattccggcccaagagactcagcttcaagctcttcaacatccaggtcaaggaggtcacgcagaatgaaggcaccaagaccatcgccaataacctcaccagcaccatccaggtgtttacggactcggagtaccagctgccgtacgttctcggctctgcccaccagggctgcctgcctccgttcccggcggacgtgttcatgattccccagtacggctacctaacactcaacaacggtagtcaggccgtgggacgctcctccttctactgcctggaatactttccttcgcagatgctgagaaccggcaacaacttccagtttacttacaccttcgaggacgtgcctttccacagcagctacgcccacagccagagcttggaccggctgatgaatcctctgattgaccagtacctgtactacttgtctcggactcaaacaacaggaggcacggcaaatacgcagactctgggcttcagccaaggtgggcctaatacaatggccaatcaggcaaagaactggctgccaggaccctgttaccgccaacaacgcgtctcaacgacaaccgggcaaaacaacaatagcaactttgcctggactgctgggaccaaataccatctgaatggaagaaattcattggctaatcctggcatcgctatggcaacacacaaagacgacgaggagcgtttttttcccagtaacgggatcctgatttttggcaaacaaaatgctgccagagacaatgcggattacagcgatgtcatgctcaccagcgaggaagaaatcaaaaccactaaccctgtggctacagaggaatacggtatcgtggcagataacttgcagcagcaaaacacggctcctcaaattggaactgtcaacagccagggggccttacccggtatggtctggcagaaccgggacgtgtacctgcagggtcccatctgggccaagattcctcacacggacggcaacttccacccgtctccgctgatgggcggctttggcctgaaacatcctccgcctcagatcctgatcaagaacacgcctgtacctgcggatcctccgaccaccttcaaccagtcaaagctgaactctttcatcacgcaatacagcaccggacaggtcagcgtggaaattgaatgggagctgcagaaggaaaacagcaagcgctggaaccccgagatccagtacacctccaactactacaaatctacaagtgtggactttgctgttaatacagaaggcgtgtactctgaaccccgccccattggcacccgttacctcacccgtaatctgtaattgcctgttaatcaataaaccggttgattcgtttcagttgaactttggtctctgcg

SEQ ID NO: 114 - protein, 738 aa, Adeno-associated virus 8; identical to SEQ ID NO: 105

SEQ ID NO: 115 - protein, 737 aa, Adeno-associated virus 8
MAADGYLPDWLEDNLSEGIREWWALKPGAPKPKANQQKQDDGRGLVLPGYKYLGPFNGLDKGEPVNAADAAALEHDKAYDQQLQAGDNPYLRYNHADAEFQERLQEDTSFGGNLGRAVFQAKKRVLEPLGLVEEGAKTAPGKKRPVEPSPQRSPDSSTGIGKKGQQPARKRLNFGQTGDSESVPDPQPLGEPPAAPSGVGPNTMAAGGGAPMADNNEGADGVGSSSGNWHCDSTWLGDRVITTSTRTWALPTYNNHLYKQISNGTSGGATNDNTYFGYSTPWGYFDFNRFHCHFSPRDWQRLINNNWGFRPKRLSFKLFNIQVKEVTQNEGTKTIANNLTSTIQVFTDSEYQLPYVLGSAHQGCLPPFPADVFMIPQYGYLTLNNGSQAVGRSSFYCLEYFPSQMLRTGNNFQFTYTFEDVPFHSSYAHSQSLDRLMNPLIDQYLYYLSRTQTTGGTANTQTLGFSQGGPNTMANQAKNWLPGPCYRQQRVSTTTGQNNNSNFAWTAGTKYHLNGRNSLANPGIAMATHKDDEERFFPSNGILIFGKQNAARDNADYSDVMLTSEEEIKTTNPVATEEYGIVADNLQQQNTAPQIGTVNSQGALPGMVWQNRDVYLQGPIWAKIPHTDGNFHPSPLMGGFGLKHPPPQILIKNTPVPADPPTTFNQSKLNSFITQYSTGQVSVEIEWELQKENSKRWNPEIQYTSNYYKSTSVDFAVIQKACTLNPAPLAPVTSPVI

SEQ ID NO: 116 - DNA, 2217 bp, Adeno-associated virus; identical to SEQ ID NO: 111

SEQ ID NO: 117 - DNA, 2214 bp, Artificial Sequence
  Description of Artificial Sequence: Synthetic polynucleotide
atggctgccgatggttatcttccagattggctcgaggacaacctctctgagggcattcgcgagtggtgggcgctgaaacctggagccccgaagcccaaagccaaccagcaaaagcaggacgacggccggggtctggtgcttcctggctacaagtacctcggacccttcaacggactcgacaagggggagcccgtcaacgcggcggacgcagcggccctcgagcacgacaaggcctacgaccagcagctgcaggcgggtgacaatccgtacctgcggtataaccacgccgacgccgagtttcaggagcgtctgcaagaagatacgtcttttgggggcaacctcgggcgagcagtcttccaggccaagaagcgggttctcgaacctctcggtctggttgaggaaggcgctaagacggctcctggaaagaagagaccggtagagccatcaccccagcgttctccagactcctctacgggcatcggcaagaaaggccaacagcccgccagaaaaagactcaattttggtcagactggcgactcagagtcagttccagaccctcaacctctcggagaacctccagcagcgccctctggtgtgggacctaatacaatggctgcaggcggtggcgcaccaatggcagacaataacgaaggcgccgacggagtgggtagttcctcgggaaattggcattgcgattccacatggctgggcgacagagtcatcaccaccagcacccgaacctgggccctgcccacctacaacaaccacctctacaagcaaatctccaacgggacatcgggaggagccaccaacgacaacacctacttcggctacagcaccccctgggggtattttgactttaacagattccactgccacttttcaccacgtgactggcagcgactcatcaacaacaactggggattccggcccaagagactcagcttcaagctcttcaacatccaggtcaaggaggtcacgcagaatgaaggcaccaagaccatcgccaataacctcaccagcaccatccaggtgtttacggactcggagtaccagctgccgtacgttctcggctctgcccaccagggctgcctgcctccgttcccggcggacgtgttcatgattccccagtacggctacctaacactcaacaacggtagtcaggccgtgggacgctcctccttctactgcctggaatactttccttcgcagatgctgagaaccggcaacaacttccagtttacttacaccttcgaggacgtgcctttccacagcagctacgcccacagccagagcttggaccggctgatgaatcctctgattgaccagtacctgtactacttgtctcggactcaaacaacaggaggcacggcaaatacgcagactctgggcttcagccaaggtgggcctaatacaatggccaatcaggcaaagaactggctgccaggaccctgttaccgccaacaacgcgtctcaacgacaaccgggcaaaacaacaatagcaactttgcctggactgctgggaccaaataccatctgaatggaagaaattcattggctaatcctggcatcgctatggcaacacacaaagacgacgaggagcgtttttttcccagtaacgggatcctgatttttggcaaacaaaatgctgccagagacaatgcggattacagcgatgtcatgctcaccagcgaggaagaaatcaaaaccactaaccctgtggctacagaggaatacggtatcgtggcagataacttgcctgagcggacggcgatgagtcttccgggaactgtcaacagccagggggccttacccggtatggtctggcagaaccgggacgtgtacctgcagggtcccatctgggccaagattcctcacacggacggcaacttccacccgtctccgctgatgggcggctttggcctgaaacatcctccgcctcagatcctgatcaagaacacgcctgtacctgcggatcctccgaccaccttcaaccagtcaaagctgaactctttcatcacgcaatacagcaccggacaggtcagcgtggaaattgaatgggagctgcagaaggaaaacagcaagcgctggaaccccgagatccagtacacctccaactactacaaatctacaagtgtggactttgctgttaatacagaaggcgtgtactctgaaccccgccccattggcacccgttacctcacccgtaatctg

SEQ ID NO: 118 - protein, 738 aa, Artificial Sequence
  Description of Artificial Sequence: Synthetic polypeptide
MAADGYLPDWLEDNLSEGIREWWALKPGAPKPKANQQKQDDGRGLVLPGYKYLGPFNGLDKGEPVNAADAAALEHDKAYDQQLQAGDNPYLRYNHADAEFQERLQEDTSFGGNLGRAVFQAKKRVLEPLGLVEEGAKTAPGKKRPVEPSPQRSPDSSTGIGKKGQQPARKRLNFGQTGDSESVPDPQPLGEPPAAPSGVGPNTMAAGGGAPMADNNEGADGVGSSSGNWHCDSTWLGDRVITTSTRTWALPTYNNHLYKQISNGTSGGATNDNTYFGYSTPWGYFDFNRFHCHFSPRDWQRLINNNWGFRPKRLSFKLFNIQVKEVTQNEGTKTIANNLTSTIQVFTDSEYQLPYVLGSAHQGCLPPFPADVFMIPQYGYLTLNNGSQAVGRSSFYCLEYFPSQMLRTGNNFQFTYTFEDVPFHSSYAHSQSLDRLMNPLIDQYLYYLSRTQTTGGTANTQTLGFSQGGPNTMANQAKNWLPGPCYRQQRVSTTTGQNNNSNFAWTAGTKYHLNGRNSLANPGIAMATHKDDEERFFPSNGILIFGKQNAARDNADYSDVMLTSEEEIKTTNPVATEEYGIVADNLPERTAMSLPGTVNSQGALPGMVWQNRDVYLQGPIWAKIPHTDGNFHPSPLMGGFGLKHPPPQILIKNTPVPADPPTTFNQSKLNSFITQYSTGQVSVEIEWELQKENSKRWNPEIQYTSNYYKSTSVDFAVNTEGVYSEPRPIGTRYLTRNL

SEQ ID NO: 119 - DNA, 2214 bp, Artificial Sequence
  Description of Artificial Sequence: Synthetic polynucleotide
atggctgccgatggttatcttccagattggctcgaggacaacctctctgagggcattcgcgagtggtgggcgctgaaacctggagccccgaagcccaaagccaaccagcaaaagcaggacgacggccggggtctggtgcttcctggctacaagtacctcggacccttcaacggactcgacaagggggagcccgtcaacgcggcggacgcagcggccctcgagcacgacaaggcctacgaccagcagctgcaggcgggtgacaatccgtacctgcggtataaccacgccgacgccgagtttcaggagcgtctgcaagaagatacgtcttttgggggcaacctcgggcgagcagtcttccaggccaagaagcgggttctcgaacctctcggtctggttgaggaaggcgctaagacggctcctggaaagaagagaccggtagagccatcaccccagcgttctccagactcctctacgggcatcggcaagaaaggccaacagcccgccagaaaaagactcaattttggtcagactggcgactcagagtcagttccagaccctcaacctctcggagaacctccagcagcgccctctggtgtgggacctaatacaatggctgcaggcggtggcgcaccaatggcagacaataacgaaggcgccgacggagtgggtagttcctcgggaaattggcattgcgattccacatggctgggcgacagagtcatcaccaccagcacccgaacctgggccctgcccacctacaacaaccacctctacaagcaaatctccaacgggacatcgggaggagccaccaacgacaacacctacttcggctacagcaccccctgggggtattttgactttaacagattccactgccacttttcaccacgtgactggcagcgactcatcaacaacaactggggattccggcccaagagactcagcttcaagctcttcaacatccaggtcaaggaggtcacgcagaatgaaggcaccaagaccatcgccaataacctcaccagcaccatccaggtgtttacggactcggagtaccagctgccgtacgttctcggctctgcccaccagggctgcctgcctccgttcccggcggacgtgttcatgattccccagtacggctacctaacactcaacaacggtagtcaggccgtgggacgctcctccttctactgcctggaatactttccttcgcagatgctgagaaccggcaacaacttccagtttacttacaccttcgaggacgtgcctttccacagcagctacgcccacagccagagcttggaccggctgatgaatcctctgattgaccagtacctgtactacttgtctcggactcaaacaacaggaggcacggcaaatacgcagactctgggcttcagccaaggtgggcctaatacaatggccaatcaggcaaagaactggctgccaggaccctgttaccgccaacaacgcgtctcaacgacaaccgggcaaaacaacaatagcaactttgcctggactgctgggaccaaataccatctgaatggaagaaattcattggctaatcctggcatcgctatggcaacacacaaagacgacgaggagcgtttttttcccagtaacgggatcctgatttttggcaaacaaaatgctgccagagacaatgcggattacagcgatgtcatgctcaccagcgaggaagaaatcaaaaccactaaccctgtggctacagaggaatacggtatcgtggcagataacttgagttttagtcgtgcggttctttgtgatggaactgtcaacagccagggggccttacccggtatggtctggcagaaccgggacgtgtacctgcagggtcccatctgggccaagattcctcacacggacggcaacttccacccgtctccgctgatgggcggctttggcctgaaacatcctccgcctcagatcctgatcaagaacacgcctgtacctgcggatcctccgaccaccttcaaccagtcaaagctgaactctttcatcacgcaatacagcaccggacaggtcagcgtggaaattgaatgggagctgcagaaggaaaacagcaagcgctggaaccccgagatccagtacacctccaactactacaaatctacaagtgtggactttgctgttaatacagaaggcgtgtactctgaaccccgccccattggcacccgttacctcacccgtaatctg

SEQ ID NO: 120 - protein, 738 aa, Artificial Sequence
  Description of Artificial Sequence: Synthetic polypeptide
MAADGYLPDWLEDNLSEGIREWWALKPGAPKPKANQQKQDDGRGLVLPGYKYLGPFNGLDKGEPVNAADAAALEHDKAYDQQLQAGDNPYLRYNHADAEFQERLQEDTSFGGNLGRAVFQAKKRVLEPLGLVEEGAKTAPGKKRPVEPSPQRSPDSSTGIGKKGQQPARKRLNFGQTGDSESVPDPQPLGEPPAAPSGVGPNTMAAGGGAPMADNNEGADGVGSSSGNWHCDSTWLGDRVITTSTRTWALPTYNNHLYKQISNGTSGGATNDNTYFGYSTPWGYFDFNRFHCHFSPRDWQRLINNNWGFRPKRLSFKLFNIQVKEVTQNEGTKTIANNLTSTIQVFTDSEYQLPYVLGSAHQGCLPPFPADVFMIPQYGYLTLNNGSQAVGRSSFYCLEYFPSQMLRTGNNFQFTYTFEDVPFHSSYAHSQSLDRLMNPLIDQYLYYLSRTQTTGGTANTQTLGFSQGGPNTMANQAKNWLPGPCYRQQRVSTTTGQNNNSNFAWTAGTKYHLNGRNSLANPGIAMATHKDDEERFFPSNGILIFGKQNAARDNADYSDVMLTSEEEIKTTNPVATEEYGIVADNLSFSRAVLCDGTVNSQGALPGMVWQNRDVYLQGPIWAKIPHTDGNFHPSPLMGGFGLKHPPPQILIKNTPVPADPPTTFNQSKLNSFITQYSTGQVSVEIEWELQKENSKRWNPEIQYTSNYYKSTSVDFAVNTEGVYSEPRPIGTRYLTRNL

SEQ ID NO: 121 - DNA, 4385 bp, Adeno-associated virus 9
cagagagggagtggccaactccatcactaggggtaatcgcgaagcgcctcccacgctgccgcgtcagcgctgacgtagattacgtcataggggagtggtcctgtattagctgtcacgtgagtgcttttgcgacattttgcgacaccacatggccatttgaggtatatatggccgagtgagcgagcaggatctccattttgaccgcgaaatttgaacgagcagcagccatgccgggcttctacgagattgtgatcaaggtgccgagcgacctggacgagcacctgccgggcatttctgactcttttgtgaactgggtggccgagaaggaatgggagctgcccccggattctgacatggatcggaatctgatcgagcaggcacccctgaccgtggccgagaagctgcagcgcgacttcctggtccaatggcgccgcgtgagtaaggccccggaggccctcttctttgttcagttcgagaagggcgagagctactttcacctgcacgttctggtcgagaccacgggggtcaagtccatggtgctaggccgcttcctgagtcagattcgggagaagctggtccagaccatctaccgcgggatcgagccgaccctgcccaactggttcgcggtgaccaagacgcgtaatggcgccggcggggggaacaaggtggtggacgagtgctacatccccaactacctcctgcccaagactcagcccgagctgcagtgggcgtggactaacatggaggagtatataagcgcgtgcttgaacctggccgagcgcaaacggctcgtggcgcagcacctgacccacgtcagccagacgcaggagcagaacaaggagaatctgaaccccaattctgacgcgcccgtgatcaggtcaaaaacctccgcgcgctacatggagctggtcgggtggctggtggaccggggcatcacctccgagaagcagtggatccaggaggaccaggcctcgtacatctccttcaacgccgcctccaactcgcggtcccagatcaaggccgcgctggacaatgccggcaagatcatggcgctgaccaaatccgcgcccgactacctggtaggcccttcacttccggtggacattacgcagaaccgcatctaccgcatcctgcagctcaacggctacgaccctgcctacgccggctccgtctttctcggctgggcacaaaagaagttcgggaaacgcaacaccatctggctgtttgggccggccaccacgggaaagaccaacatcgcagaagccattgcccacgccgtgcccttctacggctgcgtcaactggaccaatgagaactttcccttcaacgattgcgtcgacaagatggtgatctggtgggaggagggcaagatgacggccaaggtcgtggagtccgccaaggccattctcggcggcagcaaggtgcgcgtggaccaaaagtgcaagtcgtccgcccagatcgaccccactcccgtgatcgtcacctccaacaccaacatgtgcgccgtgattgacgggaacagcaccaccttcgagcaccagcagcctctccaggaccggatgtttaagttcgaactcacccgccgtctggagcacgactttggcaaggtgacaaagcaggaagtcaaagagttcttccgctgggccagtgatcacgtgaccgaggtggcgcatgagttttacgtcagaaagggcggagccagcaaaagacccgcccccgatgacgcggataaaagcgagcccaagcgggcctgcccctcagtcgcggatccatcgacgtcagacgcggaaggagctccggtggactttgccgacaggtaccaaaacaaatgttctcgtcacgcgggcatgcttcagatgctgcttccctgcaaaacgtgcgagagaatgaatcagaatttcaacatttgcttcacacacggggtcagagactgctcagagtgtttccccggcgtgtcagaatctcaaccggtcgtcagaaagaggacgtatcggaaactctgtgcgattcatcatctgctggggcgggctcccgagattgcttgctcggcctgcgatctggtcaacgtggacctggatgactgtgtttctgagcaataaatgacttaaaccaggtatggctgccgatggttatcttccagattggctcgaggacaacctctctgagggcattcgcgagtggtgggcgctgaaacctggagccccgaagcccaaagccaaccagcaaaagcaggacgacggccggggtctggtgcttcctggctacaagtacctcggacccttcaacggactcgacaagggggagcccgtcaacgcggcggacgcagcggccctcgagcacggcaaggcctacgaccagcagctgcaggcgggtgacaatccgtacctgcggtataaccacgccgacgccgagtttcaggagcgtctgcaagaagatacgtcttttgggggcaacctcgggcgagcagtcttccaggccaagaagcgggttctcgaacctctcggtctggttgaggaaggcgctaagacggctcctggaaagaagagaccggtagagccatcaccccagcgttctccagactcctctacgggcatcggcaagaaaggccaacagcccgccagaaaaagactcaattttggtcagactggcgactcagagtcagttccagaccctcaacctctcggagaacctccagcagcgccctctggtgtgggacctaatacaatggctgcaggcggtggcgcaccaatggcagacaataacgaaggcgccgacggagtgggtaattcctcgggaaattggcattgcgattccacatggctgggggacagagtcatcaccaccagcacccgaacctgggcattgcccacctacaacaaccacctctacaagcaaatctccaatggaacatcgggaggaagcaccaacgacaacacctactttggctacagcaccccctgggggtattttgacttcaacagattccactgccacttctcaccacgtgactggcagcgactcatcaacaacaactggggattccggccaaagagactcaacttcaagctgttcaacatccaggtcaaggaggttacgacgaacgaaggcaccaagaccatcgccaataaccttaccagcaccgtccaggtctttacggactcggagtaccagctaccgtacgtcctaggctctgcccaccaaggatgcctgccaccgtttcctgcagacgtcttcatggttcctcagtacggctacctgacgctcaacaatggaagtcaagcgttaggacgttcttctttctactgtctggaatacttcccttctcagatgctgagaaccggcaacaactttcagttcagctacactttcgaggacgtgcctttccacagcagctacgcacacagccagagtctagatcgactgatgaaccccctcatcgaccagtacctatactacctggtcagaacacagacaactggaactgggggaactcaaactttggcattcagccaagcaggccctagctcaatggccaatcaggctagaaactgggtacccgggccttgctaccgtcagcagcgcgtctccacaaccaccaaccaaaataacaacagcaactttgcgtggacgggagctgctaaattcaagctgaacgggagagactcgctaatgaatcctggcgtggctatggcatcgcacaaagacgacgaggaccgcttctttccatcaagtggcgttctcatatttggcaagcaaggagccgggaacgatggagtcgactacagccaggtgctgattacagatgaggaagaaattaaagccaccaaccctgtagccacagaggaatacggagcagtggccatcaacaaccaggccgctaacacgcaggcgcaaactggacttgtgcataaccagggagttattcctggtatggtctggcagaaccgggacgtgtacctgcagggccctatttgggctaaaatacctcacacagatggcaactttcacccgtctcctctgatgggtggatttggactgaaacacccacctccacagattctaattaaaaatacaccagtgccggcagatcctcctcttaccttcaatcaagccaagctgaactctttcatcacgcagtacagcacgggacaagtcagcgtggaaatcgagtgggagctgcagaaagaaaacagcaagcgctggaatccagagatccagtatacttcaaactactacaaatctacaaatgtggactttgctgtcaataccaaaggtgtttactctgagcctcgccccattggtactcgttacctcacccgtaatttgtaattgcctgttaatcaataaaccggttaattcgtttcagttgaactttggtctctgcg

SEQ ID NO: 122 - DNA, 4382 bp, Adeno-associated virus 9
cagagagggagtggccaactccatcactaggggtaatcgcgaagcgcctcccacgctgccgcgtcagcgctgacgtagattacgtcataggggagtggtcctgtattagctgtcacgtgagtgcttttgcgacattttgcgacaccacatggccatttgaggtatatatggccgagtgagcgagcaggatctccattttgaccgcgaaatttgaacgagcagcagccatgccgggcttctacgagattgtgatcaaggtgccgagcgacctggacgagcacctgccgggcatttctgactcttttgtgaactgggtggccgagaaggaatgggagctgcccccggattctgacatggatcggaatctgatcgagcaggcacccctgaccgtggccgagaagctgtagcgcgacttcctggtccaatggcgccgcgtgagtaaggccccggaggccctcttctttgttcagttcgagaagggcgagagctactttcacctgcacgttctggtcgagaccacgggggtcaagtccatggtgctaggccgcttcctgagtcagattcgggagaagctggtccagaccatctaccgcgggatcgagccgaccctgcccaactggttcgcggtgaccaagacgcgtaatggcgccggcggggggaacaaggtggtggacgagtgctacatccccaactacctcctgcccaagactcagcccgagctgcagtgggcgtggactaacatggaggagtatataagcgcgtgcttgaacctggccgagcgcaaacggctcgtggcgcagcacctgacccacgtcagccagacgcaggagcagaacaaggagaatctgaaccccaattctgacgcgcccgtgatcaggtcaaaaacctccgcgcgctacatggagctggtcgggtggctggtggaccggggcatcacctccgagaagcagtggatccaggaggaccaggcctcgtacatctccttcaacgccgcctccaactcgcggtcccagatcaaggccgcgctggacaatgccggcaagatcatggcgctgaccaaatccgcgcccgactacctggtaggcccttcacttccggtggacattacgcagaaccgcatctaccgcatcctgcagctcaacggctacgaccctgcctacgccggctccgtctttctcggctgggcacaaaagaagttcgggaaacgcaacaccatctggctgtttgggccggccaccacgggaaagaccaacatcgcagaagccattgcccacgccgtgcccttctacggctgcgtcaactggaccaatgagaactttcccttcaacgattgcgtcgacaagatggtgatctggtgggaggagggcaagatgacggccaaggtcgtggagtccgccaaggccattctcggcggcagcaaggtgcgcgtggaccaaaagtgcaagtcgtccgcccagatcgaccccactcccgtgatcgtcacctccaacaccaacatgtgcgccgtgattgacgggaacagcaccaccttcgagcaccagcagcctctccaggaccggatgtttaagttcgaactcacccgccgtctggagcacgactttggcaaggtgacaaagcaggaagtcaaagagttcttccgctgggccagtgatcacgtgaccgaggtggcgcatgagttttacgtcagaaagggcggagccagcaaaagacccgcccccgatgacgcggataaaagcgagcccaagcgggcctgcccctcagtcgcggatccatcgacgtcagacgcggaaggagctccggtggactttgccgacaggtaccaaaacaaatgttctcgtcacgcgggcatgcttcagatgctgcttccctgcaaaacgtgcgagagaatgaatcagaatttcaacatttgcttcacacacggggtcagagactgctcagagtgtttccccggcgtgtcagaatctcaaccggtcgtcagaaagaggacgtatcggaaactctgtgcgattcatcatctgctggggcgggctcccgagattgcttgctcggcctgcgatctggtcaacgtggacctggatgactgtgtttctgagcaataaatgacttaaaccaggtatggctgccgatggttatcttccagattggctcgaggacaacctctctgagggcattcgcgagtggtgggacctgaaacctggagccccgaaacccaaagccaaccagcaaaagcaggacgacggccggggtctggtgcttcctggctacaagtacctcggacccttcaacggactcgacaagggggagcccgtcaacgcggcggacgcagcggccctcgagcacgacaaggcctacgaccagcagctcaaagcgggtgacaatccgtacctgcggtataaccacgccgacgccgagtttcaggagcgtctgcaagaagatacgtcttttgggggcaacctcgggcgagcagtcttccaggccaagaagcgggttctcgaacctctcggtctggttgaggaaggcgctaagacggctcctggaaagaagagaccggtagagcagtcaccccaagaaccagactcatcctcgggcatcggcaaatcaggccagcagcccgctaaaaagagactcaattttggtcagactggcgactcagagtcagtccccgacccacaacctctcggagaacctccagaagccccctcaggtctgggacctaatacaatggcttcaggcggtggcgctccaatggcagacaataacgaaggcgccgacggagtgggtaattcctcgggaaattggcattgcgattccacatggctgggggacagagtcatcaccaccagcacccgaacctgggcattgcccacctacaacaaccacctctacaagcaaatctccaatggaacatcgggaggaagcaccaacgacaacacctactttggctacagcaccccctgggggtattttgacttcaacagattccactgccacttctcaccacgtgactggcagcgactcatcaacaacaactggggattccggccaaagagactcaacttcaagctgttcaacatccaggtcaaggaggttacgacgaacgaaggcaccaagaccatcgccaataaccttaccagcaccgtccaggtctttacggactcggagtaccagctaccgtacgtcctaggctctgcccaccaaggatgcctgccaccgtttcctgcagacgtcttcatggttcctcagtacggctacctgacgctcaacaatggaagtcaagcgttaggacgttcttctttctactgtctggaatacttcccttctcagatgctgagaaccggcaacaactttcagttcagctacactttcgaggacgtgcctttccacagcagctacgcacacagccagagtctagatcgactgatgaaccccctcatcgaccagtacctatactacctggtcagaacacagacaactggaactgggggaactcaaactttggcattcagccaagcaggccctagctcaatggccaatcaggctagaaactgggtacccgggccttgctaccgtcagcagcgcgtctccacaaccaccaaccaaaataacaacagcaactttgcgtggacgggagctgctaaattcaagctgaacgggagagactcgctaatgaatcctggcgtggctatggcatcgcacaaagacgacgaggaccgcttctttccatcaagtggcgttctcatatttggcaagcaaggagccgggaacgatggagtcgactacagccaggtgctgattacagatgaggaagaaattaaagccaccaaccctgtagccacagaggaatacggagcagtggccatcaacaaccaggccgctaacacgcaggcgcaaactggacttgtgcataaccagggagttattcctggtatggtctggcagaaccgggacgtgtacctgcagggccctatttgggctaaaatacctcacacagatggcaactttcacccgtctcctctgatgggtggatttggactgaaacacccacctccacagattctaattaaaaatacaccagtgccggcagatcctcctcttaccttcaatcaagccaagctgaactctttcatcacgcagtacagcacgggacaagtcagcgtggaaatcgagtgggagctgcagaaagaaaacagcaagcgctggaatccagagatccagtatacttcaaactactacaaatctacaaatgtggactttgctgtcaataccgaaggtgtttactctgagcctcgccccattggtactcgttacctcacccgtaatttgtaattgcctgttaatcaataaaccggttaattcgtttcagttgaactttggtctctgcg

SEQ ID NO: 123 - protein, 736 aa, Adeno-associated virus 9
MAADGYLPDWLEDNLSEGIREWWALKPGAPQPKANQQHQDNARGLVLPGYKYLGPGNGLDKGEPVNAADAAALEHDKAYDQQLKAGDNPYLKYNHADAEFQERLKEDTSFGGNLGRAVFQAKKRLLEPLGLVEEAAKTAPGKKRPVEQSPQEPDSSAGIGKSGAQPAKKRLNFGQTGDTESVPDPQPIGEPPAAPSGVGSLTMASGGGAPVADNNEGADGVGSSSGNWHCDSQWLGDRVITTSTRTWALPTYNNHLYKQISNSTSGGSSNDNAYFGYSTPWGYFDFNRFHCHFSPRDWQRLINNNWGFRPKRLNFKLFNIQVKEVTDNNGVKTIANNLTSTVQVFTDSDYQLPYVLGSAHEGCLPPFPADVFMIPQYGYLTLNDGSQAVGRSSFYCLEYFPSQMLRTGNNFQFSYEFENVPFHSSYAHSQSLDRLMNPLIDQYLYYLSKTINGSGQNQQTLKFSVAGPSNMAVQGRNYIPGPSYRQQRVSTTVTQNNNSEFAWPGASSWALNGRNSLMNPGPAMASHKEGEDRFFPLSGSLIFGKQGTGRDNVDADKVMITNEEEIKTTNPVATESYGQVATNHQSAQAQAQTGWVQNQGILPGMVWQDRDVYLQGPIWAKIPHTDGNFHPSPLMGGFGMKHPPPQILIKNTPVPADPPTAFNKDKLNSFITQYSTGQVSVEIEWELQKENSKRWNPEIQYTSNYYKSNNVEFAVNTEGVYSEPRPIGTRYLTRNL

SEQ ID NO: 124 - protein, 736 aa, Artificial Sequence
  Description of Artificial Sequence: Synthetic polypeptide
MAADGYLPDWLEDNLSEGIREWWDLKPGAPKPKANQQKQDDGRGLVLPGYKYLGPFNGLDKGEPVNAADAAALEHDKAYDQQLKAGDNPYLRYNHADAEFQERLQEDTSFGGNLGRAVFQAKKRVLEPLGLVEEGAKTAPGKKRPVEQSPQEPDSSSGIGKSGQQPAKKRLNFGQTGDSESVPDPQPLGEPPEAPSGLGPNTMASGGGAPMADNNEGADGVGNSSGNWHCDSTWLGDRVITTSTRTWALPTYNNHLYKQISNGTSGGSTNDNTYFGYSTPWGYFDFNRFHCHFSPRDWQRLINNNWGFRPKRLNFKLFNIQVKEVTTNEGTKTIANNLTSTVQVFTDSEYQLPYVLGSAHQGCLPPFPADVFMVPQYGYLTLNNGSQALGRSSFYCLEYFPSQMLRTGNNFQFSYTFEDVPFHSSYAHSQSLDRLMNPLIDQYLYYLVRTQTTGTGGTQTLAFSQAGPSSMANQARNWVPGPCYRQQRVSTTTNQNNNSNFAWTGAAKFKLNGRDSLMNPGVAMASHKDDEDRFFPSSGVLIFGKQGAGNDGVDYSQVLITDEEEIKATNPVATEEYGAVAINNQAANTQAQTGLVHNQGVIPGMVWQNRDVYLQGPIWAKIPHTDGNFHPSPLMGGFGLKHPPPQILIKNTPVPADPPLTFNQAKLNSFITQYSTGQVSVEIEWELQKENSKRWNPEIQYTSNYYKSTNVDFAVNTEGVYSEPRPIGTRYLTRNL

SEQ ID NO: 125 - protein, 623 aa, Artificial Sequence
  Description of Artificial Sequence: Synthetic polypeptide
MPGFYEIVIKVPSDLDEHLPGISDSFVNWVAEKEWELPPDSDMDRNLIEQAPLTVAEKLQRDFLVQWRRVSKAPEALFFVQFEKGESYFHLHVLVETTGVKSMVLGRFLSQIREKLVQTIYRGIEPTLPNWFAVTKTRNGAGGGNKVVDECYIPNYLLPKTQPELQWAWTNMEEYISACLNLAERKRLVAQHLTHVSQTQEQNKENLNPNSDAPVIRSKTSARYMELVGWLVDRGITSEKQWIQEDQASYISFNAASNSRSQIKAALDNAGKIMALTKSAPDYLVGPSLPVDITQNRIYRILQLNGYDPAYAGSVFLGWAQKKFGKRNTIWLFGPATTGKTNIAEAIAHAVPFYGCVNWTNENFPFNDCVDKMVIWWEEGKMTAKVVESAKAILGGSKVRVDQKCKSSAQIDPTPVIVTSNTNMCAVIDGNSTTFEHQQPLQDRMFKFELTRRLEHDFGKVTKQEVKEFFRWASDHVTEVAHEFYVRKGGASKRPAPDDADKSEPKRACPSVADPSTSDAEGAPVDFADRYQNKCSRHAGMLQMLLPCKTCERMNQNFNICFTHGVRDCSECFPGVSESQPVVRKRTYRKLCAIHHLLGRAPEIACSACDLVNVDLDDCVSEQ

SEQ ID NO: 126 - DNA, 2211 bp, Adeno-associated virus
atggctgccgatggttatcttccagattggctcgaggacaaccttagtgaaggaattcgcgagtggtgggctttgaaacctggagcccctcaacccaaggcaaatcaacaacatcaagacaacgctcgaggtcttgtgcttccgggttacaaataccttggacccggcaacggactcgacaagggggagccggtcaacgcagcagacgcggcggccctcgagcacgacaaggcctacgaccagcagctcaaggccggagacaacccgtacctcaagtacaaccacgccgacgccgagttccaggagcggctcaaagaagatacgtcttttgggggcaacctcgggcgagcagtcttccaggccaaaaagaggcttcttgaacctcttggtctggttgaggaagcggctaagacggctcctggaaagaagaggcctgtagagcagtctcctcaggaaccggactcctccgcgggtattggcaaatcgggtgcacagcccgctaaaaagagactcaatttcggtcagactggcgacacagagtcagtcccagaccctcaaccaatcggagaacctcccgcagccccctcaggtgtgggatctcttacaatggcttcaggtggtggcgcaccagtggcagacaataacgaaggtgccgatggagtgggtagttcctcgggaaattggcattgcgattcccaatggctgggggacagagtcatcaccaccagcacccgaacctgggccctgcccacctacaacaatcacctctacaagcaaatctccaacagcacatctggaggatcttcaaatgacaacgcctacttcggctacagcaccccctgggggtattttgacttcaacagattccactgccacttctcaccacgtgactggcagcgactcatcaacaacaactggggattccggcctaagcgactcaacttcaagctcttcaacattcaggtcaaagaggttacggacaacaatggagtcaagaccatcgccaataaccttaccagcacggtccaggtcttcacggactcagactatcagctcccgtacgtgctcgggtcggctcacgagggctgcctcccgccgttcccagcggacgttttcatgattcctcagtacgggtatctgacgcttaatgatggaagccaggccgtgggtcgttcgtccttttactgcctggaatatttcccgtcgcaaatgctaagaacgggtaacaacttccagttcagctacgagtttgagaacgtacctttccatagcagctacgctcacagccaaagcctggaccgactaatgaatccactcatcgaccaatacttgtactatctctcaaagactattaacggttctggacagaatcaacaaacgctaaaattcagtgtggccggacccagcaacatggctgtccagggaagaaactacatacctggacccagctaccgacaacaacgtgtctcaaccactgtgactcaaaacaacaacagcgaatttgcttggcctggagcttcttcttgggctctcaatggacgtaatagcttgatgaatcctggacctgctatggccagccacaaagaaggagaggaccgtttctttcctttgtctggatctttaatttttggcaaacaaggaactggaagagacaacgtggatgcggacaaagtcatgataaccaacgaagaagaaattaaaactactaacccggtagcaacggagtcctatggacaagtggccacaaaccaccagagtgcccaagcacaggcgcagaccggctgggttcaaaaccaaggaatacttccgggtatggtttggcaggacagagatgtgtacctgcaaggacccatttgggccaaaattcctcacacggacggcaactttcacccttctccgctgatgggagggtttggaatgaagcacccgcctcctcagatcctcatcaaaaacacacctgtacctgcggatcctccaacggccttcaacaaggacaagctgaactctttcatcacccagtattctactggccaagtcagcgtggagatcgagtgggagctgcagaaggaaaacagcaagcgctggaacccggagatccagtacacttccaactattacaagtctaataatgttgaatttgctgttaatactgaaggtgtatatagtgaaccccgccccattggcaccagatacctgactcgtaatctgtaa

SEQ ID NO: 127 - protein, 736 aa, Adeno-associated virus; identical to SEQ ID NO: 123

SEQ ID NO: 128 - DNA, 2460 bp, Adeno-associated virus
ggtaattcctccggaaattggcattgcgattccacatggctgggcgaccgagtcattaccaccagcacccggacttgggccctgcccacctacaacaaccacctctacaagcaaatctccagccaatcgggtgccaccaacgacaaccactacttcggctacagcaccccttgggggtattttgatttcaacagattccactgccatttctcaccacgtgactggcagcgactcatcaacaacaactggggattcatggctgccgatggttatcttccagattggctcgaggacactctctctgaaggaatcagacagtggtggaagctcaaacctggcccaccaccgccgaaacctaaccaacaacaccgggacgacagtaggggtcttgtgcttcctgggtacaagtacctcggacccttcaacggactcgacaaaggagagccggtcaacgaggcagacgccgcggccctcgagcacgacaaagcctacgaccaccagctcaagcaaggggacaacccgtacctcaaatacaaccacgcggacgctgaatttcaggagcgtcttcaagaagatacgtctttcgggggcaacctcgggcgagcagtcttccaggccaaaaagagggtactcgagcctcttggtctggttgaggaagctgttaagacggctcctggaaaaaagagacctatagagcagtctcctgcagaaccggactcttcctcgggcatcggcaaatcaggccagcagcccgctaagaaaagactcaattttggtcagactggcgacacagagtcagtcccagaccctcaaccaatcggagaaccccccgcagccccctctggtgtgggatctaatacaatggcttcaggcggtggggcaccaatggcagacaataacgaaggcgccgacggagtgggtaattcctcgggaaattggcattgcgattccacatggatgggcgacagagttatcaccaccagcacaagaacctgggccctccccacctacaataatcacctctacaagcaaatctccagcgaatcgggagccaccaacgacaaccactacttcggctacagcaccccctgggggtattttgactttaacagattccactgtcacttctcaccacgtgactggcagcgactcatcaacaacaactggggatttagacccaagaaactcaatttcaagctcttcaacatccaagtcaaggaggtcacgcagaatgatggaaccacgaccatcgccaataaccttaccagcacggtgcaggtcttcacagactctgagtaccagctgccctacgtcctcggttcggctcaccagggctgccttccgccgttcccagcagacgtcttcatgattcctcagtacggctacttgactctgaacaatggcagccaagcggtaggacgttcttcattctactgtctagagtattttccctctcagatgctgaggacgggaaacaacttcaccttcagctacacttttgaagacgtgcctttccacagcagctacgcgcacagccagagtctggatcggctgatgaatcctctcattgaccagtacctgtattacctgagcaaaactcagggtacaagtggaacaacgcagcaatcgagactgcagttcagccaagctgggcctagctccatggctcagcaggccaaaaactggctaccgggacccagctaccgacagcagcgaatgtctaagacggctaatgacaacaacaacagtgaatttgcttggactgcagccaccaaatattacctgaatggaagaaattctctggtcaatcccgggcccccaatggccagtcacaaggacgatgaggaaaagtatttccccatgcacggaaatctcatctttggaaaacaaggcacaggaactaccaatgtggacattgaatcagtgcttattacagacgaagaagaaatcagaacaactaatcctgtggctacagaacaatacggacaggttgccaccaaccatcagagtcagaacaccacagcttcctatggaagtgtggacagccagggaatcttacctggaatggtgtggcaggaccgcgatgtctatcttcaaggtcccatttgggccaaaactcctcacacggacggacactttcatccttctccgctcatgggaggctttggactgaaacaccctcctccccagatcctgatcaaaaacacacctgtgccagcgaatcccgcgaccactttcactcctggaaagtttgcttcgttcattacccagtattccaccggacaggtcagcgtggaaatagagtgggagctgcagaaagaaaacagcaaacgctggaacccagaaattcagtacacctccaactacaacaagtcggtgaatgtggagtttaccgtggacgcaaacggtgtttattctgaaccccgccctattggcactcgttaccttacccggaacttg

SEQ ID NO: 129 - DNA, 3123 bp, Adeno-associated virus
gaattcgccctttctacggctgcgtcaactggaccaatgaaaactttcccttcaacgattgcgtcgacaagatggtgatctggtgggaggagggaaagatgaccgccaaggtcgtggaatctgccaaagccattctgggtggaggcaaggttcgtgtggaccagaaatgcaagtcttcggcccagatcgacccgactccggtgattgtcacctctaacaccaacatgtgcgccgtgattgacggaaactcgaccaccttcgagcaccagcagccgttgcaagaccggatgttcaaatttgaacttacccgccgtttggatcatgactttgggaaggtcaccaagcaggaagtcaaagactttttccggtgggctcaagatcacgtgactgaggtggagcatgagttctacgtcaaaaagggtggagccaagaaaaggcccgcccccgatgatgtatatataaatgagcccaagcgggcgcgcgagtcagttgcgcagccatcgacgtcagacgcggaagcttcgataaactacgcggacaggtaccaaaacaaatgttctcgtcacgtgggcatgaatctgatgctgtttccctgtcgacaatgcgaaagaatgaatcagaattcaaatatctgcttcacacacgggcaaaaagactgtttggaatgctttcccgtgtcagaatctcaacccgtttctgtcgtcagaaaaacgtatcagaaactttgttacattcatcatatcatgggaaaagtaccagacgcctgcactgcctgcgacctggtaaatgtggacttggatgactgtatttctgagcaataaatgacttaaatcaggtatggctgctgacggttatcttccagattggctcgaggacactctctctgaaggaatcagacagtggtggaagctcaaacctggcccaccaccgccgaaacctaaccaacaacaccgggacgacagtaggggtcttgtgcttcctgggtacaagtacctcggacccttcaacggactcgacaaaggagagccggtcaacgaggcagacgccgcggccctcgagcacgacaaagcctacgaccaccagctcaagcaaggggacaacccgtacctcaaatacaaccacgcggacgctgaatttcaggagcgtcttcaagaagatacgtctttcgggggcaacctcgggcgagcagtcttccaggccaaaaagagggtactcgagcctcttggtctggttgaggaagctgttaagacggctcctggaaaaaagagacctatagagcagtctcctgcagaaccggactcttcctcgggcatcggcaaatcaggccagcagcccgctaagaaaagactcaattttggtcagactggcgacacagagtcagtcccaggccctcaaccaatcggagaaccccccgcagccccctctggtgtgggatctaatacaatggcttcaggcggtggggcaccaatggcagacaataacgaaggcgccgacggagtgggtaattcctcgggaaattggcattgcgattccacatggatgggcgacagagttatcaccaccagcacaagaacctgggccctccccacctacaataatcacctctacaagcaaatctccagcgaatcgggagccaccaacgacaaccactacttcggctacagcaccccctgggggtattttgactttaacagattccactgtcacttctcaccacgtgactggcagcgactcatcaacaacaactggggatttagacccaagaaactcaatttcaagctcttcaacatccaagtcaaggaggtcacgcagaatgatggaaccacgaccatcgccaataaccttaccagcgcggtgcaggtcttcacagactctgagtaccagctgccctacgtcctcggttcggctcaccagggctgccttccgccgttcccagcagacgtcttcatgattcctcagtacggctacttgactctgaacaatggcagccaagcggtaggacgttcttcattctactgtctagagtattttccctctcagatgctgaggacgggaaacaacttcaccttcagctacacttttgaagacgtgcctttccacagcagctacgcgcacagccagagtctggatcggctgatgaatcctctcattgaccagtacctgtattacctgagcaaaactcagggtacaagtggaacaacgcagcaatcgagactgcagttcagccaagctgggcctagctccatggctcagcaggccaaaaactggctaccgggacccagctaccgacagcagcgaatgtctaagacggctaatgacaacaacaacagtgaatttgcttggactgcagccaccaaatattacctgaatggaagaaattctctggtcaatcccgggcccccagtggccagtcacaaggacgatgaggaaaagtatttccccatgcacggaaatctcatctttggaaaacaaggcacaggaactaccaatgtggacattgaatcagtgcttattacagacgaagaagaaatcagaacaactaatcctgtggctacagaacaatacggacaggttgccaccaaccatcagagtcagaacaccacagcttcctatggaagtgtggacagccagggaatcttacctggaatggtgtggcaggaccgcgatgtctatcttcaaggtcccatttgggccaaaactcctcacacggacggacactttcatccttctccgctcatgggaggctttggactgaaacaccctcctccccagatcctgatcaaaaacacacctgtgccagcgaatcccgcgaccactttcactcctggaaagtttgcttcgttcattacccagtattccacctgacaggtcagcgtggaaatagagtgggagctgcagaaagaaaacagcaaacgctggaacccagaaattcagtacacctccaactacaacaagtcggtgaatgtggagtttaccgtggacgcaaacggtgtttattctgaaccccgccctattggcactcgttaccttacccggaacttgtaatttcctgttaatgaataagccgatttatgcgtttcagttgaactttggtctctgcgaagggcgaattcgtttaaacct

SEQ ID NO: 130 - protein, 735 aa, Artificial Sequence
  Description of Artificial Sequence: Synthetic polypeptide
MAADGYLPDWLEDTLSEGIRQWWKLKPGPPPPKPNQQHRDDSRGLVLPGYKYLGPFNGLDKGEPVNEADAAALEHDKAYDHQLKQGDNPYLKYNHADAEFQERLQEDTSFGGNLGRAVFQAKKRVLEPLGLVEEAVKTAPGKKRPIEQSPAEPDSSSGIGKSGQQPAKKRLNFGQTGDTESVPGPQPIGEPPAAPSGVGSNTMASGGGAPMADNNEGADGVGNSSGNWHCDSTWMGDRVITTSTRTWALPTYNNHLYKQISSESGATNDNHYFGYSTPWGYFDFNRFHCHFSPRDWQRLINNNWGFRPKKLNFKLFNIQVKEVTQNDGTTTIANNLTSAVQVFTDSEYQLPYVLGSAHQGCLPPFPADVFMIPQYGYLTLNNGSQAVGRSSFYCLEYFPSQMLRTGNNFTFSYTFEDVPFHSSYAHSQSLDRLMNPLIDQYLYYLSKTQGTSGTTQQSRLQFSQAGPSSMAQQAKNWLPGPSYRQQRMSKTANDNNNSEFAWTAATKYYLNGRNSLVNPGPPVASHKDDEEKYFPMHGNLIFGKQGTGTTNVDIESVLITDEEEIRTTNPVATEQYGQVATNHQSQNTTASYGSVDSQGILPGMVWQDRDVYLQGPIWAKTPHTDGHFHPSPLMGGFGLKHPPPQILIKNTPVPANPATTFTPGKFASFITQYSTGQVSVEIEWELQKENSKRWNPEIQYTSNYNKSVNVEFTVDANGVYSEPRPIGTRYLTRNL

SEQ ID NO: 131 - DNA, 3123 bp, Adeno-associated virus
gaattcgccctttctacggctgcgtcaactggaccaatgaaaactttcccttcaacgattgcgtcgacaagatggtgatctggtgggaggagggaaagatgaccgccaaggtcgtggaatctgccaaagccattctgggtggaagcaaggttcgtgtggaccagaaatgcaagtcttcggcccagatcgacccgactccggtgattgtcacctctaacaccaacatgtgcgccgtgattgacggaaactcgaccaccttcgagcaccagcagccgttgcaagaccggatgttcaaatttgaacttacccgccgtttggatcatgactttgggaaggtcaccaagcaggaagtcaaagactttttccggtgggctcaagatcacgtgactgaggtggagcatgagttctacgtcaaaaagggtggagccaagaaaaggcccgcccccgatgatgtatatataaatgagcccaagcgggcgcgcgagtcagttgcgcagccatcgacgtcagacgcggaagcttcgataaactacgcgggcaggtaccaaaacaaatgttctcgtcacgtgggcatgaatctgatgctgtttccctgtcgacaatgcgaaagaatgaatcagaattcaaatatctgcttcacacacgggcaaaaagactgtttggaatgctttcccgtgtcagaatctcaacccgtttctgtcgtcagaaaaacgtatcagaaactttgttacattcatcatatcatgggaaaagaaccagacgcctgcactgcctgcgacctggtaaatgtggacttggatgactgtatttctgagcaataaatgacttaaatcaggtatggctgctgacggttatcttccagattggctcgaggacactctctctgaaggaatcagacagtggtggaagctcaaacctggcccaccaccgccgaaacctaaccaacaacaccgggacgacagtaggggtcttgtgcttcctgggtacaagtacctcggacccttcaacggactcgacaaaggagagccggtcaacgaggcagacgccgcggccctcgagcacgacaaagcctacgaccaccagctcaagcaaggggacaacccgtacctcaaatacaaccacgcggacgctgaatttcaggagcgtcttcaagaagatacgtctttcgggggcaacctcgggcgagcagtcttccaggccaaaaagagggtactcgagcctcttggtctggttgaggaagctgttaagacggctcctggaaaaaagagacctatagagcagtctcctgcagaaccggactcttcctcgggcatcggcgaatcaggccagcagcccgctaagaaaagactcaattttggtcagactggcgacacagagtcagtcccagaccctcaaccaatcggagaaccccccgcagccccctctggtgtgggatctaatacaatggcttcaggcggtggggcaccaatggcagacgataacgaaggcgccgacggagtgggtaattcctcgggaaattggcattgcgattccacatggatgggcgacagagttatcaccaccagcacaagaacctgggccctccccacctacaataatcacctctacaagcaaatctccagcgaatcgggagccaccaacgacaaccactacttcggctacagcaccccctgggggtattttgactttaacagattccactgtcacttctcaccacgtgactggcagcgactcatcaacaacaactggggatttagacccaagaaactcaatttcaagctcttcaacatccaagtcaaggaggtcacgcagaatgatggaaccacgaccatcgccaataaccttaccagcacggtgcaggtcttcacagactctgagtaccagctgccctacgtcctcggttcggctcaccagggctgccttccgccgttcccagcagacgtcttcatgattcctcagtacggctacttgactctgaacaatggcagccaagcggtaggacgttcttcattctactgtctagagtattttccctctcagatgctgaggacgggaaacaacttcaccttcagctacacttttgaagacgtgcctttccacagcagctacgcgcacagccagagtctggatcggctgatgaatcctctcattgaccagtacctgtattacctgagcaaaactcagggtacaagtggaacaacgcagcaatcgagactgcagttcagccaagctgggcctagctccatggctcagcaggccaaaaactggctaccgggacccagctaccgacagcagcgaatgtctaagacggctaatgacaacaacaacagtgaatttgcttggactgcagccaccaaatattacctgaatggaagaaattctctggtcaatcccgggcccccaatggccagtcacaaggacgatgaggaaaagtatttccccatgcacggaaatctcatctttggaaaacaaggcacaggaactaccaatgtggacattgaatcagtgcttattacagacgaagaagaaatcagaacaactaatcctgtggctacagaacaatacggacaggttgccaccaaccatcagagtcaggacaccacagcttcctatggaagtgtggacagccagggaatcttacctggaatggtgtggcaggaccgcgatgtctatcttcaaggtcccatttgggccaaaactcctcacacggacggacactttcatccttctccgctcatgggaggctttggactgaaacaccctcctccccagatcctgatcaaaaacacacctgtgccagcgaatcccgcgaccactttcactcctggaaagtttgcttcgttcattacccagtattccaccggacaggtcagcgtggaaatagagtgggagctgcagaaagaaaacagcaaacgctggaacccagaaattcagtacacctccaactacaacaagtcggtgaatgtggagtttaccgtggacgcaaacggtgtttattctgaaccccgccctattggcactcgttaccttacccggaacttgtaatttcctgttaatgaataaaccgatttatgcgtttcagttgaactttggtctctgcgaagggcgaattcgcggccgcta

SEQ ID NO: 132 - protein, 735 aa, Artificial Sequence
  Description of Artificial Sequence: Synthetic polypeptide
MAADGYLPDWLEDTLSEGIRQWWKLKPGPPPPKPNQQHRDDSRGLVLPGYKYLGPFNGLDKGEPVNEADAAALEHDKAYDHQLKQGDNPYLKYNHADAEFQERLQEDTSFGGNLGRAVFQAKKRVLEPLGLVEEAVKTAPGKKRPIEQSPAEPDSSSGIGESGQQPAKKRLNFGQTGDTESVPDPQPIGEPPAAPSGVGSNTMASGGGAPMADDNEGADGVGNSSGNWHCDSTWMGDRVITTSTRTWALPTYNNHLYKQISSESGATNDNHYFGYSTPWGYFDFNRFHCHFSPRDWQRLINNNWGFRPKKLNFKLFNIQVKEVTQNDGTTTIANNLTSTVQVFTDSEYQLPYVLGSAHQGCLPPFPADVFMIPQYGYLTLNNGSQAVGRSSFYCLEYFPSQMLRTGNNFTFSYTFEDVPFHSSYAHSQSLDRLMNPLIDQYLYYLSKTQGTSGTTQQSRLQFSQAGPSSMAQQAKNWLPGPSYRQQRMSKTANDNNNSEFAWTAATKYYLNGRNSLVNPGPPMASHKDDEEKYFPMHGNLIFGKQGTGTTNVDIESVLITDEEEIRTTNPVATEQYGQVATNHQSQDTTASYGSVDSQGILPGMVWQDRDVYLQGPIWAKTPHTDGHFHPSPLMGGFGLKHPPPQILIKNTPVPANPATTFTPGKFASFITQYSTGQVSVEIEWELQKENSKRWNPEIQYTSNYNKSVNVEFTVDANGVYSEPRPIGTRYLTRNL

SEQ ID NO: 133 - DNA, 3113 bp, Adeno-associated virus
gaattcgccctttctacggctgcgtcaactggaccaatgaaaactttcccttcaacgattgcgtcgacaagatggtgatctggtgggaggagggaaagatgaccgccaaggtcgtggaatctgccaaagccattctgggtggaagcaaggttcgtgtggaccagaaatgcaagtcttcggcccagatcgacccgactccggtgattgtcacctctaacaccaacatgtgcgccgtgattgacggaaactcgaccaccttcgagcaccagcagccgttgcaagaccggatgttcaaatttgaacttacccgccgtttggatcatgactttgggaaggtcaccaagcaggaagtcaaagactttttccggtgggctcaagatcacgtgactgaggtggagcatgagttctacgtcaaaaagggtggagccaagaaaaggcccgcccccgatgatgtatatataaatgagcccaagcgggcgcgcgagtcagttgcgcagccatcgacgtcagacgcggaagcttcgataaactacgcggacaggtaccaaaacaaatgttctcgtcacgtgggcatgaatctgatgctgtttccctgtcgacaatgcgaaagaatgaatcagaattcaaatatctgcttcacacacgggcaaaaagactgtttggaatgctttcccgtgtcagaatctcaacccgttcctgtcgtcagaaaaacgtatcagaaactttgttacattcatcatatcatgggaaaagtaccagacgcctgcactgcctgcgacctggtaaatgtggacttggatgactgtatttctgagcaataaatgacttaaatcaggtatggctgctgacggttatcttccagattggctcgaggacactctctctgaaggaatcagacagtggtggaagctcaaacctggcccaccaccgccgaaacctaaccaacaacaccgggacgacagtaggggtcttgtgcttcctgggtacaagtacctcggacccttcaacggactcgacaaaggagagccggtcaacgaggcagacgccgcggccctcgagcacgacaaagcctacgaccaccagctcaagcaaggggacaacccgtacctcaaatacaaccacgcggacgctgaatttcaggagcgtcttcaagaagatacgtctttcgggggcaacctcgggcgagcagtcttccaggccaaaaagagggtactcgagcctcttggtctggttgaggaagctgttaagacggctcctggaaaaaagagacctatagagcagtctcctgcagaaccggactcttcctcgggcatcggcaaatcaggccagcagcccgctaagaaaagactcaattttggtcagactggcgacacagagtcagtcccagaccctcaaccaatcggagaaccccccgcagccccctctggtgtgggatctaatacaatggcttcaggcggtggggcaccaatggcagacaataacgaaggcgccgacggagtgggtaattcctcgggaaattggcattgcgattccacatggatgggcgacagagttatcaccaccagcacaagaacctgggccctccccacctacaataatcacctctacaagcaaatctccagcgaatcgggagccaccaacgacaaccactacttcggctacagcaccccctgggggtattttgactttaacagattccactgtcacttctcaccacgtgactggcagcgactcatcaataacaactggggatttagacccaagaaactcaatttcaagctcttcaacatccaagtcaaggaggtcacgcagaatgatggaaccacgaccatcgccaataaccttaccagcacggtgcaggtcttcacagactctgagtaccagctgccctacgtcctcggttcggctcaccagggctgccttccgccgttcccagcagacgtcttcatgattcctcagtacggctacttgactctgaacaatggcagccaagcggtaggacgttcttcattctactgtctagagtattttccctctcagatgctgaggacgggaaacaacttcaccttcagctacacttttgaagacgtgcctttccacagcagctacgcgcacagccagagtctggatcggctgatgaatcctctcattgaccagtacctgtattacctgagcaaaactcagggtacaagtggaacaacgcagcaatcgagactgcagttcaaccaagctgggcctagctccatggctcagcaggccaaaaactggctaccgggacccagctaccgacagcagcgaatgtctaagacggctaatgacaacaacaacagtgaatttgcttggactgcagccaccaaatattacccgaatggaagaaattctctggtcaatcccgggcccccaatggccagtcacaaggacgatgaggaaaagtatttccccatgcacggaaatctcatctttggaaaacaaggcacaggaactaccaatgtggacattgaatcagtgcttattacagacgaagaagaaatcagaacgactaatcctgtggctacagaacaatacggacaggttgccaccaaccgtcagagtcagaacaccacagcttcctatggaagtgtggacagccagggaatcttacctggaatggtgtggcaggaccgcgatgtctatcttcaaggtcccatttgggccaaaactcctcacacggacggacactttcatccttctccgctcatgggaggctttggactgaaacaccctcctccccagatcctgatcaaaaacacacctgtgccagcgaatcccgcgaccactttcactcctggaaagtttgcttcgttcattacccagtattccaccggacaggtcagcgtggaaatagagtgggagctgcagaaagaaaacagcaaacgctggaacccggaaattcagtacacctccaactacaacaagtcggtgaatgtggagtttaccgtggacgcaaacggtgtttattctgaaccccgccctattggcactcgttaccttacccggaacttgtaatttcctgttaatgaataaaccgatttatgcgtttcagttgaactttggtctctgcgaagggcgaattc

SEQ ID NO: 134 - protein, 735 aa, Artificial Sequence
  Description of Artificial Sequence: Synthetic polypeptide
MAADGYLPDWLEDTLSEGIRQWWKLKPGPPPPKPNQQHRDDSRGLVLPGYKYLGPFNGLDKGEPVNEADAAALEHDKAYDHQLKQGDNPYLKYNHADAEFQERLQEDTSFGGNLGRAVFQAKKRVLEPLGLVEEAVKTAPGKKRPIEQSPAEPDSSSGIGKSGQQPAKKRLNFGQTGDTESVPDPQPIGEPPAAPSGVGSNTMASGGGAPMADNNEGADGVGNSSGNWHCDSTWMGDRVITTSTRTWALPTYNNHLYKQISSESGATNDNHYFGYSTPWGYFDFNRFHCHFSPRDWQRLINNNWGFRPKKLNFKLFNIQVKEVTQNDGTTTIANNLTSTVQVFTDSEYQLPYVLGSAHQGCLPPFPADVFMIPQYGYLTLNNGSQAVGRSSFYCLEYFPSQMLRTGNNFTFSYTFEDVPFHSSYAHSQSLDRLMNPLIDQYLYYLSKTQGTSGTTQQSRLQFNQAGPSSMAQQAKNWLPGPSYRQQRMSKTANDNNNSEFAWTAATKYYPNGRNSLVNPGPPMASHKDDEEKYFPMHGNLIFGKQGTGTTNVDIESVLITDEEEIRTTNPVATEQYGQVATNRQSQNTTASYGSVDSQGILPGMVWQDRDVYLQGPIWAKTPHTDGHFHPSPLMGGFGLKHPPPQILIKNTPVPANPATTFTPGKFASFITQYSTGQVSVEIEWELQKENSKRWNPEIQYTSNYNKSVNVEFTVDANGVYSEPRPIGTRYLTRNL

SEQ ID NO: 135 - DNA, 3122 bp, Adeno-associated virus
agcggccgcgaattcgccctttctacggctgcgtcaactggaccaatgaaaactttcccttcaacgattgcgtcgacaagatggtgatctggtgggaggagggaaagatgaccgccaaggtcgtggaatctgccaaagccattctgggtggaagcaaggttcgtgtggaccagaaatgcaggtcttcggcccagatcgacccgactccggtgattgtcacctctaacaccaacatgtgcgccgtgattgacggaaactcgaccaccttcgagcaccagcagccgttgcaagaccggatgttcaaatttgaacttacccgccgtttggatcatgactttgggaaggtcaccaagcaggaagtcaaagactttttccggtgggctcaagatcacgtgactgaggtggagcatgagttctacgtcaaaaagggtggagccaagaaaaggcccgcccccgatgatgtatatataaatgagcccaagcgggcgcgcgagtcagttgcgcagccatcgacgtcagacgcggaagcttcgataaactacgcggacaggtaccaaaacaaatgttctcgtcacgtgggcatgaatctgatgctgtttccctgtcgacaatgcgaaagaatgaatcagaattcaaatatctgcttcacacacgggcaaaaagactgtttggaatgctttcccgtgtcagaatctcaacccgtttctgtcgtcagaaaaacgtatcagaaactttgttacattcatcatatcatgggaaaagtaccagacgcctgcactgcctgcgacctggtaaatgtggacttggatgactgtatttctgagcaataaatgacttaaatcaggtatggctgctgacggttatcttccagattggctcgaggacactctctctgaaggaatcagacagtggtggaagctcaaacctggcccaccaccgccgaaacctaaccaacaacaccgggacgacagtaggggtcttgtgcttcctgggtacaagtacctcggacccttcaacggactcgacaaaggagagccggtcaacgaggcagacgccgcggccctcgagcacgacaaagcctacgaccaccagctcaagcaaggggacaacccgtacctcaaatacaaccacgcggacgctgaatttcaggagcgtcttcaagaagatacgtctttcgggggcaacctcgggcgagcagtcttccaggccaaaaagagggtactcgagcctcttggtctggttgaggaagctgttaagacggctcctggaaaaaagagacctatagagcagtctcctgcagaaccggactcttcctcgggcatcggcaaatcaggccagcagcccgctaagaaaagactcaattttggtcagactggcgacacagagtcagtcccagaccctcaaccaatcggagaaccccccgcagccccctctggtgtgggatctaatacaatggcttcaggcggtggggcaccaatggcagacaataacgaaggcgccgacggagtgggtaattcctcgggaaattggcattgcgattccacatggatgggcgacagagttatcaccaccagcacaagaacctgggccctccccacctacaataatcgcctctacaagcaaatctccagcgaatcgggagccaccaacgacaaccactacttcggctacagcaccccctgggggtattttgactttaacagattccactgtcacttctcaccacgtgactggcagcgactcatcaacaacaactggggatttagacccaagaaactcaatttcaagctcttcaacatccaagtcaaggaggtcacgcagaatgatggaaccacgaccatcgccaataaccttaccagcacggtgcaggtcttcacagactctgagtaccagctgccctacgtcctcggttcggctcaccagggctgccttccgccgttcccagcagacgtcttcatgattcctcagtacggctacttgactctgaacaatggcagccaagcggtaggacgttcttcattctactgtctagagtattttccctctcagatgctgaggacgggaaacaacttcaccttcagctacacttttgaagacgtgcctttccacagcagctacgcgcacagccagagtctggatcggctgatgaatcctctcattgaccagtacctgtattacctgagcaaaactcagggtacaagtggaacaacgcagcaatcgagactgcagttcagccaagctgggcctagctccatggctcagcaggccaaaaactggctaccgggacccagctaccgacagcagcgaatgtctaagacggctaatgacaacaacaacagtgaatttgcttggactgcagccaccaaatattacctgaatggaagaaattctctggtcaatcccgggcccccaatggccagtcacaaggacgatgaggaaaagtatttccccatgcacggaaatctcatctttggaaaacaaggcacaggaactaccaatgtggacattgaatcagtgcttattacagacgaagaagaaatcagaacaactaatcctgtggctacagaacaatacggacaggttgccaccaaccatcagagtcagaacaccacagcttcctatggaagtgtggacagccagggaatcttacctggaatggtgtggcaggaccgcgatgtctatcttcaaggtcccatttgggccaaaactcctcacacggacggacactttcatccttctccgctcatgggaggctttggactgaaacaccctcctccccagatcctgatcaaaaacacacctgtgccagcgaatcccgcgaccactttcactcctggaaagtttgcttcgttcattacccagtattccaccggacaggtcagcgtggaaatagagtgggagctgcagaaagaaaacagcaaacgctggaacccagaaattcagtacacctccaactacaacaagtcggtgaatgtggagtttaccgtggacgcaaacggtgtttattctgaaccccgccctattggcactcgttaccttacccggaacttgtaatttcctgttaatgaataaaccgatttatgcgtttcagttgaactttggtctctgcgaagggcgaattc

SEQ ID NO: 136 - protein, 735 aa, Artificial Sequence
  Description of Artificial Sequence: Synthetic polypeptide
MAADGYLPDWLEDTLSEGIRQWWKLKPGPPPPKPNQQHRDDSRGLVLPGYKYLGPFNGLDKGEPVNEADAAALEHDKAYDHQLKQGDNPYLKYNHADAEFQERLQEDTSFGGNLGRAVFQAKKRVLEPLGLVEEAVKTAPGKKRPIEQSPAEPDSSSGIGKSGQQPAKKRLNFGQTGDTESVPDPQPIGEPPAAPSGVGSNTMASGGGAPMADNNEGADGVGNSSGNWHCDSTWMGDRVITTSTRTWALPTYNNRLYKQISSESGATNDNHYFGYSTPWGYFDFNRFHCHFSPRDWQRLINNNWGFRPKKLNFKLFNIQVKEVTQNDGTTTIANNLTSTVQVFTDSEYQLPYVLGSAHQGCLPPFPADVFMIPQYGYLTLNNGSQAVGRSSFYCLEYFPSQMLRTGNNFTFSYTFEDVPFHSSYAHSQSLDRLMNPLIDQYLYYLSKTQGTSGTTQQSRLQFSQAGPSSMAQQAKNWLPGPSYRQQRMSKTANDNNNSEFAWTAATKYYLNGRNSLVNPGPPMASHKDDEEKYFPMHGNLIFGKQGTGTTNVDIESVLITDEEEIRTTNPVATEQYGQVATNHQSQNTTASYGSVDSQGILPGMVWQDRDVYLQGPIWAKTPHTDGHFHPSPLMGGFGLKHPPPQILIKNTPVPANPATTFTPGKFASFITQYSTGQVSVEIEWELQKENSKRWNPEIQYTSNYNKSVNVEFTVDANGVYSEPRPIGTRYLTRNL

SEQ ID NO: 137 - DNA, 3121 bp, Adeno-associated virus
gaattcgcccttcgcagagaccaaagttcaactgaaacgaatcaaccggtttattgattaacaagcaattacagattacgggtgaggtaacgggtgccgatggggcgaggctcagaataagtgccatctgtgttaacagcaaagtccacatttgtagatttgtagtagttggaagtgtattgaatctctgggttccagcgtttgctgttttctttctgcagctcccattcaatttccacgctgacctgtccggtgctgtactgcgtgatgaacgacgccagcttagcttgactgaaggtagttggaggatccgcgggaacaggtgtattcttaatcaggatctgaggaggcgggtgtttcagtccaaagccccccatcagcggcgagggatgaaagtttccgtccgtgtgaggaatcttggcccagataggaccctgcaggtacacgtcccggttctgccagaccatgccaggtaaggctccttgactgttgacggcccctacaataggagcggcgttttgctgttgcaggttatcggccaccacgccgtactgttctgtggccactgggttggtggttttaatttcttcctcactggttagcataacgctgctatagtccacgttgccttttccagctccctgtttcccaaacattaagactccgctggacggaaaaaatcgctcttcgtcgtccttgtgggttgccatagcgacaccgggatttaccagagagtctctgccattcagatgatacttggtggcaccggtccaggcaaagttgctgttgttattttgcgacagtgtcgtggagacgcgttgctgccggtagcagggcccgggtagccagtttttggcctgagccgacatgttattaggcccggcctgagaaaatagcaactgctgagttcctgcggtacctcccgtggactgagtccgagacaggtagtacaggtactggtcgatgagggggttcatcagccggtccaggctttggctgtgcgcgtagctgctgtgaaaaggcacgtcctcaaactggtagctgaactcaaagttgttgcccgttctcagcatttgagaaggaaagtactccaggcagtagaaggaggaacggcccacggcctgactgccattgttcagagtcaggtacccgtactgaggaatcatgaagacgtccgccgggaacggaggcaggcagccctggcgcgcagagccgaggacgtacgggagctggtattccgagtccgtaaagacctgaatcgtgctggtaaggttattggcgatggtcttggtgccttcattctgcgtgacctccttgacctggatgttgaagagcttgaagttgagtctcttgggccggaatccccagttgttgttgatgagtcgctgccagtcacgtggtgagaagtggcagtggaatctgttaaagtcaaaatacccccagggggtgctgtagccgaagtaggtgttgtcgttggtgcttcctcccgaagtcccgttggagatttgcttgtagaggtggttgttgtaggtggggagggcccaggttcgggtgctggtggtgatgactctgtcgcccagccatgtggaatcgcaatgccaatttcctgaggaactacccactccgtcggcgccttcgttattgtctgccattggagcgccaccgcctgcagccattgtaccagatcccagaccagaggggcctgcggggggttctccgattggttgagggtcgggcactgactctgagtcgccagtctgcccaaagttgagtctctttttcgcgggctgctggcctttcttgccgatgcccgtagtggagtctggagaacgctggggtgatggctctaccggtctcttctttccaggagccgtcttagcgccttcctcaaccagaccgagaggttcgagaacccgcttcttggcctggaagactgctcgtccgaggttgcccccaaaagacgtatcttcttgcagacgctcctgaaactcggcgtcggcgtggttataccgcaggtacggattgtcacccgctttgagctgctggtcgtaggccttgtcgtgctcgagggccgctgcgtccgccgcgttgacgggctcccccttgtcgagtccgttgaagggtccgaggtacttgtagccaggaagcaccagaccccggccgtcgtcctgcttttgctggttggctttgggcttcggggctccaggtttcagcgcccaccactcgcgaatgccctcagagaggttgtcctcgagccaatctggaagataaccatcggcagccatacctgatctaaatcatttattgttcaaagatgcagtcatccaaatccacattgaccagatcgcaggcagtgcaagcgtctggcacctttcccatgatatgatgaatgtagcacagtttctgatacgcctttttgacgacagaaacgggttgagattctgacacgggaaagcactctaaacagtctttctgtccgtgagtgaagcagatatttgaattctgattcattctctcgcattgtctgcagggaaacagcatcagattcatgcccacgtgacgagaacatttgttttggtacctgtccgcgtagttgatcgaagcttccgcgtctgacgtcgatggctgcgcaactgactcgcgcacccgtttgggctcacttatatctgcgtcactgggggcgggtcttttcttggctccaccctttttgacgtagaattcatgctccacctcaaccacgtgatcctttgcccaccggaaaaagtctttgacttcctgcttggtgaccttcccaaagtcatgatccagacggcgggtgagttcaaatttgaacatccggtcttgcaacggctgctggtgttcgaaggtcgttgagttcccgtcaatcacggcgcacatgttggtgttggaggtgacgatcacgggagtcgggtctatctgggccgaggacttgcatttctggtccacgcgcaccttgcttcctccgagaatggctttggccgactccacgaccttggcggtcatcttcccctcctcccaccagatcaccatcttgtcgacacagtcgttgaagggaaagttctcattggtccagttgacgcagccgtagaagggcgaattc

SEQ ID NO: 138 - protein, 733 aa, Artificial Sequence
  Description of Artificial Sequence: Synthetic polypeptide
MAADGYLPDWLEDNLSEGIREWWDLKPGAPKLKANQQKQDDGRGLVLPGYKYLGPFHGLDKGEPVNAADAAALEHDKAYDQQLKAGDNPYLRYNHADAEFQERLQEDTSFGGNLGRAVFQAKKRVLEPLGLVEEGAKTAPGKKRPLESPQEPDSSSGIGKKGKQPAKKRLNFEEDTGAGDGPPEGSDTSAMSSDIEMRAAPGGNAVDAGQGSDGVGNASGDWHCDSTWSEGKVTTTSTRTWVLPTYNNHLYLRLGTTSNSNTYNGFSTPWGYFDFNRFHCHFSPRDWQRLINNNWGLRPKAMRVKIFNIQVKEVTTSNGETTVANNLTSTVQIFADSSYELPYVMDAGQEGSLPPFPNDVFMVPQYGYCGIVTGENQNQTDRNAFYCLEYFPSQMLRTGNNFEMAYNFEKVPFHSMYAHSQSLDRLMNPLLDQYLWHLQSTTSGETLNQGNAATTFGKIRSGDFAFYRKNWLPGPCVKQQRFSKTASQNYKIPASGGNALLKYDTHYTLNNRWSNIAPGPPMATAGPSDGDFSNAQLIFPGPSVTGNTTTSANNLLFTSEGEIAATNPRDTDMFGQIADNNQNATTAPITGNVTAMGVLPGMVWQNRDIYYQGPIWAKIPHADGHFHPSPLIGGFGLKHPPPQIFIKNTPVPANPATTFTAARVDSFITQYSTGQVAVQIEWEIEKERSKRRNPEVQFTSNYGNQSSMLWAPDTTGKYTEPRVIGSRYLTNHL

SEQ ID NO: 139 - protein, 735 aa, Adeno-associated virus
MAADGYLPDWLEDTLSEGIRQWWKLKPGPPPPKPNQQHRDDSRGLVLPGYKYLGPFNGLDKGEPVNEADAAALEHDKAYDHQLKQGDNPYLKYNHADAEFQERLQEDTSFGGNLGRAVFQAKKRVLEPLGLVEEAVKTAPGKKRPIEQSPAEPDSSSGIGKSGQQPAKKRLNFGQTGDTESVPDPQPIGEPPAAPSGVGSNTMASGGGAPMADNNEGADGVGNSSGNWHCDSTWMGDRVITTSTRTWALPTYNNHLYKQISSESGATNDNHYFGYSTPWGYFDFNRFHCHFSPRDWQRLINNNWGFRPKKLNFKLFNIQVKEVTQNDGTTTIANNLTSTVQVFTDSEYQLPYVLGSAHQGCLPPFPADVFMIPQYGYLTLNNGSQAVGRSSFYCLEYFPSQMLRTGNNFTFSYTFEDVPFHSSYAHSQSLDRLMNPLIDQYLYYLSKTQGTSGTTQQSRLQFSQAGPSSMAQQAKNWLPGPSYRQQRMSKTANDNNNSEFAWTAATKYYLNGRNSLVNPGPPMASHKDDEEKYFPMHGNLIFGKQGTGTTNVDIESVLITDEEEIRTTNPVATEQYGQVATNHQSQNTTASYGSVDSQGILPGMVWQDRDVYLQGPIWAKIPHTDGHFHPSPLMGGFGLKHPPPQILIKNTPVPANPATTFTPGKFASFITQYSTGQVSVEIEWELQKENSKRWNPEIQYTSNYNKSVNVEFTVDANGVYSEPRPIGTRYLTRNL

SEQ ID NO: 140 - DNA, 3127 bp, Adeno-associated virus
gcggccgcgaattcgcccttcgcagagaccaaagttcaactgaaacgaatcaaccggtttattgattaacatgcaattacagattacgggtgaggtaacgagtgccaatagggcgaggctcagagtaaacaccctggctgtcaacggcaaagtccacaccagtctgcttttcaaagttggaggtgtactgaatctccgggtcccagcgcttgctgttttccttctgcagctcccactcgatttccacgctgacttgtccggtgctgtactgtgtgatgaacgaagcaaacttggcaggagtaaacacctccggaggattagcgggaacgggagtgttcttgatcaggatctgaggaggcggatgtttaagtccaaagccgcccatcaaaggagacgggtgaaagttgccatccgtgtgaggaatcttggcccagatgggaccctgcaggtacacgtcccggttctgccagaccatgccaggtaaggctccctggttgttgacaacttgtgtctgggctgcagtattagccgcttgtaagttgctgctgactatcccgtattcttccgtggctacaggattagtaggacgaatttcttcttcatttgtcattaacacattttccaatgtagttttgttagttgctccagtttttccaaaaatcaggactccgctggatgggaaaaagcggtcctcgtcgtccttgtgagttgccatggcgacgccgggattaaccaacgagtttctgccgttcaggtgatatttggtggcaccagtccaagcaaagttgctgttgttgttttgatccagcgttttggagaccctttgttgccggaagcagggtccaggtaaccaattcttggcttgttcggccatagttgaaggcccgccctggtaaaactgcagttcccgattgccagctgtgcctcctgggtcactctgtgttctggccaggtagtacaagtactggtcgatgaggggattcatcagccggtccaggctctggctgtgtgcgtagctgctgtggaaaggcacgtcctcgaagctgtagctgaactcaaagttgttgcccgttctcagcatctgagaggggaagtactccaggcagtagaaggaggaacgtcccacagactgactgccattgttgagagtcaggtagccgtactgaggaatcatgaagacgtccgccgggaacggaggcaggcagccctggtgcgcagagccgaggacgtacggcagctggtattccgagtccgagaatacctgaatcgtgctggtaaggttattagcgatggtcgtaacgccgtcattcgtcgtgacctccttgacctggatgttgaagagcttgaaccgcagcttcttgggccggaatccccagttgttgttgatgagtcgctgccagtcacgtggtgagaagtggcagtggaatctgttaaagtcaaaatacccccagggggtgctgtagccgaagtaggtgttgtcgttggtactacctgcagtttcactggagatttgctcgtagaggtggttgttgtaggtgggcagggcccaggttcgggtgctggtggtaatgactctgtcgcccagccatgtggaatcgcaatgccaatttcctgaggcattacccactccgtcggcaccttcgttattgtctgccattggtgcgccaccgcctgcagccactgtaccagatcccacactagagggcgctgctggaggttctccgagaggttgagggtcggggactgactctgagtcgccagtctgaccgaaattgagtctctttctggcgggctgctggcccttcttgccgatgcccgtggaggagtcgggggaacgctgaggtgacggctctaccggtctcttctttgcaggagccgtcttagcgccttcctcaaccagaccgagaggttcgagaacccgcttcttggcctggaagactgctcgcccgaggttgcccccaaatgacgtatcttcttgcagacgctcctgaaactcggcgtcggcgtggttataccgcaggtacgggttgtcacccgcattgagctgctggtcgtaggccttgtcgtgctcgagggccgctgcgtccgccgcgttgacgggctcccccttgtcgagtccgttgaagggtccgaggtacttgtagccaggaagcaccagaccccggccgttgtcctgcttttgctggttggctttgggtttcggggctccaggtttcaggtcccaccactcgcgaatgccctcagagaggttgtcctcgagccaatctggaagataaccatcggcagccatacctgatttaaatcatttattgttcaaagatgcagtcatccaaatccacattgaccagatcgcaggcagtgcaagcgtctggcacctttcccatgatatgatgaatgtagcacagtttctgatacgcctttttgacgacagaaacgggtttagattctgacacgggaaagcactctaaacagtctttctgtccgtgagtgaagcagatatttgaattctgattcattctctcgcattgtctgcagggaaacagcatcagattcatgcccacgtgacgagaacatttgttttggtacctgtctgcgtagttgatcgaagcttccgcgtctgacgtcgatggctgcgcaactgactcgcgcacccgtttgggctcacttatatctgcgtcactgggggcgggtcttttcttggctccaccctttttgacgtagaattcatgctccacctcaaccacgtaatcctttgcccaccggaaaaagtctttgacttcctgcttggtgaccttcccaaagtcatgatccagacggcgggtgagttcaaatttgaacatccggtcttgcaacggctgctggtgttcgaaggtcgttgagttcccgtcgatcacggcgcacatgttggtgttggagatgacgatcgcgggagtcgggtctatctgggccgaggacttgcatttctggtccacgcgcaccttgcttcctccgagaatggctttggccgactccacgaccttggcggtcatcttcccctcctcccaccagatcaccatcttgtcgacacagtcgttgaagggaaagttctcattggtccagttgacgcagccgtagaaagggcgaattc

SEQ ID NO: 141 - protein, 728 aa, Artificial Sequence
  Description of Artificial Sequence: Synthetic polypeptide
MAADGYLPDWLEDNLSEGIREWWDLKPGAPKPKANQQKQDDGRGLVLPGYKYLRPFNGLDKGEPVNEADAAALEHDKAYDKQLEQGDNPYLKYNHADAEFQERLQEDTSFGGNLGRAVFQAKKRVLEPLGLVEEVAKTAPGKKRPIESPDSSTGIGKKGQQPAKKKLNFGQTGDSESVPDPQPLGEPPAAPSGLGSGTMAAGGGAPMADNNEGADGVGNASGNWHCDSTWLGDRVITTSTRTWALPTYNNHLYKQISSQSGATNDNHFFSYSTPWGYFDFNRFHCHFSPRDWQRLINNNWGFRPRKLRFKLFNIQVKEVTTNDGVTTIANNLTSTIQVFSDSEYQLPYVLGSAHQGCLPPFPADVFMIPQYGYLTLNNGSQSVGRSSFYCLEYFPSQMLRTGNNFEFSYTFEEVPFHSSYVHSQSLDRLMNPLIDQYLYYLARTQSTTGSTRELQFHQAGPNTMAEQSKNWLPGPCYRQQRLSKNIDSNNNSNFAWTGATKYHLNGRNSLTNPGVAMATNKDDEDQFFPINGVLVFGKTGAANKTTLENVLMTSEEEIKTTNPVATEEYGVVSSNLQSSTAGPQTQTVNSQGALPGMVWQNRDVCLQGPIWAKIPHTDGNFHPSPLMGGFGLKHPPPQILIKNTPVPANPPEVFTPAKFASFITQYSTGQVSVEIEWELQKENSKRWNPEIQYTSNYAKSNNVEFAVNNEGVYTEPRPIGTRYLTRNL

SEQ ID NO: 142 - DNA, 3106 bp, Adeno-associated virus
gcggccgcgaattcgcccttcgcagagaccaaagttcaactgaaacgaatcaaccggtttattgattaacaagtaattacaggttacgggtgaggtaacgggtgccaatggggcgaggctcagtataaaccccttcgttgttgacagcaaattccacattattagacttggcataatttgaggtgtactgaatctctggattccagcgtttgctgttttctttctgcagttcccactcgatctccacgctgacctggccggtgctgtactgcgtgataaatgaggcaaacttggcaggagtaaacacctctggaggattagcaggtaccggggtgtttttgatgagaatttgaggaggcgggtgtttgagtccaaatccgcccatcaggggagacgggtgaaagttgccgtccgtgtgaggaattttggcccagatgggaccctgcaggcacacgtcccggttctgccagaccatgccgggcagagccccctggctgttgacagtctgtgtctggggtccggccgtagacgattgcaggttgctggagaccacaccgtattcttctgtagccacgggattggtggttttgatctcctcctcgctggtcattagcacgttttccagcgttgtcttgttggcagcccccgttttgccaaaaaccagcactccgttgatgggaaagaactggtcctcgtcgtccttgttggtggccatggctacgcccgggttggttaatgaatttctaccattcagatggtatttagtggccccggtccaggcaaagttactgttgttgttgctgtctatgttttttgacagtctctgctgccgataacagggtccgggcagccagttctttgattgctcggccatggtgttgggcccagcctgatggaactgcagctcccttgtggaccccgtagtgctctgggtccgggccaggtagtacaggtactggtcgatgaggggattcatcagccggtctaggctctggctgtgcacatagctgctgtggaaaggcacttcctcaaaggtgtagctgaattcaaagttattgcccgttctcagcatctgagaaggaaagtactccaggcagtagaaggaggaacgtcccacagactgactgccgttgtttagagtcagatatccgtactgaggaatcatgaacacgtccgcagggaacggagggaggcagccctggtgcgcagagccgaggacgtacggcagttggtactccgagtccgagaagacctgaatcgtgctggtaaggttattagcgatggtcgtaacgccgtcgttcgtcgtgacctccttgacctggatgttgaacaacttgaaccgcagctttctgggccggaatccccagttgttgttgatgagtcgctgccagtcacgtggtgagaagtggcagtggaatctgttgaagtcaaaatagccccagggggtgctgtagctgaagaagtggttgtcgttggtagccccgctctgacttgatatctgcttgtagaggtggttgttgtaggtgggcagggcccaggtgcgggtgctggtggtgatgactctgtcgcccagccatgtggaatcgcaatgccaatttccggaggcattacccactccgtcggcgccttcgttattgtctgccattggtgcgccaccgcctgcagccattgtaccagatcccagacctgagggcgcggcgggaggttctccgagaggttgggggtcgggcactgactctgagtcgccagtctgcccaaagttgagcttctttttagcgggctgctggcctttcttgccgatgcccgtggaggagtcgggggattctatgggtctcttctttccaggagccgtcttagcgacttcctcaaccagaccgagaggttcgagaacccgcttcttggcctggaagactgctcgcccgaggttgcccccaaaagacgtatcttcttgaagacgctcctgaaactcggcgtcggcgtggttgtacttgaggtacgggttgtccccctgctcgagctgcttgtcgtaggccttgtcgtgctcgagggccgcggcgtctgcctcgttgaccggctctcccttgtcgagtccgttgaagggtctgaggtacttgtagccaggaagcaccagaccccggccgtcgtcctgcttttgctggttggctttgggtttcggggctccaggtttcaagtcccaccactcgcgaatgccctcagagaggttgtcctcgagccaatctggaagataaccatcggcagccatacctggtttaagtcatttattgctcagaaacacagtcatccaggtccacgttgaccagatcgcaggccgagcaagcaatctcgggagcccgccccagcagatgatgaatggcacagagtttccgatacgtcctctttctgacgaccggttgagattctgacacgccggggaaacattctgaacagtctctggtcccgtgcgtgaagcaaatgttgaaattctgattcactctctcgcatgtcttgcagggaaacagcatctgaagcatgcccgcgtgacgagaacatttgttttggtacctgtcggcaaagtccaccggagctccttccgcgtctgacgtcgatggattcgcgactgaggggcaggcccgcttgggctcgcttttatccgcgtcatcgggggcgggtctcttgttggccccaccctttctgacgtagaacccatgcgccacctcggtcacgtgatcctgcgcccagcggaagaaccttttgacttcctgctttgtcaccttgccaaagttatgctccagacggcgggtgggttcaaatttgaacatccggtcctgcaacggctgctggtgctcgaaggtggcgctgttcccgtcaatcacggcgcacatgttggtgttggaggtgacggtcacgggggtggggtcgatctgggcggacgacttgcacttttggtccacgcgcaccttgctgccgccgagaatggccttggcggactccacgaccttggccgtcatcttgccctcctcccaccagatcaccatcttgtcggcgcaatcgttgaagggaaagttctcattggtccagttgacgcagccgtagaaagggcgaattc

SEQ ID NO: 143 - protein, 728 aa, Artificial Sequence
  Description of Artificial Sequence: Synthetic polypeptide
MAADGYLPDWLEDNLSEGIREWWDLKPGAPKPKANQQKQDDGRGLVLPGYKYLGPFNGLDKGEPVNEADAAALEHDKAYDKQLEQGDNPYLKYNHADAEFQERLQEDTSFGGNLGRAVFQAKKRVLEPLGLVEEGAKTASGKKRPIESPDSSTGIGKKGQQPAKKKLNFGQTGDSESVPDPQPLGEPPAAPSGLGSGTMAAGGGAPMADNNEGADGVGNASGNWHCDSTWLGDRVITTSTRTWALPTYNNHLYKQISSQSGATNDNHFFGYSTPWGYFDFNRFHCHFSPRDWQRLINNNWGFRPRKLRFKLFNIQVKEVTTNDGVTTIANNLTSTIQVFSDSEYQLPYVLGSAHQGCLPPFPADVFMIPQYGYLTLNNGSQSVGRSSFCCLEYFPSQMLRTGNNFEFSYTFEEVPFHSSYAHSQSLDRLMNPLIDQYLYYLARTQSTTGSTRELQFHQAGPNTVAEQSKNWLPGPCYRQQRLSKNIDSNNNSNFAWTGATKYHLNGRNSLTNPGVAMATNKDDEDQFLPINGVLVFGKTGAANKTTLENVLMTSEEEIKTTNPVATEEYGVVSSNLQSSTAGPRTQTVNSQGALPGMVWQNRDVYLQGPIWAEIPHTDGNFHPSPLMGGFGLKHPPPQILIKNTPVPANPPEVFTPAKFASFITQYSTGQVSVEIEWELQKENSKRWNPEIQYTSNYAKSNNVEFAVNNEGVYTEPRPIGTRYLTRNL

SEQ ID NO: 144 - DNA, 3102 bp, Adeno-associated virus
gcggccgcgaattcgcccttcgcagagaccaaagttcaactgaaacgaatcaaccggtttattgattaacaagtaattacaggttacgggtgaggtaacgggtgccaatggggcgaggctcagtataaaccccttcgttgttgacagcaaattccacattattagacttggcataatttgaggtgtactgaatctctggattccagcgtttgctgttttctttctgcagttcccactcgatctccacgctgacctggccggtgctgtactgcgtgataaatgaggcaaacttggcaggagtaaacacctctggaggattagcaggtaccggggtgtttttgatgagaatttgaggaggcgggtgtttgagtccaaatccgcccatcaggggagacgggtgaaagttgccgtccgtgtgaggaatttcggcccagatgggaccctgcaggtacacgtcccggttctgccagaccatgccgggcagagccccctggctgttgacagtctgtgtccggggtccggccgtagacgattgcaggttgctggagaccacaccgtattcttctgtagccacgggattggtggttttgatctcctcctcgctggtcattagcacgttttccagcgttgtcttgttggcagcccccgttttgccaaaaaccagcactccgttgatgggaaggaactggtcctcgtcgtccttgttggtggccatggctacgcccgggttggttaatgaatttctaccattcagatggtatttagtggccccggtccaggcaaagttactgttgttgttgctgtctatgttttttgacagtctctgctgccgataacagggtccgggcagccagttctttgattgctcggccacggtgttgggcccagcctgatggaactgcagctcccttgtggaccccgtagtgctctgggtccgggccaggtagtacaggtactggtcgatgaggggattcatcagccggtccaggctctggctgtgcgcatagctgctgtggaaaggcacttcctcaaaggtgtagctgaattcaaagttattgcccgttctcagcatctgagaaggaaagtactccaggcagcagaaggaggaacgtcccacagactgactgccgttgtttagagtcagatatccgtactgaggaatcatgaacacgtccgcagggaacggagggaggcagccctggtgcgcagagccgaggacgtacggcagttggtactccgagtccgagaagacctgaatcgtgctggtaaggttattagcgatggtcgtaacgccgtcgttcgtcgtgacctccttgacctggatgttgaacaacttgaaccgcagctttctgggccggaatccccagttgttgttgatgagtcgctgccagtcacgtggtgagaagtggcagtggaatctgttgaagtcaaaatagccccagggggtgctgtagccgaagaagtggttgtcgttggtagccccgctctgacttgatatctgcttgtagaggtggttgttgtaggtgggcagggcccaggtgcgggtgctggtggtgatgactctgtcgcccagccatgtggaatcgcaatgccaatttccggaggcattacccactccgtcggcgccttcgttattgtctgccattggtgcgccaccgcctgcagccattgtaccagatcccagacctgagggcgcggcgggaggttctccgagaggttgggggtcgggcactgactctgagtcgccagtctgcccaaagttgagcttctttttagcgggctgctggcctttcttgccgatgcccgtggaggagtcgggggattctatgggtctcttctttccggaagccgtcttagcgccttcctcaaccagaccgagaggttcgagaacccgcttcttggcctggaagactgctcgcccgaggttgcccccaaaagacgtatcttcttgaagacgctcctgaaactcggcgtcggcgtggttgtacttgaggtacgggttgtccccctgctcgagctgcttgtcgtaggccttgtcgtgctcgagggccgcggcgtctgcctcgttgaccggctctcccttgtcgagtccgttgaagggtccgaggtacttgtagccaggaagcaccagaccccggccgtcgtcctgcttttgctggttggctttgggtttcggggctccaggtttcaagtcccaccactcgcgaatgccctcagagaggttgtcctcgagccaatctggaagataaccatcggcagccatacctggtttaagtcatttattgctcagaaacacagtcatccaggtccacgttgaccagatcgcaggccgagcaagcaatctcgggagcccgccccagcagatgatgaatggcacagagtttccgatacgtcctctttctgacgaccggttgagattctgacacgccggggaaacattctgaacagtctctggtcccgtgcgtgaagcaaatgttgaaattctgattcattctctcgcatgtcttgcagggaaacagcatctgaagcatgcccgcgtgacgagaacatttgttttggtacctgtcggcaaagtccaccggagctccttccgcgtctgacgtcgatggatccgcgactgaggggcaagcccgcttgggctcgcttttatccgcgtcatcgggggcgggtctcttgttggctccaccctttctgacgtagaactcatgcgccacctcggtcacgtgatcctgcgcccagcggaagaactctttgacttcctgctttgtcaccttgccaaagtcatgctccagacggcgggtgagttcaaatttgaacatccggtcttgtaacggctgctggtgctcgaaggtggtgctgttcccgtcaatcacggcgcacatgttggtgttggaagtgacgatcacgggggtgggatcgatctgggcggacgacttgcacttttggtccacgcgcaccttgctgccgccgagaatggccttggcggactccacgaccttggccgtcatcttgccctcctcccaccagatcaccatcttgtcgacgcaatcgttgaagggaaagttctcattggtccagttgacgcagccgaagggcgaattc

SEQ ID NO: 145 - protein, 728 aa, Adeno-associated virus
MAADGYLPDWLEDNLSEGIREWWDLKPGAPKPKANQQKQDDGRGLVLPGYRYLGPFNGLDKGEPVNEADAAALEHDKAYDKQLEQGDNPYLKYNHADAEFQERLQEDTSFGGNLGRAVFQAKKRVLEPLGLVEEGAKTAPGKKRPIESPDSSTGIGKNGQPPAKKKLNFGQTGDSESVPDPQPLGEPPAAPSGLGSGTMAAGGGAPMADNNEGADGVGNASGNWHCDSTWLGDRVITTSTRTWALPTYNNHLYKQISSQSGATNDNHFFGYSTPWGYFDFNRFHCHFSPRDWQRLINNNWGFRPRKLRFKLFNIQVKEVTTNDGVTTIANNLTSTIQVFSDSEYQLPYVLGSAHQGCLPPFPADVFMIPQYGYLTLNNGSQSVGRSSFYCLEYFPSQMLRTGNNFEFSYTFEEVPFHSSYAHSQSLDRLMNPLIDQYLYYLARTQSTTGSTRELQFHQAGPNTMAEQSKNWLPGPCYRQQRLSKNIDSNNNSNFAWTGATKYHLNGRNSLTNPGVAMATNKDDEDQFFPINGVLVFGKTGAANKTTLENVLMTSEEEIKTTNPVATEEYGVVSSNLQSSTAGPQTQTVNSQGALPGMVWQNRDVYLQGPIWAKIPHTDGNFHPSPLMGGFGLKHPPPQILIKNTPVPANPPEVFTPAKFASFITQYSTGQVSVEIEWELQKENSKRWNPEIQYTSNYAKSNNVEFAVNNEGVYTEPRPIGTRYLTRNL

SEQ ID NO: 146 - protein, 728 aa, Artificial Sequence
  Description of Artificial Sequence: Synthetic polypeptide
MAADGYLPDWLEGNLSEGIREWWDLKPGAPKPKANQQKQDDGRGLVLPGYRYLGPFNGLDKGEPVNEADAAALEHDKAYDKQLEQGDNPYLKYNHADAEFQERLQEDTSFGGNLGRAVFQAKKRVLEPLGLVEEGAKTAPGKKRPIESPDSSTGIGKNGQPPAKKKLNFGQTGDSESVPDPQPLGEPPAAPSGLGSGTMAAGGGAPMADNNEGADGVGNASGNWHCDSTWLGDRVITTSTRTWALPTYNNHLYKQISSQSGATNDNHFFGYSTPWGYFDFNRFHCHFSPRDWQRLINNNWGFRPRKLRFKLFNIQVKEVTTNDGVTTIANNLTSTIQVFSDSEYQLPYVLGSAHQGCLPPFPADVFMIPQYGYLTLNNGSQSVGRSSFYCLEYFPSQMLRTGDNFEFSYTFEEVPFHSSYAHSQSLDRLMNPLIDQYLYYLARTQSTTGSTRELQFHQAGPNTMAEQSKNWLPGPCYRQQRLSKNIDSNNNSNFAWTGATKYHLNGRNSLTNPGVAMATNKDDEDQFFPINGVLVFGKTGAANKTTLENVLMTSEEEIKTTNPVATEEYGVVSSNLQSSTAGPQTQTVNSQGALPGMVWQNRDVYLQGPIWAKIPHTDGNFHPSPLMGGFGLKHPPPQILIKNTPVPANPPEVFTPAKFASFITQYSTGQVSVEIEWELQKENSKRWNPEIQYTSNYAKSNNVEFAVNNEGVYTEPRPIGTRYLTRNL

SEQ ID NO: 147 - DNA, 3106 bp, Adeno-associated virus
gcggccgcgaattcgcccttcgcagagaccaaagttcaactgaaacgaatcagccggtttattgattaacaagtaattacaggttacgggtgaggtaacgggtgccaatggggcgaggctcagtataaaccccttcgttgttgacagcaaattccacattattagacttggcataatttgaggtgtactgaatctctggattccagcgtttgctgttttctttctgcagttcccactcgatctccacgctgacctggccggtgctgtactgcgtgataaatgaggcaaacttggcaggagtaaacacctctggaggattagcaggtaccggggtgtttttgatgagaatttgaggaggcgggtgtttgagtccaaatccgcccatcaggggagacgggtgaaagttgccgtccgtgtgaggaattttggcccagatgggaccctgcaggtacacgtcccggttctgccagaccatgccgggcagagccccctggctgttgacagtctgtgtctggggtccggccgtagacgattgcaggttgctggagaccacaccgtattcttctgtagccacgggattggtggttttgatctcctcctcgctggtcattagcacgttttccagcgttgtcttgttggcagcccccgttttgccaaaaaccagcactccgttgatgggaaagaactggtcctcgtcgtccttgttggtggccatggctacgcccgggttggttaatgaatttctaccattcagatggtatttagtggccccggtccaggcaaagttactgttgttgttgctgtctatgttttttgacagtctctgctgccgataacagggtccgggcagccagttctttgattgctcggccatggtgttgggcccagcctgatggaactgcagctcccttgtggaccccgtagtgctctgggtccgggccaggtagtacaggtactggtcgatgaggggattcatcagccggtccaggctctggctgtgcgcatagctgctgtggaaaggcacttcctcaaaggtgtagctgaattcaaagttatcgcccgttctcagcatctgagaaggaaagtactccaggcagtagaaggaggaacgtcccacagactgactgccgttgtttagagtcagatatccgtactgaggaatcatgaacacgtccgcagggaacggagggaggcagccctggtgcgcagagccgaggacgtacggcagttggtactccgagtccgagaagacctgaatcgtgctggtaaggttattagcgatggtcgtaacgccgtcgttcgtcgtgacctccttgacctggatgttgaacaacttgaaccgcagctttctgggccggaatccccagttgttgttgatgagtcgctgccagtcacgtggtgagaagtggcagtggaatctgttgaagtcaaaatagccccagggggtgctgtagccgaagaagtggttgtcgttggtagccccgctctgacttgatatctgcttgtagaggtggttgttgtaggtgggcagggcccaggtgcgggtgctggtggtgatgactctgtcgcccagccatgtggaatcgcaatgccaatttccggaggcattacccactccgtcggcgccttcgttattgtctgccattggtgcgccaccgcctgcagccattgtaccagatcccagacctgagggcgcggcgggaggttctccgagaggttgggggtcgggcactgactctgagtcgccagtctgcccaaagttgagcttctttttagcgggcggctggccgttcttgccgatgcccgtggaggagtcgggggattctatgggtctcttctttccaggagccgtcttagcgccttcctcaaccagaccgagaggttcgagaacccgcttcttggcctggaagactgctcgcccgaggttgcccccaaaagacgtatcttcttgaagacgctcctgaaactcggcgtcggcgtggttgtacttgaggtacgggttgtccccctgctcgagctgcttgtcgtaggccttgtcgtgctcgagggccgcggcgtctgcctcgttgaccggctctcccttgtcgagtccgttgaagggtccgaggtacctgtagccaggaagcaccagaccccggccgtcgtcctgcttttgctggttggctttgggtttcggggctccaggtttcaagtcccaccactcgcgaatgccctcagagaggttgccctcgagccaatctggaagataaccatcggcagccatacctggtttaagtcatttattgctcagaaacacagtcatccaggtccacgttggccagatcgcaggccgagcaagcaatctcgggagcccgccccagcagatgatgaatggcacagagtttccgatacgtcctctttctgacgaccggttgagattctgacacgccggggaaacattctgaacagtctctggtcccgtgcgtgaagcaaatgttgaaattctgattcattctctcgcatgtcttgcaggggaacagcatctgaagcatgcccgcgtgacgagaacatttgttttggtacctgtcggcaaagtccaccggagctccttccgcgtctgacgtcgatggatccgcgactgaggggcaggcccgcttgggctcgcttttatccgcgtcatcgggggcgggtctcttgttggctccaccctttctgacgtagaactcatacgccacctcggtcacgtgatcctgcgcccagcggaagaactctttgacttcctgctttgtcaccttgccaaagtcatgctccagacggcgggtgagttcaaatttgaacatccggtcttgtaacggctgctggtgctcgaaggtggtgctgttcccgtcaatcacggcgcacatgttggtgttggaagtgacgatcacgggggtgggatcgatctgggcggacgacttgcacttttggtccacgcgcaccttgctgccgccgagaatggccttggcggactccacgaccttggccgtcatcctgccctcctcccaccagatcaccatcttgtcgacgcaatcgttgaagggaaagttctcattggtccagttgacgcagccgtagaaagggcgaattc

SEQ ID NO: 148 - protein, 728 aa, Artificial Sequence
  Description of Artificial Sequence: Synthetic polypeptide
MAADGYLPDWLEDNLSEGIREWWDLKPGAPKPKANQQKQDDGRGLVLPGYKYLGPFNGLDKGEPVNEADAAALEHDKAYDKQLEQGDNPYLKYNHADAEFQERLQEDTSFGGNLGRAVFQAKKRVLEPLGLVEEGAKTAPGKKRPIESPDSSTGIGKKGQQPAKKKLNFGQTGDSESVPDPQPLGEPPAAPSGLGSGTMAAGGGAPMADNNEGADGVGNASGNWHCDSTWLGDRVITTSTRTWALPTYNNHLYKQISSQSGATNDNHFFGYSTPWGYFDFNRFHCHFSPRDWQRLINNNWGFRPRKLRFKLFNIQVKEVTTNDGVTTIANNLTSTIQVFSDSEYQLPYVLGSAHQGCLPPFPADVFMIPQYGYLTLNNGSQSMGRSSFYCLEYFPSQMLRTGNNFEFSYTFEEVPFHSSYAHSQSLDRLMNPLIDQYLYYLARTQSTTGSTRELQFHQAGPNTMAEQSKNWLPGPCYRQQRLSKNIDSNNNSNFAWTGATKYHLNGRNSLTNPGVAMATNKDDEGQFFPINGVLVFGKTGAANKTTLENVLMTSEEEIKTTNPVATEEYGVVSSNLQSSTAGPQTQTVNSQGALPGMVWQNRDVYLQGPIWAKIPHTDGNFHPSPLMGGFGLKHPPPQILIKNTPVPANPPGVFTPALFASFITQYSTGQVSVEIEWELQKENSKRWNPEIQYTSNYAKSNNVEFAVNNEGVYTEPRPIGTRYLTRNL

SEQ ID NO: 149 - DNA, 3098 bp, Adeno-associated virus
gaattcgcccttcgcagagaccaaagttcaactgaaacgaatcaaccggtttattgattaacaagtaattacaggttacgggtgaggtaacgggtgccaatggggcgaggctcagtataaaccccttcgttgttgacagcaaattccacattattagacttggcataatttgaggtgtactgaatctctggattccagcgtttgctgttttctttctgcagttcccactcgatctccacgctgacctggccggtgctgtactgcgtgataaatgaggcaaactaggcaggagtaaacacccctggaggattagcaggtaccggggtgtttttgatgagaatttgaggaggcgggtgtttgagtccaaatccgcccatcaggggagacgggtgaaagttgccgtccgtgtgaggaattttggcccagatgggaccctgcaggtacacgtcccggttctgccagaccatgccgggcagagccccctggctgttgacagtctgtgtctggggtccggccgtagacgattgcaggttgctggagaccacaccgtattcttctgtagccacgggattggtggttttgatctcctcctcgctggtcattagcacgttttccagcgttgtcttgttggcagcccccgttttgccaaaaaccagcactccgttgatgggaaagaactggccctcgtcgtccttgttggtggccatggctacgcccgggttggttaatgaatttctaccattcagatggtatttagtggccccggtccaggcaaagttactgttgttgttgctgtctatgttttttgacagtctctgctgccgataacagggtccgggcagccagttctttgattgctcggccatggtgttgggcccagcctgatggaactgcagctcccttgtggaccccgtagtgctctgggtccgggccaggtagtacaggtactggtcgatgaggggattcatcagccggtccaggctctggctgtgcgcatagctgctgtggaaaggcacttcctcaaaggtgtagctgaattcaaagttattgcccgttctcagcatctgagaaggaaagtactccaggcagtagaaggaggaacgtcccatagactgactgccgttgtttagagtcagatatccgtactgaggaatcatgaacacgtccgcagggaacggagggaggcagccctggtgcgcagagccgaggacgtacggcagttggtactccgagtccgagaagacctgaatcgtgctggtaaggttattagcgatggtcgtaacgccgtcgttcgtcgtgacctccttgacctggatgttgaacaacttgaaccgcagctttctgggccggaatccccagttgttgttgatgagtcgctgccagtcacgtggtgagaagtggcagtggaatctgttgaagtcaaaatagccccagggggtgctgtagccgaagaagtggttgtcgttggtagccccgctctgacttgatatctgcttgtagaggtggttgttgtaggtgggcagggcccaggtgcgggtgctggtggtgatgactctgtcgcccagccatgtggaatcgcaatgccaatttccggaggcattacccactccgtcggcgccttcgttattgtctgccattggtgcgccaccgcctgcagccattgtaccagatcccagacctgagggcgcggcgggaggttctccgagaggttgggggtcgggcactgactctgagtcgccagtctgcccaaagttgagcttctttttagcgggctgctggcctttcttgccgatgcccgtggaggagtcgggggattctatgggtctcttctttccaggagccgtcttagcgccttcctcaaccagaccgagaggttcgagaacccgcttcttggcctggaagactgctcgcccgaggttgcccccaaaagacgtatcttcttgaagacgctcctgaaactcagcgtcggcgtggttgtacttgaggtacgggttgtccccctgctcgagctgcttgtcgtaggccttgtcgtgctcgagggccgcggcgtctgcctcgttgaccggctctcccttgtcgagtccgttgaagggtccgaggtacttgtagccaggaagcaccagaccccggccgtcgtcctgcttttgctggttggctttgggtttcggggctccaggtttcaagtcccaccactcgcgaatgccctcagagaggttgtcctcgagccaatctggaagataaccatcggcagccatacctggtttaagtcatttattgctcagaaacacagtcatccaggtccacgttgaccagatcgcaggccgagcaagcaatctcgggagcccgccccagcagatgatgaatggcacagagtttccgatacgtcctctttctgacgaccggttgagattctgacacgccggggaaacattctgaacagtctctggtcccgtgcgtgaagcaaatgttgaaattctgattcattctctcgcatgtcttgcagggaaacagcatctgaagcatgcccgcgtgacgagaacatttgttttggtacctgtcggcaaagtccaccggagctccttccgcgtctgacgtcgatggatccgcgactgaggggcaggcccgcttgggctcgcttttatccgcgtcatcgggggcgggcctcttgttggctccaccctttctgacgtagaactcatgcgccacctcggtcacgtgatcctgcgcccagcggaagaactctttgacttcctgctttgtcaccttgccaaagtcctgctccagacggcgggtgagttcaaatttgaacatccggtcttgtaacggctgctggtgctcgaaggtggtgctgttcccgtcaatcacggcgcacatgttggtgttggaagtgacgatcacgggggtgggatcgatctgggcggacgacttgcacttttggtccacgcgcaccttgctgccgccgagaatggccttggcggactccacgaccttggccgtcatcttgccctcctcccaccagatcaccatcttgtcgacgcaatcgttgaagggaaagttctcattggtccagttgacgcagccgtagaaagggcgaattc

SEQ ID NO: 150 - DNA, 2187 bp, Adeno-associated virus
atggctgccgatggttatcttccagattggctcgagggcaacctctctgagggcattcgcgagtggtgggacttgaaacctggagccccgaaacccaaagccaaccagcaaaagcaggacgacggccggggtctggtgcttcctggctacaggtacctcggacccttcaacggactcgacaagggagagccggtcaacgaggcagacgccgcggccctcgagcacgacaaggcctacgacaagcagctcgagcagggggacaacccgtacctcaagtacaaccacgccgacgccgagtttcaggagcgtcttcaagaagatacgtcttttgggggcaacctcgggcgagcagtcttccaggccaagaagcgggttctcgaacctctcggtctggttgaggaaggcgctaagacggctcctggaaagaagagacccatagaatcccccgactcctccacgggcatcggcaagaacggccagccgcccgctaaaaagaagctcaactttgggcagactggcgactcagagtcagtgcccgacccccaacctctcggagaacctcccgccgcgccctcaggtctgggatctggtacaatggctgcaggcggtggcgcaccaatggcagacaataacgaaggcgccgacggagtgggtaatgcctccggaaattggcattgcgattccacatggctgggcgacagagtcatcaccaccagcacccgcacctgggccctgcccacctacaacaaccacctctacaagcagatatcaagtcagagcggggctaccaacgacaaccacttcttcggctacagcaccccctggggctattttgacttcaacagattccactgccacttctcaccacgtgactggcagcgactcatcaacaacaactggggattccggcccagaaagctgcggttcaagttgttcaacatccaggtcaaggaggtcacgacgaacgacggcgttacgaccatcgctaataaccttaccagcacgattcaggtcttctcggactcggagtaccaactgccgtacgtcctcggctctgcgcaccagggctgcctccctccgttccctgcggacgtgttcatgattcctcagtacggatatctgactctaaacaacggcagtcagtctgtgggacgttcctccttctactgcctggagtactttccttctcagatgctgagaacgggcgataactttgaattcagctacacctttgaggaagtgcctttccacagcagctatgcgcacagccagagcctggaccggctgatgaatcccctcatcgaccagtacctgtactacctggcccggacccagagcactacggggtccacaagggagctgcagttccatcaggctgggcccaacaccatggccgagcaatcaaagaactggctgcccggaccctgttatcggcagcagagactgtcaaaaaacatagacagcaacaacaacagtaactttgcctggaccggggccactaaataccatctgaatggtagaaattcattaaccaacccgggcgtagccatggccaccaacaaggacgacgaggaccagttctttcccatcaacggagtgctggtttttggcaaaacgggggctgccaacaagacaacgctggaaaacgtgctaatgaccagcgaggaggagatcaaaaccaccaatcccgtggctacagaagaatacggtgtggtctccagcaacctgcaatcgtctacggccggaccccagacacagactgtcaacagccagggggctctgcccggcatggtctggcagaaccgggacgtgtacctgcagggtcccatctgggccaaaattcctcacacggacggcaactttcacccgtctcccctgatgggcggatttggactcaaacacccgcctcctcaaattctcatcaaaaacaccccggtacctgctaatcctccagaggtgtttactcctgccaagtttgcctcatttatcacgcagtacagcaccggccaggtcagcgtggagatcgagtgggaactgcagaaagaaaacagcaaacgctggaatccagagattcagtacacctcaaattatgccaagtctaataatgtggaatttgctgtcaacaacgaaggggtttatactgagcctcgccccattggcacccgttacctcacccgtaacctgtaa

SEQ ID NO: 151 - protein, 728 aa, Adeno-associated virus; identical to SEQ ID NO: 146

SEQ ID NO: 152 - protein, 728 aa, Adeno-associated virus
MAADGYLPDWLEDNLSEGIREWWDLKPGAPKPKANQQKQDDGRGLVLPGYRYLGPFNGLDKGEPVNEADAAALEHDKAYDKQLEQGDNPYLKYNHADAEFQERLQEDTSFGGNLGRAVFQAKKRVLEPLGLVEEGAKTAPGKKRPIESPDSSTGIGKNGQPPAKKKLNFGQTGDSESVPDPQPLGEPPAAPSGLGSGTMAAGGGAPMADNNEGADGVGNASGNWHCDSTWLGDRVITTSTRTWALPTYNNHLYKQISSQSGATNDNHFFGYSTPWGYFDFNRFHCHFSPRDWQRLINNNWGFRPRKLRFKLFNIQVKEVTTNDGVTTIANNLTSTIQVFSDSEYQLPYVLGSAHQGCLPPFPADVFMIPQYGYLTLNNGSQSVGRSSFYCLEYFPSQMLRTGDNFEFSYTFEEVPFHSSYAHSQSLDRLMNPLIDQYLYYLARTQSTTGSTRELQFHQAGPNTMAEQSKNWLPGPCYRQQRLSKNIDSNNNSNFAWTGATKYHLNGRNSLTNPGVAMATNKDDEDQFFPINGVLVFGKTGAANKTTLENVLMTSEEEIKTTNPVATEEYGVVSSNLQSSTAGPQTQTVNSQGALPGMVWQNRDVYLQGPIWAKIPHTDGNFHPSPLMGGFGLKHPPPQILIKNTPVPANPPEVFTPAKFASFITQYSTGQVSVEIEWELQKENSKRWNPEIQYTSNYAKSNNVEFAVNNEGVYTEPRPIGTRYLTRNL

SEQ ID NO: 153 - protein, 728 aa, Adeno-associated virus; identical to SEQ ID NO: 145

SEQ ID NO: 154 - protein, 728 aa, Adeno-associated virus
MAADGYLPDWLEDNLSEGIREWWDLKPGAPKPKANQQKQDDGRGLVLPGYKYLGPFNGLDKGEPVNEADAAALEHDKAYDKQLEQGDNPYLKYNHADAEFQERLQEDTSFGGNLGRAVFQAKKRVLEPLGLVEEGAKTAPGKKRPIESPDSSTGIGKNGQPPAKKKLNFGQTGDSESVPDPQPLGEPPAAPSGLGSGTMAAGGGAPMADNNEGADGVGNASGNWHCDSTWLGDRVITTSTRTWALPTYNNHLYKQISSQSGATNDNHFFGYSTPWGYFDFNRFHCHFSPRDWQRLINNNWGFRPRKLRFKLFNIQVKEVTTNDGVTTIANNLTSTIQVFSDSEYQLPYVLGSAHQGCLPPFPADVFMIPQYGYLTLNNGSQSVGRSSFYCLEYFPSQMLRTGNNFEFSYTFEEVPFHSSYAHSQSLDRLMNPLIDQYLYYLARTQSTTGSTRELQFHQAGPNTMAEQSKNWLPGPCYRQQRLSKNIDSNNNSNFAWTGATKYHLNGRNSLTNPGVAMATNKDDEDQFFPINGVLVFGKTGAANKTTLENVLMTSEEEIKTTNPVATEEYGVVSSNLQSSTAGPQTQTVNSQGALPGMVWQNRDVYLQGPIWAKIPHTDGNFHPSPLMGGFGLKHPPPQILIKNTPVPANPPEVFTPAKFASFITQYSTGQVSVEIEWELQKENSKRWNPEIQYTSNYAKSNNVEFAVNNEGVYTEPRPIGTRYLTRNL

SEQ ID NO: 155 - protein, 728 aa, Adeno-associated virus
MAADGYLPDWLEDNLSEGIREWWDLKPGAPKPKANQQKQDDGRGLVLPGYKYLGPFNGLDKGEPVNEADAAALEHDKAYDKQLEQGDNPYLKYNHADAEFQERLQEDTSFGGNLGRAVFQAKKRVLEPLGLVEEGAKTAPGKKRPIESPDSSTGIGKKGQQPAKKKLNFGQTGDSESVPDPQPLGEPPAAPSGLGSGTMAAGGGAPMADNNEGADGVGNASGNWHCDSTWLGDRVITTSTRTWALPTYNNHLYKQISSQSGATNDNHFFGYSTPWGYFDFNRFHCHFSPRDWQRLINNNWGFRPRKLRFKLFNIQVKEVTTNDGVTTIANNLTSTIQVFSDSEYQLPYVLGSAHQGCLPPFPADVFMIPQYGYLTLNNGSQSVGRSSFYCLEYFPSQMLRTGNNFEFSYTFEEVPFHSSYAHSQSLDRLMNPLIDQYLYYLARTQSTTGSTRELQFHQAGPNTMAEQSKNWLPGPCYRQQRLSKNIDSNNNSNFAWTGATKYHLNGRNSLTNPGVAMATNKDDEDQFFPINGVLVFGKTGAANKTTLENVLMTSEEEIKTTNPVATEEYGVVSSNLQSSTAGPQTQTVNSQGALPGMVWQNRDVYLQGPIWAKIPHTDGNFHPSPLMGGFGLKHPPPQILIKNTPVPANPPEVFTPAKFASFITQYSTGQVSVEIEWELQKENSKRWNPEIQYTSNYAKSNNVEFAVNNEGVYTEPRPIGTRYLTRNL

SEQ ID NO: 156 - DNA, 2215 bp, Artificial Sequence
  Description of Artificial Sequence: Synthetic polynucleotide
atggctgccgatggttatcttccagattggctcgaggacactctctctgaaggaataagacagtggtggaagctcaaacctggcccaccaccaccaaagcccgcagagcggcataaggacgacagcaggggtcttgtgcttcctgggtacaagtacctcggacccttcaacggactcgacaagggagagccggtcaacgaggcagacgccgcggccctcgagcacgacaaagcctacgaccggcagctcgacagcggagacaacccgtacctcaagtacaaccacgccgacgccgagttccaggagcggctcaaagaagatacgtcttttgggggcaacctcgggcgagcagtcttccaggccaaaaagaggcttcttgaacctcttggtctggttgaggaagcggctaagacggctcctggaaagaagaggcctgtagagcactctcctgtggagccagactcctcctcgggaaccggaaaggcgggccagcagcctgcaagaaaaagattgaattttggtcagactggagacgcagactcagtcccagaccctcaaccaatcggagaacctcccgcagccccctcaggtgtgggatctcttacaatggctgcaggcggtggcgcaccaatggcagacaataacgagggcgccgacggagtgggtaattcctcgggaaattggcattgcgattccacatggatgggcgacagagtcatcaccaccagcacccgaacctgggccctgcccacctacaacaaccacctctacaagcaaatctccaacagcacatctggaggatcttcaaatgacaacgcctacttcggctacagcaccccctgggggtattttgactttaacagattccactgccacttttcaccacgtgactggcagcgactcatcaacaacaactggggattccggcccaagagactcagcttcaagctcttcaacatccaggtcaaggaggtcacgcagaatgaaggcaccaagaccatcgccaataacctcaccagcaccatccaggtgtttacggactcggagtaccagctgccgtacgttctcggctctgcccaccagggctgcctgcctccgttcccggcggacgtgttcatgattccccagtacggctacctaacactcaacaacggtagtcaggccgtgggacgctcctccttctactgcctggaatactttccttcgcagatgctgagaaccggcaacaacttccagtttacttacaccttcgaggacgtgcctttccacagcagctacgcccacagccagagcttggaccggctgatgaatcctctgattgaccagtacctgtactacttgtctcggactcaaacaacaggaggcacgacaaatacgcagactctgggcttcagccaaggtgggcctaatacaatggccaatcaggcaaagaactggctgccaggaccctgttaccgccagcagcgagtatcaaagacatctgcggataacaacaacagtgaatactcgtggactggagctaccaagtaccacctcaatggcagagactctctggtgaatccgggcccggccatggcaagccacaaggacgatgaagaaaagtttttttcctcagagcggggttctcatctttgggaagcaaggctcagagaaaacaaatgtggacattgaaaaggtcatgattacagacgaagaggaaatcaggacaaccaatcccgtggctacggagcagtatggttctgtatctaccaacctccagagaggcaacagacaagcagctaccgcagatgtcaacacacaaggcgttcttccaggcatggtctggcaggacagagatgtgtaccttcaggggcccatctgggcaaagattccacacacggacggacattttcacccctctcccctcatgggtggattcggacttaaacaccctccgcctcagatcctgatcaagaacacgcctgtacctgcggatcctccgaccaccttcaaccagtcaaagctgaactctttcatcacccagtattctactggccaagtcagcgtggagatcgagtgggagctgcagaaggaaaacagcaagcgctggaaccccgagatccagtacacctccaactactacaaatctacaagtgtggactttgctgttaatacagaaggcgtgtactctgaaccccgccccattggcacccgttacctcacccgtaatctgtaa

SEQ ID NO: 157 - protein, 737 aa, Artificial Sequence
  Description of Artificial Sequence: Synthetic polypeptide
MAADGYLPDWLEDTLSEGIRQWWKLKPGPPPPKPAERHKDDSRGLVLPGYKYLGPFNGLDKGEPVNEADAAALEHDKAYDRQLDSGDNPYLKYNHADAEFQERLKEDTSFGGNLGRAVFQAKKRLLEPLGLVEEAAKTAPGKKRPVEHSPVEPDSSSGTGKAGQQPARKRLNFGQTGDADSVPDPQPIGEPPAAPSGVGSLTMAAGGGAPMADNNEGADGVGNSSGNWHCDSTWMGDRVITTSTRTWALPTYNNHLYKQISNSTSGGSSNDNAYFGYSTPWGYFDFNRFHCHFSPRDWQRLINNNWGFRPKRLSFKLFNIQVKEVTQNEGTKTIANNLTSTIQVFTDSEYQLPYVLGSAHQGCLPPFPADVFMIPQYGYLTLNNGSQAVGRSSFYCLEYFPSQMLKTGNNFQFTYTFEDVPFHSSYAHSQSLDRLMNPLIDQYLYYLSRTQTTGGTTNTQTLGFSQGGPNTMANQAKNWLPGPCYRQQRVSKTSADNNNSEYSWTGATKYHLNGRDSLVNPGPAMASHKDDEEKFFPQSGVLIFGKQGSEKTNVDIEKVMITDEEEIRTTNPVATEQYGSVSTNLQRGNRQAATADVNTQGVLPGMVWQDRDVYLQGPIWAKIPHTDGHFHPSPLMGGFGLKHPPPQILIKNTPVPADPPTTFNQSKLNSFITQYSTGQVSVEIEWELQKENSKRWNPEIQYTSNYYKSTSVDFAVNTEGVYSEPRPIGTRYLTRNL

SEQ ID NO: 158 - protein, 737 aa, Artificial Sequence
  Description of Artificial Sequence: Synthetic polypeptide
MAADGYLPDWLEDTLSEGIRQWWKLKPGPPPPKPAERHKDDSRGLVLPGYKYLGPFNGLDKGEPVNEADAAALEHDKAYDRQLDSGDNPYLKYNHADAEFQERLKEDTSFGGNLGRAVFQAKKRLLEPLGLVEEAAKTAPGKKRPVEHSPVEPDSSSGTGKAGQQPARKRLNFGQTGDADSVPDPQPIGEPPAAPSGVGSLTMAAGGGAPMADNNEGADGVGNSSGNWHCDSTWMGDRVITTSTRTWALPTYNNHLYKQISNSTSGGSSNDNAYFGYSTPWGYFDFNRFHCHFSPRDWQRLINNNWGFRPKRLSFKLFNIQVKEVTQNEGTKTIANNLTSTIQVFTDSEYQLPYVLGSAHQGCLPPFPADVFMIPQYGYLTLNNGSQAVGRSSFYCLEYFPSQMLKTGNNFQFTYTFEDVPFHSSYAHSQSLDRLMNPLIDQYLYYLSRTQTTGGTTNTQTLGFSQGGPNTMANQAKNWLPGPCYRQQRVSKTSADNNNSEYSWTGATKYHLNGRDSLVNPGPAMASHKDDEEKFFPQSGVLIFGKQGSEKTNVDIEKVMITDEEEIRTTNPVATEQYGSVSTNLQQGNTQAATADVNTQGVLPGMVWQDRDVYLQGPIWAKIPHTDGHFHPSPLMGGFGLKHPPPQILIKNTPVPADPPTTFNQSKLNSFITQYSTGQVSVEIEWELQKENSKRWNPEIQYTSNYYKSTSVDFAVNTEGVYSEPRPIGTRYLTRNL

SEQ ID NO: 159 - protein, 737 aa, Artificial Sequence
  Description of Artificial Sequence: Synthetic polypeptide
MAADGYLPDWLEDTLSEGIRQWWKLKPGPPPPKPAERHKDDSRGLVLPGYKYLGPFNGLDKGEPVNEADAAALEHDKAYDRQLDSGDNPYLKYNHADAEFQERLKEDTSFGGNLGRAVFQAKKRLLEPLGLVEEAAKTAPGKKRPVEHSPVEPDSSSGTGKAGQQPARKRLNFGQTGDADSVPDPQPIGEPPAAPSGVGSLTMAAGGGAPMADNNEGADGVGNSSGNWHCDSTWMGDRVITTSTRTWALPTYNNHLYKQISNSTSGGSSNDNAYFGYSTPWGYFDFNRFHCHFSPRDWQRLINNNWGFRPKRLSFKLFNIQVKEVTQNEGTKTIANNLTSTIQVFTDSEYQLPYVLGSAHQGCLPPFPADVFMIPQYGYLTLNNGSQAVGRSSFYCLEYFPSQMLRTGNNFQFTYTFEDVPFHSSYAHSQSLDRLMNPLIDQYLYYLSRTQTTGGTTNTQTLGFSQGGPNTMANQAKNWLPGPCYRQQRVSKTSADNNNSEYSWTGATKYHLNGRDSLVNPGPAMASHKDDEEKFFPQSGVLIFGKQGSEKTNVDIEKVMITDEEEIRTTNPVATEQYGSVSTNLQQGNTQAATADVNTQGVLPGMVWQDRDVYLQGPIWAKIPHTDGHFHPSPLMGGFGLKHPPPQILIKNTPVPADPPTTFNQSKLNSFITQYSTGQVSVEIEWELQKENSKRWNPEIQYTSNYYKSTSVDFAVNTEGVYSEPRPIGTRYLTRNL

SEQ ID NO: 160 - protein, 729 aa, Artificial Sequence
  Description of Artificial Sequence: Synthetic polypeptide
MAADGYLPDWLEDNLSEGIREWWDLKPGAPKPKANQQKQDDGRGLVLPGYKYLGPFNGLDKGEPVNAADAAALEHDKAYDQQLKAGDNPYLRYNHADAEFQERLQEDTSFGGNLGRAVFQAKKRVLEPLGLVEEGAKTAPGKKRPIDSPDSSTGIGKKGQQPAKKKLNFGQTGDSESVPDPQPLGEPPAAPSSVGSGTMAAGGGAPTADNNEGADGVGNASGNWHCDSTWLGDRVITTSTRTWALPTYNNHLYKQISSSSSGATNDNHYFGYSTPWGYFDFNRFHCHFSPRDWQRLINNNWGFRPKKLRFKLFNIQVKEVTTNDGVTTIANNLTSTVQVFSDSEYQLPYVLGSAHQGCLPPFPADVFMIPQYGYLTLNNGSQSVGRSSFYCLEYFPSQMLRTGNNFEFSYSFEDVPFHSSYAHSQSLDRLMNPLIDQYLYYLARTQSTTGSTRELQFHQAGPNTMAEQSKNWLPGPCYRQQRLSKNLDFNNNSNFAWTAATKYHLNGRNSLTNPGIPMATNKDDEDQFFPINGVLVFGKTGAANKTTLENVLMTSEEEIKTTNPVATEEYGVVSSNLQSSTAGPQSQTINSQGALPGMVWQNRDVYLQGPIWAKIPHTDGNFHPSPLMGGFGLEHPPPQILIKNTPVPANPPEVFTPAKFASFITQYSTGQVSVEIEWELQKENSKRWNPEIQYTSNYAKSNNVEFAVNPDGVYTEPRPIGTRYLTRNL

SEQ ID NO: 161 - DNA, 3075 bp, Adeno-associated virus
tgagaactttcctttcaacgattgcgtcggacaagatggtgatctggtgggaggaggggaagatgaccgccaaggtcgtggagtcggccaaagccattcttggaggaagcaaggtgcgtgtggaccagaaatgcaagtcctcggcccagatagacccgactcccgtgatcgtcacctccaacaccaacatgtgcgccgtgattgacgggaactcaacgaccttcgagcaccagcagccgttgcaagaccggatgttcaaatttgaacttacccgccgtctggatcatgactttggaaaggtcaccaagcaggaagtgaaagactttttccggtgggcaaaggatcacgtggttgaggtggagcatgaattctacgtcaaaaagggtggagctaagaaaagacccgcccccagtgacgcagatataagtgagcccaaacgggcgcgcgagtcagttgcgcagccatcaacgtcagacgcggaagcttcgatcaactacgcggacaggtaccaaaaacaaatgttctcgtcacgtgggcatgaatctgatgctgtttccctgcagacaatgcgagagaatgaatcagaattcaaatatctgcttcactcacggacagaaagactgtttagagtgctttcccgtgtcagaatctcaacccgtttctgtcgtcaaaaaggcgtatcagaaactgtgctacattcatcatatcatgggaaaggtgccagacgcttgcactgcctgcgatctggtcaatgtggatttggatgactgcatctctgaacaataaatgatttaaatcaggtatggctgccgatggttatcctccagattggctcgaggacactctctctgaagggataagacagtggtggaagctcaaacctggcccaccaccaccaaagcccgcagagcggcataaggacgacagcaggggtcttgtgcttcctgggtacaagtacctcggacccttcaacggactcgacaagggggagccggtcaacgaggcagacgccgcggccctcgagcacgacaaggcctacgaccggcagctcgacagcggagacaacccgtacctcaagtacaaccacgccgacgcagagtttcaggagcgccttaaagaagatacgtcttttgggggcaacctcggacgagcagtcttccaggcgaaaaagagggttcttgaacctctgggcctggttgaggaacctgttaagacggctccgggaaaaaagaggccggtagagcactctcctgtggagccagactcctcctcgggaaccggaaaagcgggccagcggcctgcaagaaaaagattaaattttggtcagactggagacgcagactccgtacctgacccccagcctctcggacagccaccagcagccccctctggtctgggatctactacaatggctacaggcagtggcgcaccaatggcagacaataacgagggtgccgatggagtgggtaattcctcaggaaattggcattgcgattcccaatggctgggcgacagagtcatcaccaccagcacccgaacctgggccctgcccacatacaacaaccacctctacaagcaaatctccagccaatcaggagccagcaacgacaaccactactttggctacagcaccccctgggggtattttgacttcaacagattccactgccacttttcaccacgtgactggcaaagactcatcaacaacaactggggattccggcccaaaagactcaacttcaagctctttaatattcaagtcaaagaggtcacgcagaatgacggtacgacgacgattgccaataaccttaccagcacggttcaggtgtttactgactcggagtaccagctcccgtacgtcctgggctcggcgcatcaaggatgcctcccgccgtttccagcggacgtcttcatggtcccacagtatggatacctcaccctgaacaacgggagtcaggcggtaggacgctcttccttttactgcctggagtactttccttctcagatgctgcgtactggaaacaactttcagttcagctacacttttgaagacgtgcctttccacagcagctacgctcacagccagagtctggatcggctgatgaatcctctgatcgaccagtacctgtattatctgaacaagacacaaacaaatagtggaactcttcagcagtctcggctactgtttagccaagctggaccaaccaacatgtctcttcaagctaaaaactggctgcctggaccttgctacagacagcagcgtctgtcaaaacaggcaaacgacaacaacaacagcaactttccctggactgcagctacaaagtatcatctaaatggccgggactcgttggttaatccaggaccagctatggccagtcacaaggatgacgaagaaaagtttttccccatgcatggaaccctgatatttggtaaacaaggaacaaatgccaacgacgcggatttggaaaatgtcatgattacagatgaagaagaaatcagggccaccaatcccgtggctacggagcagtacgggactgtgtcaaataatttgcaaaactcaaacactggtccaactactggaactgtcaatcgccaaggagcgttacctggtatggtgtggcaggatcgagacgtgtacctgcagggacccatttgggccaagattcctcacaccgatggacactttcatccttctccactgatgggaggttttggactcaaacacccgcctcctcagatcatgatcaaaaacactcccgttccagccaatcctcccacaaacttcagttctgccaagtttgcttctttcatcacacagtattccacgggacaggtcagcgtggagatcgagtgggagctgcagaaggagaacagcaaacgctggaatcccgaaattcagtacacttccaactacaacaagtctgttaatgtggactttactgtggacactaatggtgtgtattcagagcctcgccccattggcaccagatacctgactcgtaatctgtaattgcttgttaatcaataaaccgtttaattcgtttcagttgaactttggtctctgcgaagggcgaa

SEQ ID NO: 162 - DNA, 3142 bp, Adeno-associated virus
aaaacgacgggccagtgattgtaatacgactcactatagggcgaaattgaaattagcggccgcgaattcgcctttcgcagagaccaaagttcaactgaaacgaattaaacggtttattgattaacaagcaattacagattacgagtcaggtatctggtgccaatggggcgaggctctgaatacacaccattagtgtccacagtaaagtccacattaacagacttgttgtagttggaagtgtactgaatttcgggattccagcgtttgctgttctccttctgcagctcccactcgatctccacgctgacctgtcccgtggaatactgtgtgatgaaagaagcaaacttggcagaactgaagtttgtgggaggattggctggaacgggagtgtttttgatcatgatctgaggaggcgggtgtttgagtccaaaacctcccatcagtggagaaggatgaaagtgtccatcggtgtgaggaatcttggcccaaatgggtccctgcaggtacacgtctcgatcctgccacaccataccaggtaacgctccttggtgattgacagttccagtagttggaccagtgtttgagttttgcaaattatttgacacagtcccgtactgctccgtagccacgggattggtggccctgatttcttcttcatctgtaatcatgacattttccaaatccgcgtcgttggcatttgttccttgtttaccaaatatcagggttccatgcatggggaaaaacttttcttcgtcatccttgtgactggccatagctggtcctggattaaccaacgagtcccggccatttagatgatactttgtagctgcagtccagggaaagttgctgttgttgttgtcgtttgcctgttttgacagacgctgctgtctgtagcaaggtccaggcagccagtttttagcttgaagagacatgttggttggtccagcttggctaaacagtagccgagactgctgaagagttccactatttgtttgtgtcttgttcagataatacaggtactggtcgatcagaggattcatcagccgatccagactctggctgtgagcgtagctgctgtggaaaggcacgtcttcaaaagtgtagctgaactgaaagttgtttccagtacgcagcatctgagaaggaaagtactccaggcagtaaaaggaagagcgtcctaccgcctgactcccgttgttcagggtgaggtatccatactgtgggaccatgaagacgtccgctggaaacggcgggaggcatccttgatgcgccgagcccaggacgtacgggagctggtactccgagtcagtaaacacctgaaccgtgctggtaaggttattggcaatcgtcgtcgtaccgtcattctgcgtgacctctttgacttgaatattaaagagcttgaagttgagtcttttgggccggaatccccggttgttgttgacgagtctttgccagtcacgtggtgaaaagtggcagtggaatctgttgaagtcaaaatacccccagggggtgctgtagccaaagtagtggttgtcgttgctggctcctgattggctggagatttgcttgtagaggtggttgttgtatgtgggcagggcccaggttcgggtgctggtggtgatgactctgtcgcccagccattgggaatcgcaatgccaatttcctgaggaattacccactccatcggcaccctcgttattgtctgccattggtgcgccactgcctgtagccattgtagtagatcccagaccagagggggctgctggtggctgtccgagaggctgggggtcaggtacggagtctgcgtctccagtctgaccaaaatttaatctttttcttgcaggctgctggcccgcttttccggttcccgaggaggagtctggctccacaggagagtgctctaccggcctcttttttcccggagccgtcttaacaggctcctcaaccaggcccagaggttcaagaaccctctttttcgcctggaagactgctcgtccgaggttgcccccaaaagacgtatcttctttaaggcgctcctgaaactctgcgtcggcgtggttgtacttgaggtacgggttgtctccgctgtcgagctgccggtcgtaggccttgtcgtgctcgagggccgcggcgtctgcctcgttgaccggctcccccttgtcgagtccgttgaagggtccgaggtacttgtacccaggaagcacaagacccctgctgtcgtccttatgccgctctgcgggctttggtggtggtgggccaggtttgagcttccaccactgtcttattccttcagagagagtgtcctcgagccaatctggaagataaccatcggcagccatacctgatttaaatcatttattgttcagagatgcagtcatccaaatccacattgaccagatcgcaggcagtgcaagcgtctggcacctttcccatgatatgatgaatgtagcacagtttctgatacgcctttttgacgacagaaacgggttgagattctgacacgggaaagcactctaaacagtctttctgtccgtgagtgaagcagatatttgaattctgattcattctctcgcattgtctgcagggaaacagcatcagattcatgcccacgtgacgagaacatttgttttggtacctgtccgcgtagttgatcgaagcttccgcgtctgacgtcgatggctgcgcaactgactcgcgcgcccgtttgggctcacttatatctgcgtcactgggggcgggtcttttcttagctccaccctttttgacgtagaattcatgctccacctcaaccacgtgatcctttgcccaccggaaaaagtctttcacttcctgcttggtgacctttccaaagtcatgatccagacggcgggtaagttcaaatttgaacatccggtcttgcaacggctgctggtgctcgaaggtcgttgagttcccgtcaatcacggcgcacatgttggtgttggaggtgacgatcacgggagtcgggtctatctgggccgaggacttgcatttctggtccacacgcaccttgcttcctccaagaatggctttggccgactccacgaccttggcggtcatcttcccctcctcccaccagatcaccatcttgtcgacgcaatggtaaaaggaaagttctcattgg

SEQ ID NO: 163 - protein, 735 aa, Adeno-associated virus 2
MAADGYLPDWLEDTLSEGIRQWWKLKPGPPPPKPAERHKDDSRGLVLPGYKYLGPFNGLDKGEPVNEADAAALEHDKAYDRQLDSGDNPYLKYNHADAEFQERLKEDTSFGGNLGRAVFQAKKRVLEPLGLVEEPVKTAPGKKRPVEHSPVEPDSSSGTGKAGQQPARKRLNFGQTGDADSVPDPQPLGEPPATPAAVGPTTMASGGGAPMADNNEGADGVGNASGNWHCDSTWLGDRVITTSTRTWALPTYNNHLYKQISSASTGASNDNHYFGYSTPWGYFDFNRFHCHFSPRDWQRLINNNWGFRPKRLNFKLFNIQVKEVTQNDGTTTIANNLTSTVQVFTDSEYQLPYVLGSAHQGCLPPFPADVFMIPQYGYLTLNNGSQAVGRSSFYCLEYFPSQMLRTGNNFTFSYTFEDVPFHSSYAHSQSLDRLMNPLIDQYLYYLNRTQNQSGSAQDKALLFSRGSPAGMSVQPKNWLPGPCYRQQRVSKTKTDNNNSNFTWTGASKYNLNGRESIINPGTAMASHKDDKDKFFPMSGVMIFGKESAGASNTALDNVMITDEEEIKATNPVATERFGTVAVNFQSSSTDPATGDVHVMGALPGMVWQDRDVYLQGPIWAKIPHTDGHFHPSPLMGGFGLKHPPPQILIKNTPVPANPPAEFSATKFASFITQYSTGQVSVEIEWELQKENSKRWNPEVQYTSNYAKSANVDFTVDNNGLYTEPRPIGTRYLTRP

SEQ ID NO: 164 - protein, 740 aa, Adeno-associated virus 2
MAADGYLPDWLEDTLSEGIRQWWKLKPGPPPPKPAERHKDDSRGLVLPGYKYLGPFNGLDKGEPVNAADAAALEHDKAYDRQLDSGDNPYLKYNHADAEFQERLKEDTSFGGNLGRAVFQAKKRVLEPLGLVEEPVKTAPGKKRPVEHSPVEPDSSSGTGKAGQQPARKRLNFGQTGDADSVPDPQPLGQPPAAPSGLGTNTMATGSGAPMADNNEGADGVGNSSGNWHCDSTWMGDRVITTSTRTWALPTYNNHLYKQISSQSGASNDNHYFGYSTPWGYFDFNRFHCHFSPRDWQRLINNNWGFRPKRLNFKLFNIQVKEVTQNDGTTTIANNLTSTVQVFTDSEYQLPYVLGSAHQGCLPPFPADVFMVPQYGYLTLNNGSQAVGRSSFYCLEYFPSQMLRTGNNFTFSYTFEDVPFHSSYAHSQSLDRLMNPLIDQYLYYLSRTNTPSGTTTQSGLQFSQAGASDIRDQSRNWLPGPCYRQQRVSKTSADNNNSEYSWTGATKYHLNGRDSLVNPGPAMASHKDDEEKFFPQSGVLIFGKQGSEKTNVDIEKVMITDEEEIRTTNPVATEQYGSVSTNLQRGNRQAATADVNTQGVLPGMVWQDRDVYLQGPIWAKIPHTDGHFHPSPLMGGFGLKHPPPQILIKNTPVPANPSTTFSAAKFASFITQYSTGQVSVEIEWELQKENSKRWNPEIQYTSNYNKSVNVDFTVDTNGVYSEPRPIGTRYLTRNLLLAAA

SEQ ID NO: 165 - protein, 734 aa, Adeno-associated virus 2
MAADGYLPDWLEDTLSEGIRQWWKLKPGPPPPKPAERHKDDSRGLVLPGYKYLGPFNGLDKGEPVNEADAAALEHDKAYDRQLDSGDNPYLKYNHADAEFQERLKEDTSFGGNLGRAVFQAKKRVLEPLGLVEEPVKTAPGKKRPVEHSPVEPDSSSGTGKAGQQPARKRLNFGQTGDADSVPDPQPLGQPPAAPSGLGTNTMATGSGAPMADNNEGADGVGNSSGNWHCDSTWMGDRVITTSTRTWALPTYNNHLYKQISSQSGASNDNHYFGYSTPWGYFDFNRFHCHFSPRDWQRLINNNWGFRPKRLNFKLFNIQVKEVTQNDGTTTIANNLTSTVQVFTDSEYQLPYVLGSAHQGCLPPFPADVFMVPQYGYLTLNNGSQAVGRSSFYCLEYFPSQMLRTGNNFTFSYTFEDVPFHSSYAHSQSLDRLMNPLIDQYLYYLSRTNTPSGTTTQSGLQFSQAGASDIRDQSRNWLPGPCYRQQRVSKTSADNNNSEYSWTGATMYHLNGRDSLVNPGPAMASHKDDEEKFFPQSGVLIFGKQGSEKTNVDIEKVMITDEEEIRTTNPVATEQYGSVSTNLQRGNRQAATADVNTQGVLPGMVWQDRDVYLQGPIWAKIPHTDGHFHPSPLMGGFGLKHPPPQILIKNTPVPANPSTTFSAAKFASFITQYSTGQVSVEIEWELQKENSKRWNPEIQYTSNYNKSINVDFTVDTNGVYSEPRPIGTRYLTRN

SEQ ID NO: 166 - protein, 734 aa, Adeno-associated virus 2
MAADGYLPDWLEDTLSEGIRQWWKLKPGPPPPKPAERHKDDSRGLVLPGYKYLGPFNGLDKGEPVNEADAAALEHDKAYDRQLDSGDNPYLKYNHADAEFQERLKEDTSFGGNLGRAVFQAKKRVLEPLGLVEEPVKTAPGKKRPVEHSPVEPDSSSGTGKAGQQPARKRLNFGQTGDADSVPDPQPLGQPPAAPSGLGTNTMATGSGAPMADNNEGADGVGNSSGNWHCDSTWMGDRVITTSTRTWALPTYNNHLYKQISSQSGASNDNHYFGYSTPWGYFDFNRFHCHFSPRDWQRLINNNWGFRPKRLNFKLFNIQVKEVTQNDGTTTIANNLTSTVQVFTDSEYQLPYVLGSAHQGCLPPFPADVFMVPQYGYLTLNNGSQAVGRSSFYCLEYFPSQMLRTGNNFTFSYTFEDVPFHSSYAHSQSLDRLMNPLIDQYLYYLSRTNTPSGTTTQSGLQFSQAGASDIRDQSRNWLPGPCYRQQRVSKTSADNNNSEYSWTGATKYHLNGRDSLVNPGPAMASHKDDEEKFFPQSGVLIFGKQGSEKTNVDIEKVMITDEEEIRTTNPVATEQYGSVSTNLQRGNRQAATADVNTQGVLPGMVWQDRDVYLQGPIWAKIPHTDGHFHPSPLMGGFGLKHPPPQILIKNTPVPANPSTTFSEAKFASFITQYSTGQVSVEIEWELQKENSKRWNPEIQYTSNYNKSVNVDFTVDTNGVYSEPRPIGTRYLTRN

SEQ ID NO: 167 - protein, 739 aa, Adeno-associated virus 2
MAADGYLPDWLEDTLSEGIRQWWKLKPGPPPPKPAERHKDDSRGLVLPGYKYLGPFNGLDKGEPVNEADAAALEHDKAYDRQLDSGDNPYLKYNHADAEFQERLKEDTSFGGNLGRAVFQAKKRVLEPLGLVEEPVKTAPGKKRPVEHSPVEPDSSSGTGKAGQQPARKRLNFGQTGDADSVPDPQPLGQPPAAPSGLGTNTMATGSGAPMADNNEGADGVGNSSGNWHCDSTWMGDRVITTSTRTWALPTYNNHLYKQISSQSGASNDNHYFGYSTPWGYFDFNRFHCHFSPRDWQRLINNNWGFRPKRLNFKLFNIQVKEVTQNDGTTTIANNLTSTVQVFTDSEYQLPYVLGSAHQGCLPPFPADVFMVPQYGYLTLNNGSQAVGRSSFYCLEYFPSQMLRTGNNFTFSYTFEDVPFHSSYAHSQSLDRLMNPLIDQYLYYLSRTNTPSGTTTQSGLQFSQAGASDIRDQSRNWLPGPCYRQQRVSKTSADNNNSEYSWTGATKYHLNGRDSLVNPGPAMASHKDDEEKFFPQSGVLIFGKQGSEKTNVDIEKVMITDEEEIRTTNPVATEQYGSVSTNLQRGNRQAATADVNTQGVLPGMVWQDRDVYLQGPIWAKIPHTDGHFHPSPLMGGFGLKHPPPQILIKNTPVPANPSTTFSAAKFASFITQYSTGQVSVEIEWELQKENSKRWNPEIQYTSNYNKSVNVDFTVDTNGVYSEPRPIGTRYLTRNLLLAA

SEQ ID NO: 168 - protein, 725 aa, Adeno-associated virus 2
MAADGYLPDWLEDTLSEGIRQWWKLKPGPPPPKPAERHKDDSRGLVLPGYKYLGPFNGLDKGEPVNEADAAALEHDKAYDRQLDSGDNPYLKYNHADAEFQERLKEDTSFGGNLGRAVFQAKKRVLEPLGLVEEPVKTAPGKKRPVEHSPVEPDSSSGTGKAGQQPARKRLNFGQTGDADSVPDPQPLGQPPAAPSGLGTNTMATGSGAPMADNNEGADGVGNSSGNWHCDSTWMGDRVITTSTRTWALPTYNNHLYKQISSQSGASNDNHYFGYSTPWGYFDFNRFHCHFSPRDWQRLINNNWGFRPKRLNFKLFNIQVKEVTQNDGTTTIANNLTSTVQVFTDSEYQLPYVLGSAHQGCLPPFPADVFMVPQYGYLTLNNGSQAVGRSSFYCLEYFPSQMLRTGNNFTFSYTFEDVPFHSSYAHSQSLDRLMNPLIDQYLYYLSRTNTPSGTTTQSGLQFSQAGASDIRDQSRNWLPGPCYRQQRVSKTSADNNNSEYSWTGATKYHLNGRDSLVNPGPAMASHKDDEEKFFPQSGVLIFGKQGSEKTNVDIEKVMITDEEEIRTTNPVATEQYGSVSTNLQRGNRQAATADVNTQGVLPGMVWQDRDVYLQGPIWAKIPHTDGHFHPSPLMGGFGLKHPPPQILIKNTPVPANPSTTFSAAKFASFITQYSTGQVSVEIEWELQKENSKRWNPEIQYTSNYNKSVNVDFTVDTNGVYSEPRP

SEQ ID NO: 169 - protein, 707 aa, Adeno-associated virus 2
MAADGYLPDWLEDTLSEGIRQWWKLKPGPPPPKPAERHKDDSRGLVLPGYKYLGPFNGLDKGEPVNEADAAALEHDKAYDRQLDSGDNPYLKYNHADAEFQERLKEDTSFGGNLGRAVFQAKKRVLEPLGLVEEPVKTAPGKKRPVEHSPVEPDSSSGTGKAGQQPARKRLNFGQTGDADSVPDPQPLGQPPAAPSGLGTNTMATGSGAPMADNNEGADGVGNSSGNWHCDSTWMGDRVITTSTRTWALPTYNNHLYKQISSQSGASNDNHYFGYSTPWGYFDFNRFHCHFSPRDWQRLINNNWGFRPKRLNFKLFNIQVKEVTQNDGTTTIANNLTSTVQVFTDSEYQLPYVLGSAHQGCLPPFPADVFMVPQYGYLTLNNGSQAVGRSSFYCLEYFPSQMLRTGNNFTFSYTFEDVPFHSSYAHSQSLDRLMNPLIDQYLYYLSRTNTPSGTTTQSGLQFSQAGASDIRDQSRNWLPGPCYRQQRVSKTSADNNNSEYSWTGATKYHLNGRDSLVNPGPAMASHKDDEEKFFPQSGVLIFGKQGSEKTNVDIEKVMITDEEEIRTTNPVATEQYGSCIYQPPERQQTSSYRRCQHTRRSSRHGLAGQRCVPSGAHLGKDSTHGRTFSPLSPHGWIRTTPSSTDSHQEHPGTCESFDHLQCGKVCFLHHTVLHGTGQRGDRVRAAEGKQQTLESRNSVHFQLQQVC

SEQ ID NO: 170 - protein, 739 aa, Adeno-associated virus 2; identical to SEQ ID NO: 167

SEQ ID NO: 171 - protein, 737 aa, Adeno-associated virus 2
MASDGYLPDWLEDNLSEGIREWWDLKPGAPKPKANQQKQDDGRGLVLPGYKYLGPFNGLDKGEPVNAADAAALEHDKAYDQQLKAGDNPYLRYNHADAEFQERLQEDTSFGGNLGRAVFQAKKRVLEPFGLVEEGAKTAPGKKRPVEQSPQEPDSSSGIGKTGQQPAKKRLNFGQTGDSESVPDPQPLGEPPATPAAVGPTTMASGGGAPMADNNEGADGVGNASGNWHCDSTWLGDRVITTSTRTWALPTYNNHLYKQISSASTGASNDNHYFGYSTPWGYFDFNRFHCHFSPRDWQRLINNNWGFRPKRLNFKLFNIQVKEVTTNDGTTTIANNLTSTVQVFTDSEYQLPYVLGSAHQGCLPPFPADVFMVPQYGYLTLNNGSQAVGRSSFYCLEYFPSQMLRTGNNFTFSYTFEDVPFHSSYAHSQSLDRLMNPLIDQYLYYLSRTNTPSGTTTQSGLQFSQAGASDIRDQSRNWLPGPCYRQQRVSKTSADNNNSEYSWTGATKYHLNGRDSLVNPGPAMASHKDDEEKFFPQSGVLIFGKQGSEKTNVDIEKVMITDEEEIRTTNPVATEQYGSVSTNLQRGNRQAATADVNTQGVLPGMVWQDRDVYLQGPIWAKIPHTDGHFHPSPLMGGFGLKHHPPQILIKNTPVPANPSTTFSAAKFASFITQYSTGQVSVEIEWELQKENSKRWNPEIQYTSNYNKSVNVDFTVDTNGVYSEPRPIGTRYLTRNLL

SEQ ID NO: 172 - protein, 741 aa, Adeno-associated virus 2
MAADGYLPDWLEDTLSEGIREWWALKPGAPKPKANQQKQDDGRGLVLPGYKYLGPFNGLDKGEPVNEADAAALEHDKAYDQQLQAGDNPYLRYNHADAEFQERLQEDTSFGGNLGRAVFQAKKRVLEPLGLVEEPVKTAPGKKRPVEHSPVEPDSSSGTGKSGQQPARKRLNFGQTGDADSVPDPQPLGQPPAAPSGLGTNTMATGSGAPMADNNEGADGVGNSSGNWHCDSTWMGDRVITTSTRTWALPTYNNHLYKQISSQSGASNDNHYFGYSTPWGYFDFNRFHCHFSPRDWQRLINNNWGFRPKRLNFKLFNIQVKEVTQNDGTTTIANNLTSTVQVFTDSEYQLPYVLGSAHQGCLPPFPADVFMVPQYGYLTLNNGSQAVGRSSFYCLEYFPSQMLRTGNNFTFSYTFEDVPFHSSYAHSQSLDRLMNPLIDQYLYYLSRTNTPSGTTTQSGLQFSQAGASDIRDQSRNWLPGPCYRQQRVSKTSADNNNSEYSWTGATKYHLNGRDSLVNPGPAMASHKDDEEKFFPQSGVLIFGKQGSEKTNVDIEKVMITDEEEIRTTNPVATEQYGSVSTNLQRGNLANHNNTTNARQAATADVNTQGVLPGMVWQDRDVYLQGPIWAKIPHTDGHFHPSPLMGGFGLKHPPPQILIKNTPVPANPSTTFSAAKFASFITQYSTGQVSVEIEWELQKENSKRWNPEIQYTSNYNKSINVDFTVDTNGVYSEPRPIGTRYL

SEQ ID NO: 173 - protein, 730 aa, Adeno-associated virus 2
MASDGYLPDWLEDNLSEGIREWWDLKPGAPKPKANQQKQDDGRGLVLPGYKYLGPFNGLDKGEPVNAADAAALEHDKAYDQQLKAGDNPYLRYNHADAEFQERLQEDTSFGGNLGRAVFQAKKRVLEPFGLVEEGAKTAPGKKRPVEQSPQEPDSSSGIGKTGQQPAKKRLNFGQTGDSESVPDPQPLGEPPATPAAVGPTTMASGGGAPMADNNEGADGVGNASGNWHCDSTWLGDRVITTSTRTWALPTYNNHLYKQISSASTGASNDNHYFGYSTPWGYFDFNRFHCHFSPRDWQRLINNNWGFRPKRLNFKLFNIQVKEVTTNDGVTTIANNLTSTVQVFSDSEYQLPYVLGSAHQGCLPPFPADVFMIPQYGYLTLNNGSQAVGRSSFYCLEYFPSQMLRTGNNFTFSYTFEDVPFHSSYAHSQSLDRLMNPLIDQYLYYLNRTQNQSGSAQNNDLLFSRGSPAGMSVQPKNWLPGPCYRQQRVSKTKTDNNNSNFTWTGASKYNLNGRESIINPGTAMASHKDDKDKFFPMSGVMIFGKESAGASNTALDNVMITDEEEIKATNPVATERFGTVAVNLQSSSTDPATGDVHVMGALPGMVWQDRDVYLQGPIWAKIPHTDGHFHPSPLMGGFGLKNPPPQILIKNTPVPANPPAEFSATKFASFITQYSTGQVSVEIEWELQKENSKRWNPEVQYTSNYAKSANVDFTVDNNGLYTEPRPIGTR

SEQ ID NO: 174 - protein, 735 aa, Adeno-associated virus 2
  MOD_RES (239)..(239): Xaa = any amino acid
MASDGYLPDWLEDNLSEGIREWWDLKPGAPKPKANQQKQDDGRGLVLPGYKYLGPFNGLDKGEPVNAADAAALEHDKAYDQQLKAGDNPYLRYNHADAEFQERLQEDTSFGGNLGRAVFQAKKRVLEPFGLVEEGAKTAPGKKRPVEQSPQEPDSSSGIGKTGQQPAKKRLNFGQTGDSESVPDPQPLGEPPATPAAVGPTTMASGGGAPMADNNEGADGVGNASGNWHCDSTWLGDRXITTSTRTWALPTYNNHLYKQISSASTGASNDNHYFGYSTPWGYFDFNRFHCHFSPRDWQRLINNNWGFRPKRLNFKLFNIQVKEVTTNDGVTTIANNLTSTVQVFSDSEYQLPYVLGSAHQGCLPPFPADVFMIPQYGYLTLNNGSQAVGRSSFYCLEYFPSQMLRTGNNFTFSYTFEDVPFHSSYAHSQSLDRLMNPLIDQYLYYLNRTQNQSGSAQNNDLLFSRGSPAGMSVQPKNWLPGPCYRQQRVSKTKTDNNNSNFTWTGASKYNLNGRESIINPGTAMASHKDDKDKFFPMSGVMIFGKESAGASNTALDNVMITDEEEIKATNPVATERFGTVAVNLQSSSTDPATGDVHVMGALPGMVWQDRDVYLQGPIWAKIPHTDGHFHPSPLMGGFGLKNPPPQILIKNTPVPANPPAEFSATKFASFITQYSTGQVSVEIEWELQKENSKRWNPEVQYTSNYAKSANVDFTVDNNGLYTEPRPIGTRYLTRP

SEQ ID NO: 175 - protein, 733 aa, Adeno-associated virus 2
MASDGYLPDWLEDNLSEGIREWWDLKPGAPKPKANQQKQDDGRGLVLPGYKYLGPFNGLDKGEPVNAADAAALEHDKAYDQQLKAGDNPYLRYNHADAEFQERLQEDTSFGGNLGRAVFLAKKRVLEPFGLVEEGAKTAPGKKRPVEQSPQEPDSSSGIGKTGQQPAKKRLNFGQTGDSESVPDPQPLGEPPATPAAVGPTTMASGGGAPMADNNEGADGVGNASGNWHCDSTWLGDRVITTSTRTWALPTYNNHLYKQISSASTGASNDNHYFGYSTPWGYFDFNRFHCHFSPRDWQRLINNNWGFRPKRLNFKLFNIQVKEVTTNDGVTTIANNLTSTVQVFSDSEYQLPYVLGSAHQGCLPPFPADVFMIPQYGYLTLNNGSQAVGRSSFYCLEYFPSQMLRTGNNFTFSYTFEDVPFHSSYAHSQSLDRLMNPLIDQYLYYLNRTQNQSGSAQNNDLLFSRGSPAGMSVQPKNWLPGPCYRQQRVSKTKTDNNNSNFTWTGASKYNLNGRESIINPGTAMASHKDDKDKFFPMSGVMIFGKESAGASNTALDNVMITDEEEIKATNPVATERFGTVAVNLQSSSTDPATGDVHVMGALPGMVWQDRDVYLQGPIWAKIPHTDGHFHPSPLMGGFGLKNPPPQILIKNTPVPANPPAEFSATKFASFITQYSTGQVSVEIEWELQKENSKRWNPEVQYTSNYAKSANVDFTVDNNGLYTEPRPIGTRYLT

SEQ ID NO: 176 - protein, 734 aa, Adeno-associated virus 2
MAADGYLPDWLEDTLSEGIRQWWKLKPGPPPPKPAERHKDDSRGLVLPGCKYLGPFNGLDKGEPVNEADAAALEHDKAYDRQLDSGDNPYLKYNHADAEFQERLKEDTSFGGNLGRAVFQAKKRVLEPLGLVEEPVKTAPGKKRPVEHSPVEPDSSSGTGKAGQQPARKRLNFGQTGDADSVPDPQPLGQPPAAPSGLGTNTMATGSGAPMADNNEGADGVGNSSGNWHCDSTWMGDRVITTSTRTWALPTYNNHLYKQISSQSGASNDNHYFGYSTPWGYFDFNRFHCHFSPRDWQRLINNNWGFRPKRLNFKLFNIQVKEVTQNDGTTTIANNLTSTVQVFSDSEYQLPYVLGSAHQGCLPPFPADVFMIPQYGYLTLNNGSQAVGRSSFYCLEYFPSQMLRTGNNFTFNYTFEDVPFHSSYAHSQSLDRLMNPLIDQYLYYLNRTQNQSGSAQNNDLLFSRGSPAGMSVQPKNWLPGPCYRQQRVSKTKTDNNNSNFTWTGASKYNLNGRESIINPGTAMASHKDDKDKFFPMSGVMIFGKESAGASNTALDNVMITDEEEIKATNPVATERFGTVAVNLQSSSTDPATGDVHVMGALPGMVWQDRDVYLQGPIWAKIPHTDGHFHPSPLMGGFGLKNPPPQILIKNTPVPANPPAEFSATKFASFITQYSTGQVSVEIEWELQKENSKRWNPEVQYTSNYAKSANVDFTVDNNGLYTEPRPIGTRYLTRP

SEQ ID NO: 177 - protein, 734 aa, Adeno-associated virus 2
MAADGYLPDWLEDTLSEGIRQWWKLKPGPPPPKPAERHKDDSRGLVLPGYKYLGPFNGLDKGEPVNEADAAALEHDKAYDRQLDSGDNPYLKYNHADAEFQERLKEDTSFGGNLGRAVFQAKKRVLEPLGLVEEPVKTAPGKKRPVEHSPVEPDSSSGTGKAGQQPARKRLNFGQTGDADSVPDPQPLGQPPAAPSGLGTNTMATGSGAPMADNNEGADGVGNSSGNWHCDSTWMGDRVITTSTRTWALSTYNNHLYKQISSQSGASNDNHYFGYSTPWGYFDFNRFHCHFSPRDWQRLINNNWGFRPKRLNFKLFNIQVKEVTQNDGTTTIANNLTSTVQVFTDSEYQLPYVLGSAHQGCLPPFPADVFMVPQYGYLTLNNGSQAVGRSSFYCLEYFPSQMLRTGNNFTFSYTFEDVPFHSSYAHSQSLDRLMNPLIDQYLYYLSRTNTPSGTTTQSRLQFSQAGASDIRDQSRNWLPGPCYRQQRVSKTSADNNNSEYSWTGATKYHLNGRDSLVNPGPAMASHKDDEEKFFPQSGVLIFGKQGSEKTNVDIEKVMITDEEEIRTTNPVATEQYGSVSTNLQRGNRQAATADVNTQGVLPGMVWQDRDVYLQGPIWAKIPHTDGHFHPSPLMGGFGLKHPPPQILIKNTPVPANPSTTFSAAKFASFITQYSTGQVSVEIEWELQKENSKRWNPEIQYTSNYNKSINVDFTVDTNGVYSEPRPIGTRYLTRN

SEQ ID NO: 178 - protein, 738 aa, Adeno-associated virus 2
MAADGYLPDWLEDTLSEGIRQWWKLKPGPPPPKPAERHKDDSRGLVLPGYKYLGPFNGLDKGEPVNEADAAALEHDKAYDRQLDGGDNPYLKYNHADAEFQERLKEDTSFGGNLGRAVFQAKKRVLEPLGLVEEPVKTAPGKKRPVEHSPVEPDSSSGTGKAGQQPARKRLNFGQTGDADSVPDPQPLGQPPAAPSGLGTNTMATGSGAPMADNNEGADGVGNSSGNWHCDSTWMGDRVITTSTRTWALPTYNNHLYKQISSQSGASNDNHYFGYSTPWGYFDFNRFHCHFSPRDWQRLINNNWGFRPKRLNFKLFNIQVKEVTQNDGTTTIANNLTSTVQVFTDSEYQLPYVLGSAHQGCLPPFPADVFMVPQYGYLTLNNGSQAVGRSSFYCLEYFPSQMLRTGNNFTFSYTFEDVPFHSSYAHSQSLDRLMNPLIDQYLYYLSRTNTPSGTTTQSGLQFSQAGASDIRDQSRNWLPGPCYRQQRVSKTSADNNNSEYSWTGATKYHLNGRDSLVNPGPAMASHKDDEEKFFPQSGVLIFGKQGSEKTNVDIEKVMITDEEEIRTTNPVATEQYGSVSTNLQRGNRQAATADVNTQGVLPGMVWQDRDVYLQGPIWAKIPHTDGHFHPSPLMGGFGLKHPPPQILIKNTPVPANPSTTFSAAKFASFITQYSTGQVSVEIEWELQKENSKRWNPEIQYTSNYNKSVNVDFTVDTNGVYSEPRPIGTRYLTRNLLRP

SEQ ID NO: 179 - DNA, 2208 bp, Adeno-associated virus
atggctgccgatggttatcttccagattggctcgaggacactctctctgaaggaataagacagtggtggaagctcaaacctggcccaccaccaccaaagcccgcagagcggcataaggacgacagcaggggtcttgtgcttcctgggtacaagtacctcggacccttcaacggactcgacaagggggagccggtcaacgaggcagacgccgcggccctcgagcacgacaaggcctacgaccggcagctcgacagcggagacaacccgtacctcaagtacaaccacgccgacgcagagtttcaggagcgccttaaagaagatacgtcttttgggggcaacctcggacgagcagtcttccaggcgaaaaagagggttcttgaacctctgggcctggttgaggaacctgttaagacggctccgggaaaaaagaggccggtagagcactctcctgtggagccagactcctcctcgggaaccggaaaagcgggccagcagcctgcaagaaaaagattaaattttggtcagactggagacgcagactccgtacctgacccccagcctctcggacagccaccagcagccccctctggtctgggatctactacaatggctacaggcagtggcgcaccaatggcagacaataacgagggtgccgatggagtgggtaattcctcaggaaattggcattgcgattcccaatggctgggcgacagagtcatcaccaccagcacccgaacctgggccctgcccacatacaacaaccacctctacaagcaaatctccagccaatcaggagccagcaacgacaaccactactttggctacagcaccccctgggggtattttgacttcaacagattccactgccacttttcaccacgtgactggcaaagactcatcaacaacaactggggattccggcccaaaagactcaacttcaagctctttaatattcaagtcaaagaggtcacgcagaatggcggtacgacgacgattgccaataaccttaccagcacggttcaggtgtttactgactcggagtaccagctcccgtacgtcctgggctcggcgcatcaaggatgcctcccgccgtttccagcggacgtcttcatggtcccacagtatggatacctcaccctgaacaacgggagtcaggcggtaggacgctcttccttttactgcctggagtactttccttctcagatgctgcgtactggaaacaactttcagttcagctacacttttgaagacgtgcctttccacagcagctacgctcacagccagagtctggatcggctgatgaatcctctgatcgaccagtacctgtattatctgaacaagacacaaacaaatagtggaactcttcagcagtctcggctactgtttagccaagctggaccaaccaacatgtctcttcaagctaaaaactggctgcctggaccttgctacagacagcagcgtctgtcaaaacaggcaaacggcaacaacaacagcaactttccctggactgcagctacaaagtatcatctaaatggccgggactcgttggttaatccaggaccagctatggccagtcacaaggatgacgaagaaaagtttttccccatgcatggaaccctgatatttggtaaacaaggaacaaatgccaacgacgcggatttggaaaatgtcatgattacagatgaagaagaaatcagggccaccaatcccgtggctacggagcagtacgggactgtgtcaaataatttgcaaaactcaaacactggtccaactactggaactgtcaatcaccaaggagcgttacctggtatggtgtggcaggatcgagacgtgtacctgcagggacccatttgggccaagattcctcacaccgatggacactttcatccttctccactgacgggaggttttggactcaaacacccgcctcctcagatcatgatcaaaaacactcccgttccagccaatcctcccacaaacttcagttctgccaagtttgcttctttcatcacacagtattccacgggacaggtcagcgtggagatcgagtgggagctgcagaaggagaacagcaaacgctggaatcccgaaattcagtacacttccaactacaacaagtctgttaatgtggactttactgtggacactaatggtgtgtattcagagcctcgccccattggcaccagatacctgactcgtaatctgtaa

SEQ ID NO: 180 - protein, 735 aa, Adeno-associated virus
MAADGYLPDWLEDTLSEGIRQWWKLKPGPPPPKPAERHKDDSRGLVLPGYKYLGPFNGLDKGEPVNEADAAALEHDKAYDRQLDSGDNPYLKYNHADAEFQERLKEDTSFGGNLGRAVFQAKKRVLEPLGLVEEPVKTAPGKKRPVEHSPVEPDSSSGTGKAGQQPARKRLNFGQTGDADSVPDPQPLGQPPAAPSGLGSTTMATGSGAPMADNNEGADGVGNSSGNWHCDSQWLGDRVITTSTRTWALPTYNNHLYKQISSQSGASNDNHYFGYSTPWGYFDFNRFHCHFSPRDWQRLINNNWGFRPKRLNFKLFNIQVKEVTQNGGTTTIANNLTSTVQVFTDSEYQLPYVLGSAHQGCLPPFPADVFMVPQYGYLTLNNGSQAVGRSSFYCLEYFPSQMLRTGNNFQFSYTFEDVPFHSSYAHSQSLDRLMNPLIDQYLYYLNKTQTNSGTLQQSRLLFSQAGPTNMSLQAKNWLPGPCYRQQRLSKQANGNNNSNFPWTAATKYHLNGRDSLVNPGPAMASHKDDEEKFFPMHGTLIFGKQGTNANDADLENVMITDEEEIRATNPVATEQYGTVSNNLQNSNTGPTTGTVNHQGALPGMVWQDRDVYLQGPIWAKIPHTDGHFHPSPLTGGFGLKHPPPQIMIKNTPVPANPPTNFSSAKFASFITQYSTGQVSVEIEWELQKENSKRWNPEIQYTSNYNKSVNVDFTVDTNGVYSEPRPIGTRYLTRNL

SEQ ID NO: 181 - DNA, 2208 bp, Adeno-associated virus
atggctgccgatggttatcttccagattggctcgaggacactctctctgaaggaataagacagtggtggaagctcaaacctggcccaccaccaccaaagctcgcagagcggcatcaggacgacagcaggggtcttgtgcttcctgggtacaagtacctcggacccttcaacggactcgacaaaggagagccggtcaacgaggcagacgccgcggccctcgagcacgacaaggcctacgaccggcagctcgacagcggagacaacccgtacctcaagtacaaccacgccgacgcggagtttcaggagcgtcttaaagaagatacgtcttttgggggcaacctcggacgagcagtcttccaggcgaaaaagagggttcttgaacctctgggcctggttgaggaacctgttaagacggctccgggaaaaaagaggccggtagagcactctcctgtggagccagactcctcctcgggaaccggaaaggcgggccatcagcctgcgagaaagagattgaattttggtcagactggagacgcagactccgtacctgacccccagcctctcggacagccaccagcagcccccacaagtctgggatctactacaatggctacaggcagtggcgcaccaatggcagacaataacgagggtgccgatggagtgggtaattcctcaggaaattggcattgcgattcccaatggctgggcgacagagtcatcaccaccagcacccgaacctgggccctgcccacctacaacaaccacctctacaagcaaatctccagccaatcaggagcctcgaacgacaaccactactttggctacagcaccccctgggggtattttgacttcaacagattccactgtcacttctccccacgtgattggcaaagactcatcaacaacaactggggattccgacccaagagactcaacttcaagctctttaacattcaagtcaaagaggtcacgcagaatgacggtacgacgacgattgccaataaccttaccagcacggttcaggtgtttactgactcggagtaccagctcccgtacgtcctcggctcggcgcatcaaggatgcctcccgccgtttccagcggacgtcttcacggtcccacagtatggatacctcaccctgaacaacgggagtcaggcggtaggacgctcttccttttactgcctggagtactttccttctcagatgctgcgtactggaaacaaccttaccttcagctacacctttgaggacgttcctttccacagcagctacgctcacagccagagtttggaccggctgatgaatcctctgatcgaccagtatctatattatctgaacaggacacaatcaaatagtggaactcttcagcagtctaggctactgtttagccaagctggacccaccagcatgtctcttcaagctaaaaactggctgcctggaccttgctacagacagcagcgtctttcaaagcaggcaaacgacaacaacaacagcaactttccctggactgcggctacaaagtatcatctaaatggccgggactcgttggttaatccaggaccagctatggccagccacaaagacgatgaagaaaagtttttccccatgcatggaaccctgatatttggtaaacaaggaacaaatgctaacgacgcggatttggagcatgttatgattacagatgaagaagaaatcaggaccaccaatcctgtggctacagagcagtacggaaacgtgtcaaataatttgcaaaactcaaatactggtccaactacagaaaatgtcaatcaccagggagcgttacctggtatggtgtggcaggatcgagacgtgtacctgcagggacccatttgggccaagattcctcacaccgacggacactttcacccttctccactgatgggaggttttggactcaaacacccgcctcctcaaatcatgatcaaaaacactcccgttccagccaatcctcccacaaactacagttctgccaagtttgcttctttcatcacacagtattccacgggccaggtcagcgtggagattgagtgggagctgcggaaggagaacagcaaacgctggaaccccgagatccagtatacttccaactacaacaaatctgttaatgtggactttactgtggacactaatggtgtgtattcagagcctcgccccattggcaccagatacctgactcgtaatctgtaa

SEQ ID NO: 182 - protein, 735 aa, Adeno-associated virus
MAADGYLPDWLEDTLSEGIRQWWKLKPGPPPPKLAERHQDDSRGLVLPGYKYLGPFNGLDKGEPVNEADAAALEHDKAYDRQLDSGDNPYLKYNHADAEFQERLKEDTSFGGNLGRAVFQAKKRVLEPLGLVEEPVKTAPGKKRPVEHSPVEPDSSSGTGKAGHQPARKRLNFGQTGDADSVPDPQPLGQPPAAPTSLGSTTMATGSGAPMADNNEGADGVGNSSGNWHCDSQWLGDRVITTSTRTWALPTYNNHLYKQISSQSGASNDNHYFGYSTPWGYFDFNRFHCHFSPRDWQRLINNNWGFRPKRLNFKLFNIQVKEVTQNDGTTTIANNLTSTVQVFTDSEYQLPYVLGSAHQGCLPPFPADVFTVPQYGYLTLNNGSQAVGRSSFYCLEYFPSQMLRTGNNLTFSYTFEDVPFHSSYAHSQSLDRLMNPLIDQYLYYLNRTQSNSGTLQQSRLLFSQAGPTSMSLQAKNWLPGPCYRQQRLSKQANDNNNSNFPWTAATKYHLNGRDSLVNPGPAMASHKDDEEKFFPMHGTLIFGKQGTNANDADLEHVMITDEEEIRTTNPVATEQYGNVSNNLQNSNTGPTTENVNHQGALPGMVWQDRDVYLQGPIWAKIPHTDGHFHPSPLMGGFGLKHPPPQIMIKNTPVPANPPTNYSSAKFASFITQYSTGQVSVEIEWELRKENSKRWNPEIQYTSNYNKSVNVDFTVDTNGVYSEPRPIGTRYLTRNL

SEQ ID NO: 183 - DNA, 2208 bp, Adeno-associated virus
atggctgccgatggttatcttccagattggctcgaggacactctctctgaaggaataagacagtggtggaagctcaaacctggcccaccaccaccaaagcccgcagagcggcatcaggacgacagcaggggtcttgtgcttcctgggtacaagtacctcggacccttcaacggactcgacaaaggagagccggtcaacgaggcagacgccgcggccctcgagcacgacaaggcctacgaccggcagctcgacagcggagacaacccgtacctcaagtacaaccacgccgacgcggagtttcaggagcgtcttaaagaagatacgtcttttgggggcaacctcggacgagcagtcttccaggcgaaaaagagggttcttgaacctctgggcctggttgaggaacctgttaagacggctccgggaaaaaagaggccggtagagcactctcctgtggagccagactcctcctcgggaaccggaaaagcgggccatcagcctgcgagaaagagattgaattttggtcagactggagacgcagactccgtacctgacccccagcctctcggacagccaccagcagcccccacaagtttgggatctactacaatggctacaggcagtggcgcaccaatggcagacaataacgagggtgccgatggagtgggtaattcctcaggaaattggcattgcgattcccaatggctgggcgacagagtcatcaccaccagcacccgaacctgggccctgcccacctacaacaaccacctctacaagcaaatctccagccaatcaggagcctcgaacgacaaccactactttggctacagcaccccctgggggtattttgacttcaacagattccactgtcacttctccccacgtgattggcaaagactcatcaacaacaactggggattccgacccaagagactcaacttcaagctctttaacattcaagtcaaggaggtcacgcagaatgacggtacgacgacgattgccaataaccttaccagcacggttcaggtgtttactgactcggagtaccagctcccgtacgtcctcggctcggcgcatcaaggatgcctcccgccgtttccagcggacgtcttcatggtcccacagtatggatacctcaccctgaacaacgggagtcaggcggtaggacgctcttccttttactgcctggagtactttccttctcagatgctgcgtactggaaacaactttaccttcagctacacctttgaggacgttcctttccacagcagctacgctcacagccagagtttggaccggctgatgaatcctctgatcgaccagtatctatattatctgaacaggacacaatcaaatagtggaactcttcagcagtctaggctactgtttagccaagctggacccaccagcatgtctcttcaagctaaaaactggctgcctggaccttgctacagacagcagcgtctttcaaagcaggcaaacgacaacaacaacagcaactttccctggactgcggctacaaagtatcgtctaaatggccgggactcgttggttaatccaggaccagctatggccagccacaaagacgatgaagaaaagtttttccccatgcatggaaccctgatatttggtaaacaaggaacaaatgctaacgacgcggatttggagcatgttatgattacagatgaagaagaaatcaggaccaccaatcctgtggctacagagcagtacggaaacgtgtcaaataatttgcaaaactcaaatactggtccaactacagaaaatgtcaatcaccagggagcgttacctggtatggtgtggcaggatcgagacgtgtacctgcagggacccatttgggccaagattcctcacaccgacggacactttcacccttctccactgatgggaggttttggactcaaacacccgcctcctcaaatcatgatcaaaaacactcccgttccagccaatcctcccacaaacttcagttctgccaagtttgcttctttcatcacacagtattccacgggccaggtcagcgtggagattgagtgggagctgcagaaggagaacagcaaacgctggaaccccgagatccagtatacttccaactacaacaaatctgttaatgtggactttactgtggacactaatggtgtgtattcagagcctcgccccattggcaccagatacctgactcgtaatctgtaa

SEQ ID NO: 184 - protein, 735 aa, Adeno-associated virus
MAADGYLPDWLEDTLSEGIRQWWKLKPGPPPPKPAERHQDDSRGLVLPGYKYLGPFNGLDKGEPVNEADAAALEHDKAYDRQLDSGDNPYLKYNHADAEFQERLKEDTSFGGNLGRAVFQAKKRVLEPLGLVEEPVKTAPGKKRPVEHSPVEPDSSSGTGKAGHQPARKRLNFGQTGDADSVPDPQPLGQPPAAPTSLGSTTMATGSGAPMADNNEGADGVGNSSGNWHCDSQWLGDRVITTSTRTWALPTYNNHLYKQISSQSGASNDNHYFGYSTPWGYFDFNRFHCHFSPRDWQRLINNNWGFRPKRLNFKLFNIQVKEVTQNDGTTTIANNLTSTVQVFTDSEYQLPYVLGSAHQGCLPPFPADVFMVPQYGYLTLNNGSQAVGRSSFYCLEYFPSQMLRTGNNFTFSYTFEDVPFHSSYAHSQSLDRLMNPLIDQYLYYLNRTQSNSGTLQQSRLLFSQAGPTSMSLQAKNWLPGPCYRQQRLSKQANDNNNSNFPWTAATKYRLNGRDSLVNPGPAMASHKDDEEKFFPMHGTLIFGKQGTNANDADLEHVMITDEEEIRTTNPVATEQYGNVSNNLQNSNTGPTTENVNHQGALPGMVWQDRDVYLQGPIWAKIPHTDGHFHPSPLMGGFGLKHPPPQIMIKNTPVPANPPTNFSSAKFASFITQYSTGQVSVEIEWELQKENSKRWNPEIQYTSNYNKSVNVDFTVDTNGVYSEPRPIGTRYLTRNL

SEQ ID NO: 185 - DNA, 2208 bp, Adeno-associated virus
atggctgccgatggttatcttccagattggctcgaggacactctctctgaaggaataagacagtggtggaagctcaaacctggcccaccaccaccaaagcccgcagagcggcatcaggacgacagcaggggtcttgtgcttcctgggtacaagtacctcggacccttcaacggactcgacaaaggagagccggtcaacgaggcagacgccgcggccctcgagcacgacaaggcctacgaccggcagctcgacagcggagacaacccgtacctcaagtacaaccacgccgacgcggagtttcaggagcgtcttaaagaagatacgtcttttgggggcaacctcggacgagcagtcttccaggcgaaaaagagggttcttgaacctctgggcctggttgaggaacctgttaagacggctccgggaaaaaagaggccggtagagcactctcctgtggagccagactcctcctcgggaaccggaaaagcgggccatcagcctgcgagaaagagattgaattttggtcagactggagacgcagactccgtacctgacccccagcctctcggacagccaccagcagcccccacaagtttgggatctactacaatggctacaggcagtggcgcaccaatggcagacaataacgagggtgccgatggagtgggtaattcctcaggaaattggcattgcgattcccaatggctgggcgacagagtcatcaccaccagcacccgaacctgggccctgcccacctacaacaaccacctctacaagcaaatctccagccaatcaggagcctcgaacgacaaccactactttggctacagcaccccctgggggtattttgacttcaacagattccactgtcacttctccccacgtgattggcaaagactcatcaacaacaactggggattccgacccaagagactcaacttcaagctctttaacattcaagtcaaagaggtcacgcagaatgacggtacgacgacgattgccaataaccttaccagcacggttcaggtgtttactgactcggagtaccagctcccgtacgtcctcggctcggcgcatcaaggatgcctcccgccgtttccagcggacgtcttcatggtcccacagtatggatacctcaccctgaacaacgggagtcaggcggtaggacgcccttccttttactgcctggagtactttccttctcagatgctgcgtactggaaacaactttaccttcagctacacctttgaggacgttcctttccacagcagctacgctcacagccagagtttggaccggctgatgaatcctctgatcgaccagtatctatattatctgaacaggacacaatcaaatagtggaactcttcagcagtctaggctactgtttagccaagctggacccaccagcatgtctcttcaagctaaaaactggctgcctggaccttgctacagacagcagcgtctttcaaagcaggcaaacgacaacaacaacagcaactttccctggactgcggctacaaagtatcatctaaatggccgggactcgttggttaatccaggaccagctatggccagccacaaagacgatgaagaaaagtttttccccatgcatgggaccctgatatttggtaaacaaggaacaaatgctaacgacgcggatttggagcatgttatgattacagatgaagaagaaatcaggaccaccaatcctgtggctacagagcagtacggaaacgtgtcaaataatttgcaaaactcaaatactggtccaactacagaaaatgtcaatcaccagggagcgttacctggtatggtgtggcaggatcgagacgtgtacctgcagggacccatttgggccaagattcctcacaccgacggacactttcacccttctccactgatgggaggttttggactcaaacacccgcctcctcaaatcatgatcaaaaacactcccgttccagccaatcctcccacaaacttcagttctgccaagtttgcttctttcatcacacagtattccacgggccaggtcagcgtggagattgagtgggagctgcagaaggagaacagcaaacgctggaaccccgagatccagtatacttccaactacaacaaatctgttaatgtggactttactgtggacactaatggtgtgtattcagagcctcgccccattggcaccagatacctgactcgtaatctgtaa

SEQ ID NO: 186 - protein, 735 aa, Adeno-associated virus
MAADGYLPDWLEDTLSEGIRQWWKLKPGPPPPKPAERHQDDSRGLVLPGYKYLGPFNGLDKGEPVNEADAAALEHDKAYDRQLDSGDNPYLKYNHADAEFQERLKEDTSFGGNLGRAVFQAKKRVLEPLGLVEEPVKTAPGKKRPVEHSPVEPDSSSGTGKAGHQPARKRLNFGQTGDADSVPDPQPLGQPPAAPTSLGSTTMATGSGAPMADNNEGADGVGNSSGNWHCDSQWLGDRVITTSTRTWALPTYNNHLYKQISSQSGASNDNHYFGYSTPWGYFDFNRFHCHFSPRDWQRLINNNWGFRPKRLNFKLFNIQVKEVTQNDGTTTIANNLTSTVQVFTDSEYQLPYVLGSAHQGCLPPFPADVFMVPQYGYLTLNNGSQAVGRPSFYCLEYFPSQMLRTGNNFTFSYTFEDVPFHSSYAHSQSLDRLMNPLIDQYLYYLNRTQSNSGTLQQSRLLFSQAGPTSMSLQAKNWLPGPCYRQQRLSKQANDNNNSNFPWTAATKYHLNGRDSLVNPGPAMASHKDDEEKFFPMHGTLIFGKQGTNANDADLEHVMITDEEEIRTTNPVATEQYGNVSNNLQNSNTGPTTENVNHQGALPGMVWQDRDVYLQGPIWAKIPHTDGHFHPSPLMGGFGLKHPPPQIMIKNTPVPANPPTNFSSAKFASFITQYSTGQVSVEIEWELQKENSKRWNPEIQYTSNYNKSVNVDFTVDTNGVYSEPRPIGTRYLTRNL

SEQ ID NO: 187 - DNA, 2208 bp, Adeno-associated virus
atggctgccgatggttatcttccagattggctcgaggacactctctctgaaggaataagacagtggtggaagctcaaacctggcccaccaccaccaaagcccgcagagcggcataaggacgacagcaggggtcttgtgcttcctgggtacaagtacctcggacccttcaacggactcgacaagggagagccggtcaacgaggcagacgccgcggccctcgagcacgacaaggcctacgaccggcagctcgacagcggagacaacccgtacctcaagtacaaccacgccgacgcggagtttcaggagcgccttaaagaagatacgtcttttgggggcaacctcggacgagcagtcttccaggcaaaaaagagggttcttgaacctctgggcctggttgaggagcctgttaaaacggctccgggaaaaaagaggccggtagagcactctcctgcggagccagactcctcctcgggaaccggaaaagcgggccagcagcctgcaagaaaaagattgaatttcggtcagactggagacgcagactccgtacctgacccccagcctctcggacagccaccagcagccccctctggtctgggaactaatacgatggcttcaggcagtggcgcaccaatggcagacaataacgagggcgccgacggagtgggtaattcctcgggaaattggcattgcgattccacatggatgggcgacagagtcatcaccaccagcacccgaacttgggccctgcccacctacaacaaccatctctacaagcaaatctccagccaatcaggagccagcaacgacaaccactactttggctacagcaccccttgggggtattttgacttcaacagattccactgccacttttcaccacgtgactggcaaagactcatcaacaacaactggggattccggcccaagagactcaacttcaagctctttaacattcaagtcaaagaggtcacgcagaatgacggtacgacgacgattgccaataaccttaccagcacggttcaggtgtttactgactcggagtaccagctcccgtacgtcctcggctcggcgcatcaaggatgcctcccgccgttcccagcagacgtcttcatggtgccacagtatggatacctcaccctgaacaacgggagtcaggcagtaggacgctcttcattttactgcctggagtactttccttctcagatgctgcgtaccggaaacaactttaccttcagctacacctttgaggacgttcctttccacagcagctacgctcacagccagagtttggaccgtctcatgaatcctctcatcgaccagtacctgtattacttgagcagaacaaacactccaagcggaaccaccacgcagtccaggcttcagttttctcaggccggagcaagtgacattcgggaccagtctaggaactggcttcctggaccctgttaccgccagcagcgagtatcaaagacatctgcggataacaacaacagtgaatactcgtggactggagctaccaagtaccacctcaatggcagagactctctggtgaatccgggcccggccatggccagccacaaggacgatgaagaaaagttttttcctcagagcggggttctcatctttgggaagcaaggctcagagaaaacaaatgtggacattgaaaaggtcatgattacagacgaagaggaaatcaggaccaccaatcccgtggctacggagcagtatggttctgtatctaccaacctgcagggcggcaacacacaagcagctaccgcagatgtcaacacacaaggcgttcttccaggcatggtctggcaggacagagacgtgtacctgcaggggcccatctgggcaaagattccacacacggacggacattttcacccctctcccctcatgggcggattcggacttaaacaccctcctccacagattctcatcaagaacaccccggtacctgcgaatccttcgaccaccttcagtgcggcaaagtttgcttctttcatcacacagtattccacggggcaggtcagcgtggagatcgagtgggagctgcagaaggagaacagcaaacgctggaatcccgagatccagtacacttccaactacaacaaatctgttaatgtggactttactgttgacactaatggcgtgtattcagagcctcgccccattggcaccagatacctgactcgtaatctgtaa

SEQ ID NO: 188 - protein, 735 aa, Adeno-associated virus
MAADGYLPDWLEDTLSEGIRQWWKLKPGPPPPKPAERHKDDSRGLVLPGYKYLGPFNGLDKGEPVNEADAAALEHDKAYDRQLDSGDNPYLKYNHADAEFQERLKEDTSFGGNLGRAVFQAKKRVLEPLGLVEEPVKTAPGKKRPVEHSPAEPDSSSGTGKAGQQPARKRLNFGQTGDADSVPDPQPLGQPPAAPSGLGTNTMASGSGAPMADNNEGADGVGNSSGNWHCDSTWMGDRVITTSTRTWALPTYNNHLYKQISSQSGASNDNHYFGYSTPWGYFDFNRFHCHFSPRDWQRLINNNWGFRPKRLNFKLFNIQVKEVTQNDGTTTIANNLTSTVQVFTDSEYQLPYVLGSAHQGCLPPFPADVFMVPQYGYLTLNNGSQAVGRSSFYCLEYFPSQMLRTGNNFTFSYTFEDVPFHSSYAHSQSLDRLMNPLIDQYLYYLSRTNTPSGTTTQSRLQFSQAGASDIRDQSRNWLPGPCYRQQRVSKTSADNNNSEYSWTGATKYHLNGRDSLVNPGPAMASHKDDEEKFFPQSGVLIFGKQGSEKTNVDIEKVMITDEEEIRTTNPVATEQYGSVSTNLQGGNTQAATADVNTQGVLPGMVWQDRDVYLQGPIWAKIPHTDGHFHPSPLMGGFGLKHPPPQILIKNTPVPANPSTTFSAAKFASFITQYSTGQVSVEIEWELQKENSKRWNPEIQYTSNYNKSVNVDFTVDTNGVYSEPRPIGTRYLTRNL

SEQ ID NO: 189 - DNA, 3161 bp, Adeno-associated virus
gattgaatttagcggccgcgaattcgcccttgctgcgtcaactggaccaatgagaactttccattcaatgattgcgtcgacaagatggtgatctggtgggaggagggaaagatgaccgccaaggtcatggagtcggccaaagccattctcggaggaagcaaggtgcgcgtggaccagaaatgtaagtcctcggcccagatagacccgactcccgtgattgtcacctccaacaccaacatgtgcgccgtgattgacgggaactcaacgaccttcgagcaccagcagccgttgcaagaccggatgttcaaatttgaactcacccgccgtctggatcatgactttgggaaggtcaccaagcaggaagtcaaagactttttccggtgggcaaaggatcacgtggttgaggtggagcatgaattctacgtcaaaaagggtggagccaagaaaagacccgcccccagtgacgcagatataagtgagcccaaacgggcgcgcgggtcagttgcgcagccatcgacgtcagacgcggaagcttcgatcaactacgcggacaggtaccaaaacaaatgttctcgtcacgtgggcatgaatctgatgctgtttccctgcagacaatgcgagagaatgaatcaaaattcaaatatctgcttcactcacggacagaaggactgtttagagtgctttcccgtgtcagaatctcaacccgtttctgtcgtcaaaaaggcgtatcagaaactttgctacattcatcatatcatgggaaaggtgccagacgcttgcactgcctgcgatctggtcaatgtggatttggatgactgcatctctgaacaataaatgatttaaatcaggtatggctgccgatggttatcttccagattggctcaaggacactctctctgaaggaataagacagtggtggaagctcaaacctggcccaccaccaccaaagcccgcagagcggcataaggacgacagcgggggtcttgtgcttcctgggtacaagtacctcggacccttcaacggactcgacaagggagagccggtcaacgaggcagacgccgcggccctcgagtacgacaaggcctacgaccggcagctcgacagcggagacaacccgtacctcaagtacaaccacgccgacgcggagtttcaggagcgccttaaagaagatacgtcttttgggggcaacctcggacgagcagtcttccaggcgaaaaagagggttcttgaacctctgggcctggttgaggaacctgttaagacggctccgggaaaaaagaggccggtagagcactctcctgtggagccagactcctcctcgggaacaggaaaagcgggccagcagcctgcgagaaagagattgaattttggtcagactggagacgcagactccgtacctgacccccagcctctcggacagccaccagcagccccctctggtctgggaactaatacgatggctacaggcagtggcgcaccaatggcagacaataacgagggcgccgacggagtgggtaattcctcgggaagttggcattgcgattccacatggatgggcgacagagtcatcaccaccagcacccgaacctgggctctgcccacctacaacaaccatctgtacaagcagatctccagccaatcaggagccagcaacgacaaccactactttggctacagcaccccttgggggtattttgacttcaacagattccactgccacttttcaccacgtgactggcaaagactcatcaacaacaactggggattccggcccaagagactcaacttcaagctctttaacattcaagtcaaggaggtcacgcagaatgacggtacgacgacgattgccaataaccttaccagcacggttcaggtgtttactgactcggagtaccagctcccgtacgtccccggctcggcgcatcaaggatgcctcccgccgttcccagcagacgtcttcatggtgccacagtatggatacctcaccctgaacaacgggagtcaggcagtaggacgctcttcattttactgcctggagtactttccttctcagatgcttcgtaccggaaacaactttaccttcagctacacctttgaggatgttcctttccacagcagctacgctcacagccagagtttggaccgtctcatgaatcctctcatcgaccagtacctgtattacttgagcagaacaaacactccaagcggaaccaccacgcagtccaggcttcagttttctcaggccggagcaagtgacattcgggaccagtctaggaactggcttcctggaccctgttaccgccagcagcgagtatcaaagacagctgcggacaacaacaacagtgaatactcgtggactggagctaccaagtaccacctcaatggcagagactctctggtgaatccgggcccggccatggccagccacaaggacgatgaagaaaagttttttcctcaaagcggggttctcatctttgggaagcaaggctcagagaaaacaaatgtggacattgaaaaggtcatgattacagacgaagaggaaatcagaaccaccaatcccgtggccacggagcagtatggttctgtatctaccaacctccagagcggcaacacacaagcagctactgcagatgtcaacacacaaggcgttcttccaggcatggtctggcaggacagagacgtgcacctgcaggggcctatctgggcaaagattccacacacggacggacattttcacccctctcccctcatgggcggatttggacttaaacaccctcctccacagattctcatcaagaacaccccggtacctgcaaatccttcgaccaccttcagtgcggcaaagtttgcttccttcatcacacagtattccacagggcaggtcagcgtggagatcgagtgggagctgcagaaggagaacagcaaacgctggaaccccgagatccagtacacttccaactacaacaaatctgttaatgtggactttactgtggacactaatggtgtgtattcagagcctcgccccattggcaccagatacctgactcgtaatctgtaattgcttgttaatcaataaaccgtttaattcgtttcagttgaactttggtctctgcgaagggcgaattcgtttaaaccctgcaggactagtccctttagtgagg

SEQ ID NO: 190 - DNA, 3162 bp, Adeno-associated virus
gaattgaatttagcggccgcgaattcgcccttcgcagagaccaaagttcaactgaaacgaattaaacggtttattgattaacaagcaattacagattacgagtcaggtatctggtgccaatggggcgaggctctgaatacacgccattagtgtccacagtaaagtccacattaacagacttgttgtagttggaagtgtactgaatttcgggattccagcgtttgctgttttccttctgcagctcccactcgatctccacgctgacctgtcccgtggagtactgtgtgatgaaggaagcaaactttgccgcactgaaggtggtcgaaggattcgcaggtaccggggtgttcttgatgagaatctgtggaggagggtgtttaagtccgaatccacccatgaggggagaggggtgaaaatgtccgtccgtgtgtggaatctttgcccagatgggcccctgaaggtacacatctctgtcctgccagaccatgcctggaagaacgccttgtgtgttgacatctgcggtagctgcttgtctgttgcctctctggaggttggtagatacagaaccgtactgctccgtagccacgggattggttgtcctgatttcctcttcgtctgtaatcatgaccttttcaatgtccacatttgttttctctgagccttgcttcccaaagatgagaaccccgctctgaggaaaaaacttttcttcattgtccttgtggcttgccatggccgggcccggattcaccagagagtctctgccattgaggtggtacttggtagctccagtccacgagtattcactgttgttgttatccgcagatgtctttgatactcgctgctggcggtaacagggtccaggaagccagttcctagactggtcccgaatgtcactcgctccggcctgagaaaactgaagccttgactgcgtggtggttccacttggagtgtttgttgtgctcaagtaatacaggtactggtcgatgagaggattcatgagacggtccagactctggctgtgagcgtagccgctgtggaaaggaacgtcctcaaaagtgtagctgaaggtaaagttgtttccggtacgcagcatctgagaaggaaagtactccaggcagtaaaatgaagagcgtcctactgcctgactcccgttgttcagggtgaggtatccatactgtggcaccatgaagacgtctgctgggaacggcgggaggcatccttgatgcgccgagccgaggacgtacgggagctggtactccgagtcagtaaacacctgaaccgtgctggtaaggttattggcaatcgtcgtcgtaccgtcattctgcgtgacctctttgacttgaatgttaaagagcttgaagttgagtctcttgggtcggaatccccagttgttgttgatgagtctttgccagtcacgtggtgaaaagtggcagtggaatctgttgaagtcaaaatacccccaaggggtgctgtagccaaagtagtgattgtcgttcgaggctcctgattggctggaaatttgtttgtagaggtggttgttgtaggtgggcagggcccaggttcgggtgctggtggtgatgactctgtcgcccatccatgtggaatcgcaatgccaatttcccgaggaattacccactccgtcggcgccctcgttattgtctgccattggtgcgccactgcctgtagccatcgtattagttcccagaccagagggggctgctggtggctgtccgagaggctgggggtcaggtactgagtctgcgtctccagtctgaccaaaattcaatctttttcttgcaggctgctggcccgcctttccggttcccgaggaggagtctggctccacaggagagtgctctaccggcctcttttttcctggagccgtcttgacaggttccccaaccaggcccagaggttcaagaaccctctttttcgcctggaagactgctcgtccgaggttgcccccaaaagacgtatcttctttaaggcgctcctgaaactccgcgtcggcgtggttgtacttgaggtacgggttgtctccgctgtcgagctgccggtcgtaggctttgtcgtgctcgagggccgcggcgtctgcctcgttgaccggctctcccttgtcgagtccgttgaagggtccgaggtacttgtacccaggaagcacaagacccctgctgtcgtccttatgccgctctgcgggctttggtggtggtgggccaggtttgagcttccaccactgtcttattccttcagagagagtgtcctcgagccaatctggaagataaccatcggcagccatacctgatttaaatcatttattgttcaaagatgcagtcatccaaatccacattgaccagatcgcaggcagtgcaagcgtctggcacctttcccatgatatgatgaatgtagcacagtttctgatacgcctttttgacgacagaaacgggttgagattctgacacgggaaagcactctaaacagtctttctgtccgtgagtgaagcagatatttgaattctgattcattctctcgcattgtctgcagggaaacagcatcagattcatgcccacgtgacgagaacatttgttttggtacctgtctgcgtagttgatcgaagcttccgcgtctgacgtcgatggctgcgcaactgactcgcgcacccgtttgggctcacttatatctgcgtcactgggggcgggtcttttcttggctccaccctttttgacgtagaattcatgctccacctcaaccacgtgatcctttgcccaccggaaaaagtctttgacttcctgcttggtgaccttcccaaagtcatgatccagacggcgggtgagttcaaatttgaacatccggtcttgcaacggctgctggtgttcgaaggtcgttgagttcccgtcaatcacggcgcacatgttggtgttggaggtgacgatcacgggagtcgggtctatctgggccgaggacttgcatttctggtccacgcgcaccttgcttcctccgagaatggctttggccgactccacgaccttggcggtcatcttcccctcctcccaccagatcaccatcttgtcgacacagtcgttgaagggaaagttctcattggtccagttgacgcagcaagggcgaattcgtttaaacctgcaggactagtccctttagtgaggg

SEQ ID NO: 191 - DNA, 3164 bp, Adeno-associated virus
gcgaattgaatttagcggccgcgaattcgcccttcgcagagaccaaagttcaactgaaacgaattaaacggtttattgattaacaagcaattacaaattacgagtcaggtatctggtgccaatggggcgaggctctgaatacacgccattagtgtccacagtaaagtccacattaacagacttgttgtagttggaagtgtactgaatttcgggattccagcgtttgctgttttccttctgcagctcccactcgatctccacgctgacctgtcccgtggagtactgtgtgatgaaggaagcaaactttgccgcactgaaggtggtcgaaggattcgcaggtaccggggtgttcttgatgagaatctgtggaggagggtgtttaggtccgaatccacccatgaggggagaggggtgaaaatgtccgtccgtgtgtggaatctttgcccagatgggcccctgaaggtacacatctctgtcctgccagaccatgcctggaagaacgccttgtgtgttgacatctgcggtagctgcttgtctgttgcctctctggaggttggtagatacagaaccatactgctccgtagccacgggattggttgtcctgatttcctcttcgtctgtaatcatgaccttttcaatgtccacatttgttttctctgagccttgcttcccaaagatgagaaccccgctctgaggaaaaaacttttcttcattgtccttgtggcttgccatggccgggcccggattcaccagagagtctctgccattgaggtggtacttggtagctccagtccacgagtattcactgttgttgttatccgcagatgtctttgatactcgctgctggcggtaacagggtccaggaagccagttcctagactggtcccgaatgtcactcgctccggcctgagaaaactgaagccttgactgcgtggtggttccacttggagtgtttgttgtgctcaagtaatacaggtactggtcgatgagaggattcatgagacggtccagactctggctgtgagcgtagctgctgtggaaaggaacgtcctcaaaagtgtagctgaaggtaaagttgtttccggtacgcagcatctgagaaggaaagtactccgggcagtaaaatgaagagcgtcctactgcctgactcccgttgctcagggtgaggtatccatactgtggcaccatgaagacgtctgctgggaacggcgggaggcatccttgatgcgccgagccgaggacgtacgggagctggtactccgagtcagtaaacacctgaaccgtgctggtaaggttattggcaatcgtcgtcgtaccgtcattctgcgtgacctctttgacttgaatgttaaagagcttgaagttgagtctcttgggtcggaatccccagttgttgttgatgagtctttgccagtcacgtggtgaaaagtggcagtggaatctgttgaagtcaaaatacccccaaggggtgctgtagccaaagtagtgattgtcgttcgaggctcctgattggctggaaatttgtctgtagaggtggttgttgtaggtgggcagggcccaggttcgggtgctggtggtgatgactctgtcgcccatccatgtggaatcgcaatgccgatttcccgaggaattacccactccgtcggcgccctcgttattgtctgccattggtgcgccactgcctgtagccatcgtattagttcccagaccagagggggctgctggtggctgtccgagaggctgggggtcaggtactgagtctgcgtctccagtctgaccaaaattcaatctttttcttgcaggctgctggcccgcctttccggttcccgaggaggagtctggctccacaggagagtgctctaccggcctcttttttcccggagccgtcttaacaggttccccaaccaggcccagaggttcaagaaccctctttttcgcctggaagactgctcgtccgaggttgcccccaaaagacgtatcttctttaaggcgctcctgaaactccgcgtcggcgtggttgtacttgaggtacgggttgtctccgctgtcgagctgccggtcgtaggctttgtcgtgctcgagggccgcggcgtctgcctcgttgaccggctctcccttgtcgagtccgttgaagggtccgaggtacttgtacccaggaagcacaagacccctgctgtcgtccttatgccgctctgcgggctttggtggtggtgggccaggtttgagcttccaccactgtcttattccttcagagagagtgtcctcgagccaatctggaagataaccatcggcagccatacctgatttaaatcatttattgttcaaagatgcagtcatccaaatccacattgaccagatcgcaggcagtgcaagcgtctggcacctttcccatgatatgatgaatgtagcacagtttctgatacgcctttttgacgacagaaacgggttgagattctgacacgggaaagcactctaaacagtctttctgtccgtgagtgaagcagatatttgaattctgattcattctctcgcattgtctgcagggaaacagcatcagattcatgcccacgtgacgagaacatttgttttggtacctgtctgcgtagttgatcgaagcttccgcgtctgacgtcgatggctgcgcaactgactcgcgcacccgtttgggcccacttatatctgcgtcactgggggcgggtcttttcttggctccaccctttttgacgtagaattcatgctccacctcaaccacgtgatcctttgcccaccggaaaaagtctttgacttcctgcttggtgaccttcccaaagtcatgatccagacggcgggtgagttcaaatttgaacatccggtcttgcaacggctgctggtgttcgaaggtcgttgagttcccgtcaatcacggcgcacatgttggtgttggaggtgacgatcacgggagtcgggtctatctgggccgaggacttgcatttctggtccacgcgcaccttgcttcctccgagaatggctttggccgactccacgaccttggcggtcatcttcccctcctcccaccagatcaccatcttgtcgacacagtcgttgaagggaaagttctcattggtccagttgacgcagcaagggcgaattcgtttaaacctgcaggactagtccctttagtgaggg

SEQ ID NO: 192 - DNA, 3163 bp, Adeno-associated virus
accctcactaaagggactagtcctgcaggtttaaacgaattcgcccttgctgcgtcaactggagcaatgagaactttcccttcaacgactgtgtcgacaagatggtgatttggtgggaggaggggaagatgaccgccaaggtcgtggagtcggccaaagccattctcggaggaagcaaggtgcgcgtggaccagaaatgcaagtcctcggcccagatagatccgactcccgtgatcgtcacctccaacaccaacatgtgcgccgtgattgacgggaactcaacgaccttcgaacaccagcagccgttgcaagaccggatgttcaaatttgaactcacccgccgtctggatcatgactttgggaaggtcaccaagcaggaagtcaaagactttttccggtgggcaaaggatcacgtggttgaggtggagcatggattctacgtcaaaaagggtggagccaagaaaagacccgcccctagtgacgcagatataagtgagcccaaacgggtgcgcgagtcagttgcgcagccatcgacgtcggacgcggaagcttcgatcaactacgcggacaggtaccaaaacaaatgttctcgtcacgtgggcatgaatctgatgctgtttccctgcagacaatgcgagagaatgaatcaaaattcaaatatctgcttcactcacggacagaaagactgtttagagtgctttcccgtgtcagaatctcaacctgtttctgtcgtcaaaaaggcgtatcagaaactgcgctacattcatcatatcatgggaaaggtgccagacgcttgcactgcctgcgatctggtcaatgtggatttggatgactgcatctctgaacaataaatgatttaaatcaggtatggctgccgatggttatcttccagattggctcgaggacactctctctgaaggaataagacagtggtggaagctcaaacctggcccaccaccaccaaagcccgcagagcggcataaggacgacagcaggggtcttgtgcttcctgggtacaagtacctcggacccttcaacggactcgacaagggagagccggtcaacgaggcagacgccgcggccctcgagcacgacaaggcctacgaccggcagctcgacagcggagacaacccgtacctcaagtacaaccacgccgacgcggagtttcaggagcgtcttaaagaagatacgtcttttgggggcaacctcggacgagcagtcttccaggcgaaaaagagggttcttgaacctctgggcctggttgaggaacctgttaagacggctccgggaaaaaagaggccggtagagcactctcctgcggagccagactcctcctcgggaaccggaaaagcgggccagcagcctgcaagaaaaagactgaatttcggtcagactggagacgcagactccgtacctgacccccagcctctcggacagccaccagcagcccccacaagtttgggatctactacaatggctacaggcagtggcgcaccaatggcagacaataacgagggtgccgatggagtgggtaattcctcaggaaattggcattgcgattcccaatggctgggcgacagagtcatcaccaccagcacccgaacctgggccctgcccacctacaacaaccacctttacaagcaaatctccagccaatcaggagcctcaaacgacaaccactactttggctacagcaccccctgggggtattttgacttcaacagattccactgccacttttcaccacgtgactggcaaagactcatcaacaacaactggggattccgacccaagagactcaacttcaagctctttaacattcaagtcaaagaggtcacgcagaatgacggtacgacgacgattgccaataaccttaccagcacggttcaggtgtttactgactcggagtaccagctcccgtacgtcctcggctcggcgcatcaaggatgcctcccgccgtttccagcggacgtcttcatggtcccacagtatggatacctcaccctgaacaacgggagtcaggcggtaggacgctcttccttttactgcctggagtgctttccttctcagatgctgcgtactggaaacaactttcagttcagctacacttttgaagacgtgcctttccacagcagctacgctcacagccagagtttggatcggctgatgaatcctctgatcgaccagtacctgtattatctaaacagaacacaaacagctagtggaactcagcagtctcggctactgtttagccaagctggacccacaagcatgtctcttcaagctaaaaactggctgcctggaccgtgttatcgccagcagcgtttgtcaaagcaggcaaacgacaacaacaacagcaactttccctggactggagctaccaagtaccacctcaatggcagagactctttggtgaacccgggcccggccatggccagccacaaggacgatgaagaaaagtttttccccatgcatggaaccctaatatttggtaaagaaggaacaaatgctaccaacgcggaattggaaaatgtcatgattacagatgaagaggaaatcaggaccaccaatcccgtggctacagagcagtacggatatgtgtcaaataatttgcaaaactcaaatactgctgcaagtactgaaactgtgaatcaccaaggagcattacctggtatggtgtggcaggatcgagacgtgtacctgcagggacccatttgggccaagattcctcacaccgatggacactttcatccttctccactgatgggaggttttggactcaaacacccgcctcctcagattatgatcaaaaacactcccgttccagccaatcctcccacaaacttcagttctgccaagtttgcttccttcatcacacagtattccacgggacaggtcagcgtggagatcgagtgggagctgcagaaggagaacagcaaacgctggaatcccgaaattcagtacacttccaactacaacaaatctgttaatgtggactttactgtggacactaatggtgtgtattcagagcctcgccccattggcaccagatacctgactcgtaatctgtaattgcttgttaatcaataaaccgtttaattcgtttcagttgaactttggtctctgcgaagggcgaattcgcggccgctaaattcaattcgcc

SEQ ID NO: 193 - protein, 735 aa, Adeno-associated virus
MAADGYLPDWLEDTLSEGIRQWWKLKPGPPPPKPAERHKDDSRGLVLPGYKYLGPFNGLYKGEPVDEADAAALEHDKAYDRQLDSGDNPYLKYNHADAEFQERLKEDTSFGGNLGRAVFQAKKRVLEPLGLVGEPVKTAPGKKRPVEHSPVEPDSSSGTGKAGNQPARKRLNFGQTGDADSVPDPQPLGQPPAAPSGLGSTTMATGSGAPVADNNEGADGVGNSSGNWHCDSQWLGDRVITTSTRTWALPTYNNHLYKQISSQSGASNDNHYFGYSTPWGYFDFNRFHCHFSPRDRQRLINNNWGFRPKRLNFKLFNIQVKEVTQNDGTTTIANNLTSTVQVFTDSGYQLPYVLGLAHQGCLPPFPADVFMVPQYGYLTLNNGSQAVGRSSFYCLEYFPSQMLRTGNNFQFSYTFEDVPFHSSYAHSQSLDRLMNPLIDQYLYYLNKTQSNSGTLQQSRLLFSQAGPTSMSLQAKNWLPGPCYRQQRLSKQANDNNNSNFPWTAATKYHLNGRDSLVNPGPAMASHKDDEEKFFPMHGTLIFGKQGTNANDADLDNVMITDEEEIRTTNPVATEQYGYVSNNLQNSNTGPTTGTVNHQGALPGMVWQDRDVYLQGPIWAKIPHTDGHFHPSPLMGGFGLKHPPPQIMIKNTPVPANPPTNFSSAKFASFITQYSTGQVSVEIEWELQKEDSKRWNPEIQYTSNYNKPVNVDFTVDTNGVYSEPRPIGTRYLTRNL

SEQ ID NO: 194 - DNA, 2208 bp, Adeno-associated virus
atggctgccgatggttatcttccagattggctcgaggacactctctctgaaggaataagacagtggtggaagctcaaacctggcccaccaccaccaaagcccgcagagcggcataaggacgacagcaggggtcttgtgcttcctgggtacaagtacctcggacccttcaacggactctacaagggagagccggtcgacgaggcagacgccgcggccctcgagcacgacaaggcctacgaccggcagctcgacagcggagacaacccgtacctcaagtacaaccacgccgacgcggagtttcaggagcgccttaaagaagatacgtcttttgggggcaacctcggacgagcagtcttccaggccaaaaagagggttcttgaacctctgggcttggttggggagcctgttaaaacggctccgggaaaaaagaggccggtagagcactctcctgtggagccagactcctcctcgggaaccggaaaagcgggcaaccagcctgcaagaaaaagattgaattttggtcagactggagacgcagactccgtacctgacccccagcctctcggacagccaccagcagccccctctggtctgggatctactacaatggctacaggcagtggcgcaccagtggcagacaataacgagggtgccgatggagtgggtaattcctcaggaaattggcattgcgattcccaatggctgggcgacagagtcatcaccaccagcacccgaacctgggctctgcccacctacaataaccacctctacaagcaaatctccagccaatcaggagcctcaaacgacaaccactactttggctacagcaccccctgggggtattttgacttcaacagattccactgccacttttcaccacgtgaccggcaaagactcatcaacaacaactggggattccgaccaaaaagactcaacttcaagctctttaacattcaagtcaaagaggtcacgcagaatgacggtacgacgacgattgccaataaccttaccagcacggttcaggtgtttactgactcggggtaccagctcccgtacgtcctcggcttggcgcatcaaggatgcctcccgccgttcccagcagacgtcttcatggtgccacagtatggatacctcaccctgaacaacgggagtcaggcggtaggacgctcttccttttactgcctggagtactttccttctcagatgctgcgtactggaaacaactttcagttcagctacacctttgaagacgttcctttccacagcagctacgctcacagccagagtctggatcggctgatgaatcctctgatcgaccagtacctgtattatctgaacaagacacaatcaaatagtggaactcttcagcagtctcggctactgtttagccaagctggacccaccagcatgtctcttcaagctaaaaactggctgcctggaccttgctacagacagcagcgtctgtcaaagcaggcaaacgacaacaacaacagcaactttccctggactgcggctacaaagtatcatctaaatggccgggactcgttggttaatccaggaccagctatggccagccacaaagacgatgaagaaaagtttttccccatgcatggaaccctgatatttggtaaacaaggaacaaatgctaacgacgcggatttggacaatgtcatgattacagatgaagaagaaatccgcaccaccaatcccgtggctacggagcagtacggatatgtgtcaaataatttgcaaaactcaaatactggtccaactactggaactgtcaatcaccaaggagcgttacctggtatggtgtggcaggatcgagacgtgtacctgcagggacccatttgggccaagattcctcacaccgatggacactttcatccttctccacttatgggaggttttggactcaaacacccacctcctcagatcatgattaaaaacactcccgttccagccaatcctcccacaaacttcagttctgccaagtttgcttctttcatcacacagtattccacgggacaagtcagcgtggagatcgagtgggagctgcagaaggaggacagcaaacgctggaaccccgagatccagtacacttccaactataacaaacctgttaatgtggactttactgtggacactaatggtgtgtattcagagcctcgccccattggcaccagatacctgactcgtaatctgtaa

SEQ ID NO: 195 - DNA, 3161 bp, Adeno-associated virus
cgaattgatttagcggccgcgaattcgcccttcgcagagaccaaagttcaactgaaacgaattaaacggtttattgattaacaagcaattacagattacgagtcaggtatctggtgccaatggggcgaggctctgaatacacaccattagtgtccacagtaaagtccacattaacagatttgttgtagttggaagtgtactggatctcgggattccagcgtttgctgttctccttctgtagctcccactcgatctccacgctgacccgccccgtggaatactgtgtgatgaaggaagcaaactttgccgcactgaaggtggtcgaaggattcgcaggtaccggggtgtttttgatgagaatctgtggaggagggtgtttaagtccgaatccgcccatgaggggagaggggtgaaaatgtccgtccgtgtgcggaatctttgcccagataggcccctgcaggtacacgtctctgtcctgccagaccatgcctggaagaacgccttgtgtgttgacatctgcagtagatgcttgtgtgttgccgctctggaggttggtagatacagaaccatactgctccgtggccacgggattggtggttctgatttcctcttcgtctgtaatcatgaccttttcaatgtccacatttgttttctctgatccttgttttccaaagatgagaaccccgctctgaggaaaaaacttttcttcatcgtccttgtggctggccattgccgggcccggattcaccagagagtctctgccattgaggtggtacttggtagctccaatccacgagtattcactgttgttgttgtccgcagatgtctttgatactcgctgctggcggtaacagggtccaggaagccagttcctagactgatcccgaatgtcactcgctccggcctgagaaaactgaagcctggactgcgtggtggttccgcttggagtgtttgttctgctcaagtaatacaggtactggtcgatgagaggattcatgagacggtccaaactctggctgtgagcgtagctgctgtggaaaggaacatcctcaaaggtgtagctgaaggtaaagttgtttccggtacgcagcatctgagaagggaagtactccaggcagtaaaatgaagagcgtcctactgcctgactcccgttgttcagggtgaggtatccatactgtggcaccatgaagacgtctgctgggaacggcgggaggcatccttgatgcgccgagccgaggacgtacgggagctggtactccgagtcagtaaacacctgaaccgtgctggtaaggttattggcaatcgtcgtcgtaccatcattctgcgtgacctctctgacttgaatgttaaagagcttgaagttgagtctcttgggccggaatccccagttgttgttgatgagtctttgccagtcacgtggtgaaaagtggcagtggaatctgttgaagtcaaaatacccccaaggggtgctgtagccaaagtagtggttgtcgttgctggctcctgattggctggaaatctgcttgtacagatggttgttgtaggtgggcagagcccaggttcgggtgctggtggtgatgactctgtcgcccatccatgtggaatcgcaatgccaatttcccgaggaattacccactccgtcggcgccatcgttattgtctgccattggtgcgccactgcctgtagccatcgtattagttcccagaccagagggggctgctggtggctgtccgagaggctgggggtcaggtacggagtctgcgtctccagtctgaccgaaattcaatctctttcttgcaggctggttgcccgcttttccggttcccgaggaggagtctggctccacaggagagtgctctaccggcctcttttttcccggagccgtcttaacaggctcctcaaccaggcccagaggttcaagaaccctcttttttgcctggaagactgctcgtccgaggttgcccccaaaagacgtatcttctttaaggcgctcctgaaactccgcgtcggcgtggtcgtacttgaggtacgggttgtctccgctgtcgagctgccggtcgtaggccttgtcgtgctcgagggccgcggcgtctgcctcgttgaccggctctcccttgtcgagtccgttgaagggtccgaggtacttgtacccaggaagcacaagacccctgctgtcgtccttatgccgctctgcgggctttggtggtggtgggccaggtttgagcttccaccactgtcttattccttcagagagagtgtcctcgagccaatctggaagataaccatcggcagccatacctgatttaaatcatttattgttcagagatgcagtcatccaaatccacattgaccagatcgcaggcagtgcaagcgtctggcacctttcccatgatatgatgaatgtagcaaagtttctgatacgcctttttgacgacagaaacgggttgagattctgacacgggaaagcactctaaacagtctttctgtccgtgagtgaagcagatatttgaattctgattcattctctcgcattgtctgcagggaaacagcatcagattcatgcccacgtgacgagaacatttgttttggtacctgtccgcgtagttgatcgaagcttccgcgtctgacgtcgatggctgcgcaactgactcgcgcgcccgtttgggctcacttatatctgcgtcactgggggcgggtcttttcttggctccaccctttttgacgtagaattcatgctccacctcaaccacgtgatcctttgcccaccggaaaaagtctttcacttcctgcttggtgaccttcccaaagtcatgatccagacggcgggttagttcaaatttgaacatccggtcttgcaacggctgctggtgttcgaaggtcgttgagttcccgtcaatcacggcgcacatgttggtgttggaggtggcgatcacgggagtcgggtctatctgggccgaggacttgcacttttggtccacgcgcaccttgcttcctccgagaatggcttcggccgattccacgaccttggcggtcatctttccctcctcccaccagatcaccatcttgtcgacacagtcgttgaagggaaagttctcattggtccagttgacgcagcaagggcgaattcgtttaaacctgcaggaactagtcccttagtgagg

SEQ ID NO: 196 - protein, 735 aa, Adeno-associated virus
MAADGYLPDWLEDTLSEGIRQWWKLKPGPPPPKPAERHKDDSRGLVLPGYKYLGPFNGLYKGEPVNEADAAALEHDKAYDRQLDSGDNPYLKYNHAGAEFQERLKEDTSFGGNLGRAVFQAKKRVLEPLGLVEEPVKTAPGKKRPVEHSPVEPDSSSGTGKAGNQPARKRLNFGQTGDADSVPDPQPLGQPPAAPSGLGSTTMATGSGAPVADNNEGADGVGNSSGNWHCDSQWLGDRVITTSTRTWALPTYNNHLYKQISSQSGASNDNHYFGYSTPWGYFDFNRFHCHFSPRDWQRLINNNWGFRPKRLNFKLFNIQVKEVTQNDGTTTIANNLTSTVQVFTDSEYQLPYVLGSAHQGCLPPFPADVFMVPQYGYLTLNNGSQAVGRSSFYCLEYFPSQMLRTGNNFQFSYTFEDVPFHSSYAHSQSLDRLMNPLIDQYLYYLNKTQSNSGTLQQSRLLFSQAGPTSMSLQAKNWLPGPCYRQQRLSKQANDNNNSNFPWTAATKYHLNGRDSLVNPGPAMASHKDDEEKFFPMHGTLIFGKQGTNANDADLDNVMITDEEEIRTTNPVATEQYGYVSNNLQDSNTGPTTGTVNHQGALPGMVWQDRDVYLQGPIWAKIPHTDGHFHPSPLMGGFGLKHPPPQIMIKNTPVPANPPTNFSSAKFASFITQYSTGQVSVEIEWELQKENSKRWNPEIQYTSNYNKSVNVDFTVDTNGVYSEPRPIGTRYLTRNL

SEQ ID NO: 197 - DNA, 2208 bp, Adeno-associated virus
atggctgccgatggttatcttccagattggctcgaggacactctctctgaaggaataagacagtggtggaagctcaaacctggcccaccaccgccaaagcccgcagagcggcataaggacgacagcaggggtcttgtgcttcctgggtacaagtacctcggacccttcaacggactctacaagggagagccggtcaacgaggcagacgccgcggccctcgagcacgacaaggcctacgaccggcagctcgacagcggagacaacccgtacctcaagtacaaccacgccggcgcggagtttcaggagcgccttaaagaagatacgtcttttgggggcaacctcggacgagcagtcttccaggccaaaaagagggttcttgaacctctgggcttggttgaggagcctgttaaaacggctccgggaaaaaagaggccggtagagcactctcctgtggagccagactcctcctcgggaaccggaaaagcgggcaaccagcctgcaagaaaaagattgaattttggtcagactggagacgcagactccgtacctgacccccagcctctcggacagccaccagcagccccctctggtctgggatctactacaatggctacaggcagtggcgcaccagtggcagacaataacgagggtgccgatggagtgggtaattcctcaggaaattggcattgcgattcccaatggctgggcgacagagtcatcaccaccagcacccgaacctgggctctgcccacctacaacaaccacctctacaagcaaatctccagccaatcaggagcctcaaacgacaaccactactttggctacagcaccccctgggggtattttgacttcaacagattccactgccacttttcaccacgtgactggcaaagactcatcaacaacaactggggattccgaccaaagagactcaacttcaagctctttaacattcaagtcaaagaggtcacgcagaatgacggtacgacgacgattgccaataaccttaccagcacggttcaggtgtttactgactcggagtaccagctcccgtacgtcctcggctcggcgcatcaaggatgcctcccgccgttcccagcagacgtcttcatggtgccacagtatggatacctcaccctgaacaacgggagtcaggcggtaggacgctcttccttttactgcctggagtactttccttctcagatgctgcgtactggaaacaactttcagttcagctacacctttgaagacgttcctttccacagcagctacgctcacagccagagtctggatcggctgatgaatcctctgatcgaccagtacctgtattatctgaacaagacacaatcaaatagtggaacccttcagcagtctcggctactgtttagccaagctggacccaccagcatgtctcttcaagctaaaaactggctgcctggaccttgctacagacagcagcgtctgtcaaagcaggcaaacgacaacaacaacagcaactttccctggactgcggctacaaagtatcatctaaatggccgggactcgttggttaatccaggaccagctatggccagccacaaagacgatgaagaaaagtttttccccatgcatggaaccctgatatttggtaaacaaggaacaaatgctaacgacgcggatttggacaatgtcatgattacagatgaagaagaaatccgcaccaccaatcccgtggctacggagcagtacggatatgtgtcaaataatttgcaagactcaaatactggtccaactactggaactgtcaatcaccaaggagcgttacctggtatggtgtggcaggatcgagacgtgtacctgcagggacccatttgggccaagattcctcacaccgatggacactttcatccttctccacttatgggaggttttggactcaaacacccacctcctcagatcatgattaaaaacactcccgttccagccaatcctcccacaaacttcagttctgccaagtttgcttctttcatcacacagtattccacgggacaagtcagcgtagagatcgagtgggagctgcagaaggagaacagcaaacgctggaaccccgagatccagtacacttccaactataacaaatctgttaatgtggactttactgtggacactaatggtgtgtattcagagcctcgccccattggcaccagatacctgactcgtaatctgtaa

SEQ ID NO: 198 - protein, 738 aa, Adeno-associated virus
MAADGYLPDWLEDNLSEGIREWWDLKPGAPKPKANQQKQDDGRGLVLPGCKYLGPFNGLDKGEPVNAADAAALEHDKAYDQQLKAGDNPYLRYNHADAEFQERLQEDTSFGGNLGRAVFQAKKRVLEPLGLVEEGAKTAPGKKRPVEPSPQRSPDSSTGIGKTGQQPAKKRLNFGQTGDSESVPDPQPIGEPPAGPSGLGSGTMAAGGGAPMADNNEGADGVGSSSGNWHCDSTWLGDRVITTSTRTWALPTYNNHLYKQISNGTSGGSTNDNTYFGYSTPWGYFDFNRFHCHFSPRDWQRLINNNWGFRPKRLNFKLFNIQVKEVTQNEGTKTIANNLTSTIQVFTDSEYQLPYVLGSAHQGCPPPFPADVFMIPQYGYLTLNNGSQAVGRSSFYCLEYFPSQMRRTGNNFEFSYQFEDVPFHSSYAHSQSLDRLMNPLIDQYLYYLSRTQSTGGTAGTQQLLFSQAGPNNMSAQAKNWLPGPCYRQQRVSTTLSQNNNSNFAWTGATKYHLNGRDSLVNPGVAMATHKDDEERFFPSSGVLMFGKQGAGKDNVDYSSVMLTSEEEIKTTNPVATEQYGVVADNLQQQNAAPIVGAVNSQGALPGMVWQNRDVYLQGPIWAKIPHTDGNFHPSPLMGGFGLKHPPPQILIKNTPVPADPPTTFSQAKLASFITQYSTGQVSVEIEWELQKENSKRWNPEIQYTSNYNKSVNVDFTVDTNGVYSEPRPIGTRYLTRNL

SEQ ID NO: 199 - DNA, 2217 bp, Adeno-associated virus
atggctgccgatggttatcttccagattggctcgaggacaacctctctgagggcattcgcgagtggtgggacttgaaacctggagccccgaaacccaaagccaaccagcaaaagcaggacgacggccggggtctggtgcttcctggctgcaagtacctcggacccttcaacggactcgacaagggggagcccgtcaacgcggcggacgcagcggccctcgagcacgacaaggcctacgaccagcagctcaaagcgggtgacaatccgtacctgcggtataaccacgccgacgccgagtttcaggagcgtctgcaagaagatacgtcttttgggggcaacctcgggcgagcagtcttccaggccaagaagcgggttctcgaacctctcggtctggttgaggaaggcgctaagacggctcctggaaagaagagaccggtagagccatcaccccagcgttctccagactcctctacgggcatcggcaagacaggccagcagcccgcgaaaaagagactcaactttgggcagactggcgactcagagtcagtgcccgaccctcaaccaatcggagaaccccccgcaggcccctctggtctgggatctggtacaatggctgcaggcggtggcgctccaatggcagacaataacgaaggcgccgacggagtgggtagttcctcaggaaattggcattgcgattccacatggctgggcgacagagtcatcaccaccagcacccgaacctgggccctccccacctacaacaaccacctctacaagcaaatctccaacgggacatcgggaggaagcaccaacgacaacacctacttcggctacagcaccccctgggggtattttgactttaacagattccactgccacttctcaccacgtgactggcagcgactcatcaacaacaactggggattccggcccaagagactcaacttcaagctcttcaacatccaggtcaaggaggtcacgcagaatgaaggcaccaagaccatcgccaataaccttaccagcacgattcaggtctttacggactcggaataccagctcccgtacgtcctcggctctgcgcaccagggctgcccgcctccgttcccggcggacgtcttcatgattcctcagtacgggtacctgactctgaacaacggcagtcaggccgtgggccgttcctccttctactgcctggagtactttccttctcaaatgcggagaacgggcaacaactttgagttcagctaccagtttgaggacgtgccttttcacagcagctacgcgcatagccaaagcctggaccggctgatgaaccccctcatcgaccagtacctgtactacctgtctcggactcagtccacgggaggtaccgcaggaactcagcagttgctattttctcaggccgggcctaataacatgtcggctcaggccaaaaactggctacccgggccctgctaccggcagcaacgcgtctccacgacactgtcgcaaaataacaacagcaactttgcttggaccggtgccaccaagtatcatctgaatggcagagactctctggtaaatcccggtgtcgctatggcaacgcacaaggacgacgaagagcgattttttccatccagcggagtcttgatgtttgggaaacagggagctggaaaagacaacgtggactatagcagcgttatgctaaccagtgaggaagaaatcaaaaccaccaacccagtggccacagaacagtacggcgtggtggccgataacctgcaacagcaaaacgccgctcctattgtaggggccgtcaacagtcaaggagccttacctggcatggtctggcagaaccgggacgtgtacctgcagggtcctatctgggccaagattcctcacacggacggcaactttcatccttcgccgctgatgggaggctttggactgaaacacccgcctcctcagatcctgattaagaatacacctgttcccgcggatcctccaactaccttcagtcaagccaagctggcgtcgttcatcacgcagtacagcaccggacaggtcagcgtggaaattgaatgggagctgcagaaagagaacagcaagcgctggaacccagagattcagtatacttccaactataacaaatctgttaatgtggactttactgtggacactaatggtgtgtattcagagcctcgccccattggcaccagatacctgactcgtaatctgtaa

SEQ ID NO: 200 - DNA, 3167 bp, Adeno-associated virus
attgaatttagcggccgcgaattcgcccttcgcagagaccaaagttcaactgaaacgaattaaacggtttattgattaacaagcaattacagattacgagtcaggtacctggtgccaatggggcgaggctctgaatacacaccattagtgtccacagtaaagtccacattaacagatttgttgtagttggaagtgtactgaatctcgggattccagcgtttgctgttctccttctgcagctcccactcgatctccacgctgacctgccccgtggagtactgtgtaatgaaggaagcaaactttgccgcactgaaggtagtcgaaggattcgcaggtaccggggtgttcttgatgagaatctgcgggggagggtgtttaagtccgaatccgcccatgaggggagaggggtgaaaatgtccgtccgtgtgtggaatctttgcccagatgggcccctgcaggtacacgtctctgtcctgccacaccatgcctggaagaacgccttgtgtgttgacatctgaggtagctgcttgtgtgttgccgctctggaggttggtagatacagaaccatactgctccgtagccacgggattggtggtcctgatttcctcttcgtctgtaatcatgaccttttcaatgtccacattagtttttcccgagtcttgttttccaaagatgagaaccccgctctgaggaaaaaacttttcttcatcgtccttgtggctggccatggccgggcccggattcaccagagagtctcttccattaaggtggtacttggtagctccagtccacgagtattcactgttgttgttatccgcagatgtctttgatactcgctgctggcggtaacagggtccaggaagccagttcctagactggtcccgaatgtcacttgctccggcctgagaaaactgaagccttgactgcgtggtggttccgcttggagtgtttgttctgctcaagtaatacaggtactggtcgatgagaggattcatgagacggtccaaactctggctgtgggcgtagctgctgtggaaaggaacgtcctcaaaggtgtagctgaaggtaaagttgtttccggtacgcagcatctgagaaggaaagtactccaggcagtaaaatgaagagcgtcctactgcctgactcccgttgttcagggtgaggtatccatactgtggcaccatgaagacgtctgctgggaacggcgggaggcatccttgatgcgccgagccgaggacgtacgggagctggtactccgagtcagtaaacacctgaaccgtgctggtaaggttattggcaatcgtcgtcgtaccgtcattctgcgtgacctccttgacttgaatgttaaagagcttgaagttgagtcttttgggccggaatccccaattgttgttgatgagtctttgccagtcacgtggcgaaaagtggcagtggaatctgttgaagtcaaaatacccccaaggggtgctgtagccaaagtagtggttgtcgtttgaggctcctgattggctggaaatctgcttgtagaggtggttgttgtaggtgggcagagcccaggtgcgggtgctggtggtgatgactctgtcgcccatccatgtggaatcgcaatgccaatttcccgaggaattacccactccgtcggcgccctcgttattgtctgccattggtgcgccactgcctgtagccatcgtattagttcccagaccagagggggctgctggtggctgtccgagaggctgggggtcaggtacggagtctgcgtctccagtctgaccgaaattcaatctctttcttgcaggctgctggcccgcttttccggttcccgaggaggagtctggctccgcaggagagtgctctaccggcctcttttttcccggagccgtcttaacaggttcctcaaccaggcccagaggttcaagaaccctctttttcgcctggaagactgctcgtccgaggttgcccccaaaagacgtatcttctttaagacgctcctggaactccgcgtcggcgtggttgtacttggggtacgggttgtctccgctgtcgagctgccggtcgtaggccttgtcgtgctcgagggccgcggcgtctgcctcgttgaccggctctcccttgtcgagtccgttgaagggtccaaggtacttgtacccaggaagcacaagacccctgctgtcgtccttatgccgctctgcgggctttggtggtggtgggccaggtttgagcttccaccactgtcttattccttcagagagagtgtcctcgagccaatctggaagataaccatcggcagccatacctgatttaaatcatttattgttcagagatgcagtcatccaaatccacattgaccagatcgcaagcagtgcaagcgtctggcacctttcccatgatatgatgaatgtagcacagtttctgatacgcctttttgacgacagaaacgggttgagattctgacacgggaaagcactctaaacagtctttctgtccgtgagtgaagcagatatttgaattctgattcattctctcgcattgtctgcagggaaacagcatcagattcatgcccacgtgacgagaacatttgttttggtacctgtccgcgtagttgattgaagcttccgcgtctgacgtcgatggctgcgcaactgactcgcgcgcccgtttgggctcacttatatctgcgtcactgggggcgggtctttttttggctccaccctttttgacgtagaattcatgctctacctcaaccacgtgatcctttgcccaccggaaaaagtctttgacttcctgcttggtgaccttcccaaagtcatgatccagacggcgggtgagttcaaatttgaacatccggtcttgcaacggctgctggtgttcgaaggtcgttgagttcccgtcaatcactgcgcacatgttggtgttggaggtgacaatcacgggagtcgggtctatctgggccgaggacttgcatttctggtccacgcgcaccttgcttcctccgagaatggctttggccgactccacgaccttggcggtcatcttcccctcctcccaccagatcaccatcttgtcgacgcaatcattgaaaggaaagttctcattggtccagttgacgcagccgtagaaagggcgaattcgtttaaacctgcaggactagtccctttagtgagggt

SEQ ID NO: 201 - DNA, 3161 bp, Adeno-associated virus
aattgaatttagcggccgcgaattcgcccttcgcagagaccaaagttcaactgaaacgaattaaacggtttattgattaacaagcaattacagattacgagtcaggtatctggtgccaatggggcgaggctctgaatacacaccattagtgtccacagtaaagtccacattaacagatttgttgtagttggaagtgtactgaatctcgggattccagcgtttgctgttctccttctgcagctcccactcgatctccacgctgacctgccccgtggagtactgtgtaatgaaggaagcaaactttgccgcactgaaggtagtcgaaggattcgcaggtaccggggtgttcttgatgagaatctgcgggggagggtgtttaagtccgaatccgcccatgaggggagaggggtgaaaatgtccgtccgtgtgtggaatctttgcccagatgggcccctgcaggtacacgtctctgtcctgccacaccatgcctggaagaacgccttgtgtgttgacatctgaggtagctgcttgtgtgttgccgctctggaggttggtagatacagaaccatactgctccgtagccacgggattggtggtcctgatttcctcttcgtctgtaatcatgaccttttcaatgtccacattagtttttcccgagtcttgttttccaaagatgagaaccccgctctgaggaaaaaacttttcttcatcgtccttgtggctggccatggccgggcccggattcaccagagagtctcttccattaaggtggtacttggtagctccagtccacgagtattcactgttgttgttatccgcagatgtctttgatactcgctgctggcggtaacagggtccaggaagccagttcctagactggtcccgaatgtcacttgctccggcctgagaaaactgaagccttgactgcgtggtggttccgcttggagtgtttgttctgctcaagtaatacaggtactggtcgacgagaggattcatgagacggtccaaactctggctgtgggcgtagctgctgtggaaaggaacgtcctcaaaggtgtagctgaaggtaaagttgtttccggtacgcagcatctgagaaggaaagtactccaggcagtaaaatgaagagcgtcctactgcctgactcccgttgttcagggtgaggtatccatactgtggcaccatgaagacgtctgctgggaacggcgggaggcatccttgatgcgccgagccgaggacgtacgggagctggtactccgagtcagtaaacacctgaaccgtgctggtaaggttattggcaatcgtcgtcgtaccgtcattctgcgtgacctccttgacttgaatgttaaagagcttgaagttgagtcttttgggccgggatccccaattgttgttgatgagtctttgccagtcacgtggcgaaaagtggcagtggaatctgttgaagtcaaaatacccccaaggggtgctgtagccaaagtagtggttgtcgtttgaggctcctgattggctggaaatctgcctgtagaggtggttgttgtaggtgggcagagcccaggtgcgggtgctggtggtgatgactctgtcgcccatccatgtggaatcgcaatgccaatttcccgaggaattacccactccgtcggcgccctcgttattgtctgccattggtgcgccactgcctgtagccatcgtattagttcccagaccagagggggctgctggtggctgtccgagaggctgggggtcaggtacggagtctgcgtctccagtctgaccgaaattcaatctccttcttgcaggctgctggcccgcttttccggttcccgaggaggagtctggctccgcaagagagtgctctaccggcctcttttttcccggagccgtcttaacaggttcctcaaccaggcccagaggttcaagaaccctctttttcgcctggaagactgctcgtccgaggttgcccccaaaagacgtatcttctttaagacgctcctggaactccgcgtcggcgtggttgtacttgaggtacgggttgtctccgccgtcgagctgccggtcgtaggccttgtcgtgctcgagggccgcggcgtctgcctcgttgaccggctctcccttgtcgagtccgttgaagggtccaaggtacttgtacccaggaagcacaagacccctgctgtcgtccttatgccgctctgcgggctttggtggtggtgggccaggtttgagcttccaccactgtcttattccttcagagagagtgtcctcgagccaatctggaagataaccatcggcagccatacctgatttaaatcatttattgttcagagatgcagtcatccaaatccacattgaccagatcgcaagcagtgcaagcgtctggcacctttcccatgatatgatgaatgtagcacagtttctgatacgcctttttgacgacagaaacgggttgagattctgacacgggaaagcactctaaacagtctttctgtccgtgagtgaagcagatatttgaattctgattcattctctcgcattgtctgcagggaaacagcatcagattcatgcccacgtgacgagaacatttgttttggtacctgtccgcgtagttgattgaagcttccgcgtctgacgtcgatggctgcgcaactgactcgcgcgcccgtttgggctcacttatatctgcgtcactgggggcgggtctttttttggctccaccctttttgacgtagaattcatgctctacctcaaccacgtgatcctttgcccaccggaaaaagtctttgacttcctgcttggtgaccttcccaaagtcatgatccagacggcgggtgagttcaaatttgaacatccggtcttgcaacggctgctggtgttcgaaggtcgttgagttcccgtcaatcactgcgcacatgttggtgttggaggtgacaatcacgggagtcgggtctatctgggccgaggacttgcatttctggtccacgcgcaccttgcttcctccgagaatggctttggccgactccacgaccttggcggtcatcttcccctcctcccaccagatcaccatcttgtcgacgcaatcattgaaaggaaagttctcattggtccagttgacgcagcaagggcgaattcgtttaaacctgcaggactagtccctttagtgaggg

SEQ ID NO: 202 - DNA, 3172 bp, Adeno-associated virus
gattgaatttagcggccgcgaattcgcccttgctgcgtcaactggaccaatgagaactttcccttcaacgattgcgtcgacaagatggtgatctggtgggaggagggcaagatgaccgccaaggtcgtggagtccgccaaggccattctgggtggaagcaaggtgcgcgtggaccaaaagtgcaagtcatcggcccagatcgaccccacgcccgtgatcgtcacctccaacaccaacatgtgcgccgtgatcgacgggaacagcaccaccttcgagcaccagcagcccctgcaggaccgcatgttcaagttcgagctcacccgccgtctggagcacgactttggcaaggtgaccaagcaggaagtcaaagagttcttccgctgggctcaggatcacgtgactgaggtggcgcatgagttctacgtcagaaagggcggagccaccaaaagacccgcccccagtgacgcggatataagcgagcccaagcgggcctgcccctcagttgcggagccatcgacgtcagacgcggaagcaccggtggactttgcggacaggtaccaaaacaaatgttctcgtcacgcgggcatgcttcagatgctgtttccctgcaagacatgcgagagaatgaatcagaatttcaacgtctgcttcacgcacggggtcagagactgctcagagtgcttccccggcgcgtcggaatctcaacccgtcgtcagaaaaaagacgtatcagaaactgtgcgcgattcatcatctgctggggcgggcacccgagattgcgtgttcggcctgcgatctcgtcaacgtggacttggatgactgtgtttctgagcaataaatgacttaaaccaggtatggctgctgacggttatcttccagattggctcgaggacaacctctctgagggcattcgcgagtggtgggacctgaaacctggagcccccaagcccaaggccaaccagcagaagcaggacgacggccggggtctggtgcttcctggctacaagtacctcggacccttcaacggactcgacaagggggagcccgtcaacgcggcggacgcagcggccctcgagcacgacaaggcctacgaccagcagctcaaagcgggtgacaatccgtacctgcggtataaccacgccgacgccgagtttcaggagcgtctgcaagaagatacgtcttttgggggcaacctcgggcgagcagtcttccaggccaagaagcgggttctcgaacctctcggtctggttgaggaagctgctaagacggctcctggaaagaagagaccggtagaaccgtcacctcagcgttcccccgactcctccgcgggcatcggcaagaaaggccagcagcccgctaaaaagagactgaactttggtcagactggcgactcagagtcagtccccgaccctcaaccaatcggagaaccaccagcaggcccctctggtctgggatctggtacaatggctgcaggcggtggcgctccaatggcagacaataacgaaggcgccgacggagtgggtagttcctcaggaaattggcattgcgattccacatggctgggcgacagagtcatcaccaccagcacccgaacctgggccctgcccacctacaacaaccacctctacaagcaaatatccaatgggacatcgggaggaagcaccaacgacaacacctacttcggctacagcaccccctgggggtattttgacttcaacagattccactgccacttctcaccacgtgactggcagcgactcatcaacaacaactggggattccggccaaaaagactcagcttcaagctcttcaacatccaggtcaaggaggtcacgcagaatgaaggcaccgagaccatcgccaataaccttaccagcacgattcaggtatttacggactcggaataccagctgccgtacgtcctcggctccgcgcaccagggctgcctgcctccgttcccggcggacgtcttcatgattccccagtacggctaccttacactgaacaatggaagtcaagccgtaggccgttcctccttctactgcctggaatattttccatctcaaatgctgcgaactggaaacaattttgaattcagctacaccttcgaggacgtgcctttccacagcagctgcgcacacagccagagctcggaccgactgatgaatcctctcatcgaccagtacctgtactacttatccagaactcggtccacaggaggaactcaaggtacccagcaattgttattttctcaagctgggcctgcaaacatgtcggctcaggctaagaactggctacctggaccttgctaccggcagcagcgagtctctacgacactgtcgcaaaacaacaacagcaactttgcttggactggtgccaccaaatatcacctgaacggaagagactctttggtaaatcccggtgtcgccatggcaacccacaaggacgacgaggaacgcttcttcccgtcgagtggagtcctgatgtttggaaaacagggtgctggaagagacaatgtggactacagcagcgttatgctaaccagcgaagaagaaattaaaaccactaaccctgtagccacagaacaatacggtgtggtggctgacaacttgcagcaaaccaatacagggcctattgtgggaaatgtcaacagccaaggagccttacctggcatggtctggcagaaccgagacgtgtacctgcagggtcccatctgggccaagattcctcacacggacggcaacttccacccttcaccgctaatgggaggatttggactgaagcacccacctcctcagatcctgatcaagaacacgccggtacctgcggatcctccaacaacgttcagccaggcgaaattggcttccttcattacgcagtacagcaccggacaggtcagcgtggaaatcgagtgggagctgcagaaggagaacagcaaacgctggaacccagagattcagtacacttcaaactactacaaatctacaaatgtggactttgctgtcaatacagagggaacttattctgagcctcgccccattggtactcgttacctcacccgtaatctgtaattgctggttaatcaataaaccgtttgattcgtttcagttgaactttggtctctgcgaagggcgaattcgtttaaacctgcaggactagtccctttagtgagg

SEQ ID NO: 203 - DNA, 3172 bp, Adeno-associated virus
gattgaatttagcggccgcgaattcgcccttgctgcgtcaactggaccaatgagaactttcccttcaacgattgcgtcgacaagatggtgatctggtgggaggagggcaagatgaccgccaaggtcgtggagtccgccaaggccattctgggtggaagcaaggtgcgcgtggaccaaaagtgcaagtcatcggcccagatcgaccccacgcccgtgatcgtcacctccaacaccaacatgtgcgccgtgatcggcgggaacagcaccaccttcgagcaccagcagcccctgcaggaccgcatgttcaagttcgagctcacccgccgtctggagcacgactttggcaaggtgaccaagcaggaagtcaaagagttcttccgctgggctcaggatcacgtgactgaggtggcgcatgagttctacgtcagaaagggcggagccaccaaaagacccgcccccagtgacgcggatataagcgagcccaagcgggcctgcccctcagttgcggagccatcgacgtcagacgcggaagcaccggtggactttgcggacaggtaccaaaacaaatgttctcgtcacgcgggcatgcttcagatgctgtttccctgcaagacatgcgagagaatgaatcagaatttcaacgtctgcttcacgcacggggtcagagactgctcagagtgcctccccggcgcgtcagaatctcaacccgtcgtcagaaaaaagacgtatcagaaactgtgcgcgattcatcatctgctggggcgggcacccgagattgcgtgttcggcctgcgatctcgtcaacgtggacttggatgactgtgtttctgagcaataaatgacttaaaccaggtatggctgctgacggttatcttccagattggctcgaggacaacctctctgagggcattcgcgagtggtgggacctgaaacctggagcccccaagcccaaggccaaccagcagaagcaggacgacggccggggtctggtgcttcttggctacaagtacctcggacccttcaacggactcgacaagggggagcccgtcaatgcggcggacgcagcggccctcgagcacgacaaggcctacgaccagcagctcaaagcgggtgacaatccgtacctgcggtataaccacgccgacgccgagtttcaggagcgtctgcaagaagatacgtcttttgggggcaacctcgggcgagcagtcttccaggccaagaagcgggttctcgaacctctcggtctggttgaggaagctgctaagacggctcctggaaagaagagaccggtagaaccgtcacctcagcgttcccccgactcctccacgggcatcggcaagaaaggccagcagcccgctaaaaagagactgaactttggtcagactggcgactcagagtcagtccccgaccctcaaccaatcggagaaccaccagcaggcccctctggtctgggatctggtacaatggctgcaggcggtggcgctccaatggcagacaataacgaaggcgccgacggagtgggtagttcctcaggaaattggcattgcgattccacatggctgggcgacagagtcatcaccaccagcacccgaacctgggccctgcccacctacaacaaccacctctacaagcaaatatccaatgggacatcgggaggaagcaccaacgacaacacctacttcggctacagcaccccctgggggtattttgacttcaacagattccactgccacttctcaccacgtgactggcagcgactcatcaacaacaactggggattccggccaaaaagactcagcttcaagctcttcaacatccaggtcaaggaggtcacgcagaatgaaggcaccaagaccatcgccaataaccttaccagcacgattcaggtatttacggactcggaataccagctgccgtacgtcctcggctccgcgcaccagggctgcctgcctccgttcccggcggacgtcttcatgattccccagtacggctaccttacactgaacaatggaagtcaagccgtaggccgttcctccttctactgcctggaatattttccatctcaaatgctgcgaactggaaacaattttgaattcagctacaccttcgaggacgtgcctttccacagcggctacgcacacagccagagcttggaccgactgatgaatcctctcatcgaccagtacctgtactacttatccagaactcagtccacaggaggaactcaaggtacccagcaattgttattttctcaagctgggcctgcaaacatgtcggctcaggctaagaactggctacctggaccttgctaccggcagcagcgagtctctacgacactgtcgcaaaacaacaacagcaactttgcttggactggtgccaccaaatatcacctgaacggaagagactctttggtaaatcccggtgtcgccatggcaacccacaaggacgacgaggaacgcttcttcccgtcgagtggagtcctgatgtttggaaaacagggtgctggaagagacaatgtggactacagcagcgttatgctaaccagcgaagaagaaattaaaaccactaaccctgtagccacagaacaatacggtgtggtggctgacaacttgcagcaaaccaatacagggcctattgtgggaaatgtcaacagccaaggagccttacctggcatggtctggcagaaccgagacgtgtacctgcagggtcccatctgggccaagattcctcacacggacggcaacttccacccttcaccgctaatgggaggatttggactgaagcacccacctcctcagatcctgatcaagaacacgccggtacctgcggatcctccaacgacgttcagccaggcgaaattggcttccttcattacgcagtacagcaccggacaggtcagcgtggaaatcgagtgggagctgcagaaggagaacagcaaacgctggaacccagagattcagtacacttcaaactactacaaatctacaaatgtggactttgctgtcaatacagagggaacttattctgagcctcgccccattggtactcgttacctcacccgtaatctgtaattgctggttaatcaataaaccgtttgattcgtttcagttgaactttggtctctgcgaagggcgaattcgtttaaacctgcaggactagtccctttagtgagg

SEQ ID NO: 204 - DNA, 2208 bp, Adeno-associated virus
atggctgccgatggttatcttccagattggctcgaggacactctctctgaaggaataagacagtggtggaagctcaaacctggcccaccaccaccaaagcccgcagagcggcataaggacgacagcaggggtcttgtgcttcctgggtacaagtacctcggacccttcaacggactcgacaagggagagccggtcaacgaggcagacgccgcggccctcgagcacgacaaggcctacgaccggcagctcgaaagcggagacaacccgtacctcaagtacaaccacgccgacgcggagtttcaggagcgtcttaaagaagatacgtcttttgggggcaacctcggacgagcagtcttccaggcgaaaaagagggttcttgaacctctgggcctggttgaggagcctgttaaaacggctccgggaaaaaagaggccggtagagcactctcctgtggagccagactcctcctcgggaaccggaaaagcgggccagcagcctgcgagaaaaagattgaattttggtcagactggagacgcagactccgtacctgacccccagcctctcggacagccaccagcagccccctctggtctgggatctactacaatggcttcaggcagtggcgcaccagtggcagacaataacgagggtgccgatggagtgggtaattcctcaggaaattggcattgcgattcccaatggctgggcgacagagtcatcaccaccagcacccgaacctgggccctgcccacctacaacaaccacctctacaagcaaatctccagccaatcaggagcctcaaacgacaaccactactttggctacagcaccccctgggggtattttgacttcaacagattccactgccacttttcaccacgtgactggcaaagactcatcaacaacagctggggattccgacccaaaagactcaacttcaagctctttaacattcaagtcaaagaggtcacgcagaatgacggtacgacgacgattgccaataaccttaccagcacggttcaagtgtttaccgactcggagtaccagctcccgtacgtcctcggctcggcgcatcaaggatgcctcccgccgttcccagcagacgtctttatggtcccacagtatggatacctcaccctgaacaacgggagtcaggcggtaggacgctcttccttttactgcctggagtactttccttctcagatgctgcgtactggaaacaactttcagttcagctacacctttgaagacgttcccttccacagcagctacgctcacagccagagtctggatcggctgctgaatcctctgatcgaccagtacctatattatctgaacaagacacaatcaaatagtggaactcttcagcagtctcggctactgtttagccaagctggacccaccagcatgtctcttcaagctaaaaactggctgcctggaccttgctacagacagcagcgtctgtcaaagcaggcaaacgacaacaacaacagcaactttccctggactgcggctacaaagtatcatctaaatggccgggactcgttggttaatccaggaccagctatggccagccacaaagacgatgaagaaaagtttttccccatgcatggaaccctgatatttggtaaacaaggaacaaatgctaacgacgcggatttggacaatgtcatgattacagatgaagaagaaatccgcaccaccaatcccgtggctacggagcagtacggatatgtgtcaaataatttgcaaaactcaaatactggtccaactactggaactgtcaatcaccaaggagcgttacctggtatggtgtggcaggatcgagacgtgtacctgcagggacccatttgggccaagattcctcacacggacgggcactttcatccttctccactaatgggaggttttgggctcaaacacccgcctcctcagatcatgatcaaaaacactcccgttccagccaatcctcctacaaacttcagttcttccaagtttgcttctttcatcacacagtattccacggggcaggtcagcgtggagatcgagtgggagctgcagaaggagaacagcaaacgctggaatcccgaaattcagtatacttccaactacaacaaatctgttaatgtggactttactgtggacactaatggtgtgtattcagagcctcgccccattggcaccagatacccgactcgtaatctgtaa

SEQ ID NO: 205 - protein, 735 aa, Adeno-associated virus
MAADGYLPDWLEDTLSEGIRQWWKLKPGPPPPKPAERHKDDSRGLVLPGYKYLGPFNGLDKGEPVNEADAAALEHDKAYDRQLESGDNPYLKYNHADAEFQERLKEDTSFGGNLGRAVFQAKKRVLEPLGLVEEPVKTAPGKKRPVEHSPVEPDSSSGTGKAGQQPARKRLNFGQTGDADSVPDPQPLGQPPAAPSGLGSTTMASGSGAPVADNNEGADGVGNSSGNWHCDSQWLGDRVITTSTRTWALPTYNNHLYKQISSQSGASNDNHYFGYSTPWGYFDFNRFHCHFSPRDWQRLINNSWGFRPKRLNFKLFNIQVKEVTQNDGTTTIANNLTSTVQVFTDSEYQLPYVLGSAHQGCLPPFPADVFMVPQYGYLTLNNGSQAVGRSSFYCLEYFPSQMLRTGNNFQFSYTFEDVPFHSSYAHSQSLDRLLNPLIDQYLYYLNKTQSNSGTLQQSRLLFSQAGPTSMSLQAKNWLPGPCYRQQRLSKQANDNNNSNFPWTAATKYHLNGRDSLVNPGPAMASHKDDEEKFFPMHGTLIFGKQGTNANDADLDNVMITDEEEIRTTNPVATEQYGYVSNNLQNSNTGPTTGTVNHQGALPGMVWQDRDVYLQGPIWAKIPHTDGHFHPSPLMGGFGLKHPPPQIMIKNTPVPANPPTNFSSSKFASFITQYSTGQVSVEIEWELQKENSKRWNPEIQYTSNYNKSVNVDFTVDTNGVYSEPRPIGTRYPTRNL

SEQ ID NO: 206 - DNA, 2208 bp, Adeno-associated virus
atggctgccgatggttatcttccagattggctcgaggacactctctctgaaggaataagacagtggtggaagctcaaacctggcccaccaccaccaaagcccgcagagcggcataaggacgacagcaggggtcttgtgcttcctgggtacaagtacctcggacccttcaacggactcgacaagggagagccggtcaacgaggcagacgccgcggccctcgagcacgacaaggcctacgaccggcagctcgacagcggagacaacccgtacctcaagtacaaccacgccgacgcggagtttcaggagcgtcttaaagaagatacgtcttttgggggcaacctcggacgagcagtcttccaggccaaaaagaggattcttgaacctctgggcctggttgaggaacctgttaagacggctccgggagaaaagaggccggtagagcactctcctgcggagccagactcctcctcgggaaccggaaaagcgggccagcagcctgcaagaaagagattgaattttggccagactggagacgcagactcagtacctgacccccagcctctcggacagccaccagcagccccctctggtctgggaactaatacgatggcttcaggcagtggcgcaccaatggcagacaataacgagggcgccgacggagtgggtaattcctcgggaaattggtattgcgattccacatggatgggcgacagagtcatcaccaccagcacccgcacctgggccctgcccacctacaacaaccatctgtacaagcaaatctccagccagtctggagccagcaacgacaaccactactttggctacagcaccccctgggggtattttgacttcaacagattccactgccacttctccccacgtgactggcaaagactcatcaacaacaactggggattccggcccaagagactcagcttcaagctctttaacattcaagtcaaagaggtcacgcagaatgacggtacgacgacgattgccaataaccttaccagcacggttcaggtgtttactgactcggagtaccagctcccgtacgtcctcggctcggcgcatcaaggatgcctcccgccgttcccagcagacgtcttcatggtgccacagtatggatacctcaccctgaacaacggcagtcaggcggtaggacgctcttccttttactgcctggagtactttccttctcagatgcttcgtaccggaaacaactttaccttcagctacacctttgaagacgttcctttccatagcagctacgctcacagccaaagtctggaccgtctcatgaatcctctcatcgaccagtacctgtattacttgagcagaacaaacactccaagcggaaccaccacgatgtccaggcttcagttttctcaggccggagcaagtgacattcgggaccagtctagaaactggcttcctggaccctgttaccgccagcagcgagtatcaaagacagctgcggacaacaacaacagtgattactcgtggactggagctaccaagtaccacctcaatggaagagactctctggtgaatccgggcccagctatggccagccacaaggacgatgaagaaaaatattttcctcagagcggggttctcatctttggaaaacaagactcgggaaaaactaatgtggacattgaaaaggttatgattacagacgaagaggaaatcaggaccaccaatcccgtggctacggagcagtatggttctgtatctaccaacctccagagcggcaacacacaagcagctacctcagatgtcaacacacaaggcgttcttccaggcatggtctggcaggacagagacgtgtacctgcaggggcccatctgggcaaagattccacacacggacggacattttcacccctctcccctcgtgggcggattcggacttaaacaccctcctccacaaattctcatcaagaacaccccggtacctgcgaatccttcgaccactttcagtgcggcaaagtttgcttccttcatcacacagtactccacggggcaggtcagcgtggagatcgagtgggagctgcagaaggagaacagcaaacgctggaatcccgaaattcagtacacttccaactacaacaaatctgttaatgtggactttactgtggacactaatggtgtgtattcagagcctcgccccattggcaccagatacctgactcgtaatctgtaa

SEQ ID NO: 207 - protein, 735 aa, Adeno-associated virus
MAADGYLPDWLEDTLSEGIRQWWKLKPGPPPPKPAERHKDDSRGLVLPGYKYLGPFNGLDKGEPVNEADAAALEHDKAYDRQLDSGDNPYLKYNHADAEFQERLKEDTSFGGNLGRAVFQAKKRILEPLGLVEEPVKTAPGEKRPVEHSPAEPDSSSGTGKAGQQPARKRLNFGQTGDADSVPDPQPLGQPPAAPSGLGTNTMASGSGAPMADNNEGADGVGNSSGNWYCDSTWMGDRVITTSTRTWALPTYNNHLYKQISSQSGASNDNHYFGYSTPWGYFDFNRFHCHFSPRDWQRLINNNWGFRPKRLSFKLFNIQVKEVTQNDGTTTIANNLTSTVQVFTDSEYQLPYVLGSAHQGCLPPFPADVFMVPQYGYLTLNNGSQAVGRSSFYCLEYFPSQMLRTGNNFTFSYTFEDVPFHSSYAHSQSLDRLMNPLIDQYLYYLSRTNTPSGTTTMSRLQFSQAGASDIRDQSRNWLPGPCYRQQRVSKTAADNNNSDYSWTGATKYHLNGRDSLVNPGPAMASHKDDEEKYFPQSGVLIFGKQDSGKTNVDIEKVMITDEEEIRTTNPVATEQYGSVSTNLQSGNTQAATSDVNTQGVLPGMVWQDRDVYLQGPIWAKIPHTDGHFHPSPLVGGFGLKHPPPQILIKNTPVPANPSTTFSAAKFASFITQYSTGQVSVEIEWELQKENSKRWNPEIQYTSNYNKSVNVDFTVDTNGVYSEPRPIGTRYLTRNL

SEQ ID NO: 208 - DNA, 2209 bp, Adeno-associated virus
atggctgccgatggttatcctccagattggctcgaggacactctctctgaagggataagacagtggtggaagctcaaacctggcccaccaccaccaaagcccgcagagcggcataaggacgacagcaggggtcttgtgcttcctgggtacaagtacctcggacccttcaacggactcgacaagggggagccggtcaacgaggcagacgccgcggccctcgagcacgacaaggcctacgaccggcagctcgacagcggagacaacccgtacctcaagtacaaccacgccgacgcagagtttcaggagcgccttaaagaagatacgtcttttgggggcaacctcggacgagcagtcttccaggcgaaaaagagggttcttgaacctctgggcctggttgaggaacctgttaagacggctccgggaaaaaagaggccggtagagcactctcctgtggagccagactcctcctcgggaaccggaaaagcgggccagcggcctgcaagaaaaagattaaattttggtcagactggagacgcagactccgtacctgacccccagcctctcggacagccaccagcagccccctctggtctgggatctactacaatggctacaggcagtggcgcaccaatggcagacaataacgagggtgccgatggagtgggtaattcctcaggaaattggcattgcgattcccaatggctgggcgacagagtcatcaccaccagcacccgaacctgggccctgcccacatacaacaaccacctctacaagcaaatctccagccaatcaggagccagcaacgacaaccactactttggctacagcaccccctgggggtattttgacttcaacagattccactgccacttttcaccacgtgactggcaaagactcatcaacaacaactggggattccggcccaaaagactcaacttcaagctctttaatattcaagtcaaagaggtcacgcagaatgacggtacgacgacgattgccaataaccttaccagcacggttcaggtgtttactgactcggagtaccagctcccgtacgtcctgggctcggcgcatcaaggatgcctcccgccgtttccagcggacgtcttcatggtcccacagtatggatacctcaccctgaacaacgggagtcaggcggtaggacgctcttccttttactgcctggagtactttccttctcagatgctgcgtactggaaacaactttcagttcagctacacttttgaagacgtgcctttccacagcagctacgctcacagccagagtctggatcggctgatgaatcctctgatcgaccagtacctgtattatctgaacaagacacaaacaaatagtggaactcttcagcagtctcggctactgtttagccaagctggaccaaccaacatgtctcttcaagctaaaaactggctgcctggaccttgctacagacagcagcgtctgtcaaaacaggcaaacgacaacaacaacagcaactttccctggactgcagctacaaagtatcatctaaatggccgggactcgttggttaatccaggaccagctatggccagtcacaaggatgacgaagaaaagtttttccccatgcatggaaccctgatatttggtaaacaaggaacaaatgccaacgacgcggatttggaaaatgtcatgattacagatgaagaagaaatcagggccaccaatcccgtggctacggagcagtacgggactgtgtcaaataatttgcaaaactcaaacactggtccaactactggaactgtcaatcgccaaggagcgttacctggtatggtgtggcaggatcgagacgtgtacctgcagggacccatttgggccaagattcctcacaccgatggacactttcatccttctccactgatgggaggttttggactcaaacacccgcctcctcagatcatgatcaaaaacactcccgttccagccaatcctcccacaaacttcagttctgccaagtttgcttctttcatcacacagtattccacgggacaggtcagcgtggagatcgagtgggagctgcagaaggagaacagcaaacgctggaatcccgaaattcagtacacttccaactacaacaagtctgttaatgtggactttactgtggacactaatggtgtgtattcagagcctcgccccattggcaccagatacctgactcgtaatctgtaat

SEQ ID NO: 209 - protein, 735 aa, Adeno-associated virus
MAADGYPPDWLEDTLSEGIRQWWKLKPGPPPPKPAERHKDDSRGLVLPGYKYLGPFNGLDKGEPVNEADAAALEHDKAYDRQLDSGDNPYLKYNHADAEFQERLKEDTSFGGNLGRAVFQAKKRVLEPLGLVEEPVKTAPGKKRPVEHSPVEPDSSSGTGKAGQRPARKRLNFGQTGDADSVPDPQPLGQPPAAPSGLGSTTMATGSGAPMADNNEGADGVGNSSGNWHCDSQWLGDRVITTSTRTWALPTYNNHLYKQISSQSGASNDNHYFGYSTPWGYFDFNRFHCHFSPRDWQRLINNNWGFRPKRLNFKLFNIQVKEVTQNDGTTTIANNLTSTVQVFTDSEYQLPYVLGSAHQGCLPPFPADVFMVPQYGYLTLNNGSQAVGRSSFYCLEYFPSQMLRTGNNFQFSYTFEDVPFHSSYAHSQSLDRLMNPLIDQYLYYLNKTQTNSGTLQQSRLLFSQAGPTNMSLQAKNWLPGPCYRQQRLSKQANDNNNSNFPWTAATKYHLNGRDSLVNPGPAMASHKDDEEKFFPMHGTLIFGKQGTNANDADLENVMITDEEEIRATNPVATEQYGTVSNNLQNSNTGPTTGTVNRQGALPGMVWQDRDVYLQGPIWAKIPHTDGHFHPSPLMGGFGLKHPPPQIMIKNTPVPANPPTNFSSAKFASFITQYSTGQVSVEIEWELQKENSKRWNPEIQYTSNYNKSVNVDFTVDTNGVYSEPRPIGTRYLTRNL

SEQ ID NO: 210 - DNA, 2208 bp, Adeno-associated virus
atggctgccgatggttatcttccagattggctcgaggacactctctctgaaggaataagacagtggtggaagctcaaacctggcccaccaccaccaaagcccgcagagcggcataaggacgacagcaggggtcttgtgcttcctgggtacaggtacctcggacccttcaacggactcgacaagggagagccggtcaacgaggcagacgccgcggccctcgagcacgacaaggcctacgaccggcagctcgacagcggagacaacccgtacctcaagtacaaccacgtcgacgcggagtttcaggagcgtcttaaagaagatacgtcttttgggggcaacctcggacgagcagtcttccaggccaaaaagaggattcttgaacctctgggcctggttgaggaacctgttaaggcggctccgggagaaaagaggccggtagagcactctcctgcggagccagactcctcctcgggaaccggaaaagcgggccagcagcctgcaagaaagagattgaattttggtcagactggagacgcagactcagtacctgacccccagcctctcggacagccaccagcagccccctctggtctgggaactaatacgatggcttcaggcagtggcgcaccaatggcagacaataacgagggcgccgacggagtgggtaattcctcgggaaattggcattgcgattccacatggatgggcgacagagtcatcaccaccagcacccgcacctgggccctgcccacctacaacaaccatctgtacaagcaaatctccagccagtctggagccagcaacgacaaccactactttggctacagcaccccctgggggcattttgacttcaacagattccactgccacttctccccacgtgactggcaaagactcatcaacaacaactggggattccggcccaagagactcagcttcaagctctttaacattcaagtcaaagaggtcacgcagaatgacggtacgacgacgattgccaataaccttaccagcacggttcaggtgtttactgactcggagtaccagctcccgtacgtcctcggctcggcgcatcaaggatgcctcccgccgttcccagcagacgtcttcatggtgccacagtatggatacctcaccctgaacaacggcagtcaggcggtaggacgctcttccttttactgcctggagtactttccttctcagatgcttcgtaccggaaacaactttaccttcagctacacctttgaagacgttcctttccatagcagctacgctcacagccaaagtctggaccgtctcatgaatcctctcatcgaccagtacctgtattacttgagcagaacaaacactccaagcggaaccaccacgatgtccaggcttcagttttctcaggccggagcaagtgacattcgggaccagtctagaaactggcttcctggaccctgttaccgccagcagcgagtatcaaagacagctgcggacaacaacaacagtgattactcgtggactggagctaccaagtaccacctcaatggaagagactctctggtgaatccgggcccagctatggccagccacaaggacgatgaagaaaaatattttcctcagagcggggttctcatctttggaaaacaagactcgggaaaaactaatgtggacattgaaaaggttatgattacagacgaagaggaaatcaggaccaccaatcccgtggctacggagcagtatggttctgtatctaccaacctccagagcggcaacacacaagcagctacctcagatgtcaacacacaaggcgttcttccaggcatggtctggcaggacagagacgtgtacctgcaggggcccatctgggcaaagattccacacacggacggacattttcacccctctccccccatgggcggattcggacttaaacaccctcctccacaaattctcatcaagaacaccccggtacctgcgaatccttcgaccactttcagtgcggcaaagtttgcttccttcatcacacagtactccacggggcaggtcagcgtggagatcgagtgggagctgcagaaggagaacagcaaacgctggaatcccgaaattcagtacacttccaactacaacaaatctgttaatgtggactttactgtggacactaatggtgtgtattcagagcctcgccccattggcgccagatacctgactcgtaatctgtaa

SEQ ID NO: 211 - protein, 735 aa, Adeno-associated virus
MAADGYLPDWLEDTLSEGIRQWWKLKPGPPPPKPAERHKDDSRGLVLPGYRYLGPFNGLDKGEPVNEADAAALEHDKAYDRQLDSGDNPYLKYNHVDAEFQERLKEDTSFGGNLGRAVFQAKKRILEPLGLVEEPVKAAPGEKRPVEHSPAEPDSSSGTGKAGQQPARKRLNFGQTGDADSVPDPQPLGQPPAAPSGLGTNTMASGSGAPMADNNEGADGVGNSSGNWHCDSTWMGDRVITTSTRTWALPTYNNHLYKQISSQSGASNDNHYFGYSTPWGHFDFNRFHCHFSPRDWQRLINNNWGFRPKRLSFKLFNIQVKEVTQNDGTTTIANNLTSTVQVFTDSEYQLPYVLGSAHQGCLPPFPADVFMVPQYGYLTLNNGSQAVGRSSFYCLEYFPSQMLRTGNNFTFSYTFEDVPFHSSYAHSQSLDRLMNPLIDQYLYYLSRTNTPSGTTTMSRLQFSQAGASDIRDQSRNWLPGPCYRQQRVSKTAADNNNSDYSWTGATKYHLNGRDSLVNPGPAMASHKDDEEKYFPQSGVLIFGKQDSGKTNVDIEKVMITDEEEIRTTNPVATEQYGSVSTNLQSGNTQAATSDVNTQGVLPGMVWQDRDVYLQGPIWAKIPHTDGHFHPSPPMGGFGLKHPPPQILIKNTPVPANPSTTFSAAKFASFITQYSTGQVSVEIEWELQKENSKRWNPEIQYTSNYNKSVNVDFTVDTNGVYSEPRPIGARYLTRNL

SEQ ID NO: 212 - DNA, 2208 bp, Adeno-associated virus
atggctgccgatggttatcttccagattggctcgaggacaccctctctgaaggaataagacagtggtggaagctcaaacctggcccaccaccaccaaagcccgcagagcggcataaggacgacagcaggggtcttgtgcttcctgggtacaagtacctcggacccttcaacggactcgacaagggagagccggtcaacgaggcagacgccgcggccctcgagcacgacaaggcctacgaccggcagctcgacagcggagataacccgtacctcaagtacaaccacgccgacgcggagtttcaggagcgccttaaagaggatacgtcttttgggggcaacctcggacgagcagtcttccaggccaaaaagaggattcttgaacctctgggcctggttgaggaacctgttaagacggctccgggaaaaaagaggccggtagagcactctcctgcggagccagactcctcctcgggaaccggaaaagcgggccagcagcctgcaagaaagagattgaattttggtcagactggagacgcagactcagtacctgacccccggcctctcggacagccaccagcagccccctctggtctgggaactaatacgatggcttcaggcagtggcgcaccaatggcagacaataacgagggcgccgacggagtgggtaattcctcgggaaattggcattgcgattccacatggatgggcgacagagtcatcaccaccagcacccgcacctgggccctgcccacctacaacaaccatctgtacaagcaaatctccagccagtctggagccagcaacgacaaccactactttggctacagcaccccctgggggtattttgacttcaacagattccactgccacttctccccacgtgactggcaaagactcatcaacaacaactggggattccggcccaagagactcagcttcaagctctttaacattcaagtcaaagaggtcacgcagaatgacggtacgacgacgattgccaataaccttaccagcacggttcaggtgtttactgactcggagtaccagctcccgtacgtcctcggctcggcgcatcaaggatgcctcccgccgttcccagcagacgtcttcatggtgccacagtatggatacctcaccctgaacaacggcagtcaggcggtaggacgctcttccttttactgcctggagtactttccttctcagatgcttcgtaccggaaacaactttaccttcagctacacctttgaagacgttcctttccatagcagctacgctcacagccaaagtctggaccgtctcatgaatcctctcatcgaccagtacctgtattacttgagcagaacaaacactccaagcggaaccaccacgatgtccaggcttcagttttctcaggccggagcaagtgacattcgggaccagtctagaaactggcttcctggaccctgttaccgccagcagcgagtatcaaagacagctgcggacaacaacaacagtgattactcgtggactggagctaccaagtaccacctcaatggaagagactctctggtgaatccgggcccagctatggccagccacaaggacgatgaagaaaaatattttcctcagagcggggttctcatctttggaaaacaagactcgggaaaaactaatgtggacattgaaaaggttatgattacagacgaagaggaaatcaggaccaccaatcccgtggctacggagcagtatggttctgtatctaccaacctccagagcggcaacacacaagcagctacctcagatgtcaacacacaaggcgttcttccaggcatggtctggcaggacagagacgtgtacctgcaggggcccatctgggcaaagattccacacacggacggacattttcacccctctcccctcatgggcggattcggacttaaacaccctcctccacaaattctcatcaagaacaccccggtacctgcgaatccttcgaccactttcagtgcggcaaagtttgcttccttcatcacacagtactccacggggcaggtcagcgtggagatcgagtgggagctgcagaaggagaacagcaaacgctggaatcccgaaattcagtacacttccaactacaacaaatctgttaatgtggactttactgtggacactaatggtgtgtattcagagcctcgccccattggcaccagatacctgactcgtaatctgtaa

SEQ ID NO: 213 - protein, 735 aa, Adeno-associated virus
MAADGYLPDWLEDTLSEGIRQWWKLKPGPPPPKPAERHKDDSRGLVLPGYKYLGPFNGLDKGEPVNEADAAALEHDKAYDRQLDSGDNPYLKYNHADAEFQERLKEDTSFGGNLGRAVFQAKKRILEPLGLVEEPVKTAPGKKRPVEHSPAEPDSSSGTGKAGQQPARKRLNFGQTGDADSVPDPRPLGQPPAAPSGLGTNTMASGSGAPMADNNEGADGVGNSSGNWHCDSTWMGDRVITTSTRTWALPTYNNHLYKQISSQSGASNDNHYFGYSTPWGYFDFNRFHCHFSPRDWQRLINNNWGFRPKRLSFKLFNIQVKEVTQNDGTTTIANNLTSTVQVFTDSEYQLPYVLGSAHQGCLPPFPADVFMVPQYGYLTLNNGSQAVGRSSFYCLEYFPSQMLRTGNNFTFSYTFEDVPFHSSYAHSQSLDRLMNPLIDQYLYYLSRTNTPSGTTTMSRLQFSQAGASDIRDQSRNWLPGPCYRQQRVSKTAADNNNSDYSWTGATKYHLNGRDSLVNPGPAMASHKDDEEKYFPQSGVLIFGKQDSGKTNVDIEKVMITDEEEIRTTNPVATEQYGSVSTNLQSGNTQAATSDVNTQGVLPGMVWQDRDVYLQGPIWAKIPHTDGHFHPSPLMGGFGLKHPPPQILIKNTPVPANPSTTFSAAKFASFITQYSTGQVSVEIEWELQKENSKRWNPEIQYTSNYNKSVNVDFTVDTNGVYSEPRPIGTRYLTRNL

SEQ ID NO: 214 - DNA, 2208 bp, Adeno-associated virus
atggctgccgatggttatcttccagattggctcgaggacactctctctgaaggaataagacagtggtggaagctcaaacctggcccaccaccaccaaagcccgcagagcggcataaggacgacagcaggggtcttgtgcttcctgggtacaagtacctcggacccttcaacggactcgacaagggagagccggtcaacgaggcagacgccgcggccctcgagcacgacaaggcctacgaccggcagctcgacagcggagacaacccgtacctcaagtacaaccacgccgacgcggagtttcaggagcgccttaaaggagatacgtcttttgggggcaacctcggacgagcagtcttccaggccaaaaagaggattcttgaacctctgggcctggttgaggaacctgttaagacggctccgggaaaaaagaggccggtagagcactctcctgcggagccagactcctcctcgggaaccggaaaagcgggccagcagcctgcaagaaagagattgaattttggtcagactggagacgcagactcagtacctgacccccagcctctcggacagccaccagcagccccctctggtctgggaactaatacgatggcttcaggcagtggcgcaccaatggcagacaataacgagggcgccgacggagtgggtaattcctcgggaaattggcattgcgattccacatggatgggcggcagagtcatcaccaccagcacccgcacctgggccctgcccacctacaacaaccatctgtacaagcaaatctccagccagtctggagccagcaacgacaaccactactttggctacagcaccccctgggggtattttgacttcaacagattccactgccacttctccccacgtgactggcaaagactcatcaacaacaactggggattccggcccaagagactcagcttcaagctctttaacattcaagtcaaagaggtcacgcagaatgacggtacgacgacgattgccaataaccttaccagcacggttcaggtgtttactgactcggagtaccagctcccgtacgtcctcggctcggcgcatcaaggatgcctcccgccgttcccagcagacgtcttcatggtgccacagtatggatacctcaccctgaacaacggcagtcaggcggtaggacgctcttccttttactgcctggagtactttccttctcagacgcttcgtaccggaaacaactttaccttcagctacacctttgaagacgttcctttccatagcagctacgctcacagccaaagtctggaccgtctcatgaatcctctcatcgaccagtacctgtattacttgagcagaacaaacactccaagcggaaccaccacgatgtccaggcttcagttttctcaggccggagcaagtgacattcgggaccagtctagaaactggcttcctggaccctgttaccgccagcagcgagtatcaaagacagctgcggacaacaacaacagtgattactcgtggactggagctaccaagtaccacctcaatggaagagactctctggtgaatccgggcccagctatggccagccacaaggacgatgaagaaaaatattttcctcagagcggggttctcatctttggaaaacaagactcgggaaaaactaatgtggacattgaaaaggttatgattacagacgaagaggaaatcaggaccaccaatcccgtggctacggagcagtatggttctgtatctaccaacctccagagcggcaacacacaagcagctacctcagatgtcaacacacaaggcgttcttccaggcatggtctggcaggacagagacgtgtacctgcaggggcccatctgggcaaagattccacacacggacggacattttcacccctctcccctcatgggcggattcggacttaaacaccctcctccacaaattctcatcaagaacaccccggtacctgcgaatccttcgaccactttcagtgcggcaaagtttgcttccttcatcacacagtactccacggggcaggtcagcgtggagatcgagtgggagctgcagaaggagaacagcaaacgctggaatcccgaaattcagtacacttccaactacaacaaatctgttaatgtggactttactgtggacactaatggtgtgtattcagagcctcgccccattggcaccagatacctgactcgtaatctgtaa

SEQ ID NO: 215 - protein, 735 aa, Adeno-associated virus
MAADGYLPDWLEDTLSEGIRQWWKLKPGPPPPKPAERHKDDSRGLVLPGYKYLGPFNGLDKGEPVNEADAAALEHDKAYDRQLDSGDNPYLKYNHADAEFQERLKGDTSFGGNLGRAVFQAKKRILEPLGLVEEPVKTAPGKKRPVEHSPAEPDSSSGTGKAGQQPARKRLNFGQTGDADSVPDPQPLGQPPAAPSGLGTNTMASGSGAPMADNNEGADGVGNSSGNWHCDSTWMGGRVITTSTRTWALPTYNNHLYKQISSQSGASNDNHYFGYSTPWGYFDFNRFHCHFSPRDWQRLINNNWGFRPKRLSFKLFNIQVKEVTQNDGTTTIANNLTSTVQVFTDSEYQLPYVLGSAHQGCLPPFPADVFMVPQYGYLTLNNGSQAVGRSSFYCLEYFPSQTLRTGNNFTFSYTFEDVPFHSSYAHSQSLDRLMNPLIDQYLYYLSRTNTPSGTTTMSRLQFSQAGASDIRDQSRNWLPGPCYRQQRVSKTAADNNNSDYSWTGATKYHLNGRDSLVNPGPAMASHKDDEEKYFPQSGVLIFGKQDSGKTNVDIEKVMITDEEEIRTTNPVATEQYGSVSTNLQSGNTQAATSDVNTQGVLPGMVWQDRDVYLQGPIWAKIPHTDGHFHPSPLMGGFGLKHPPPQILIKNTPVPANPSTTFSAAKFASFITQYSTGQVSVEIEWELQKENSKRWNPEIQYTSNYNKSVNVDFTVDTNGVYSEPRPIGTRYLTRNL

SEQ ID NO: 216 - DNA, 2208 bp, Adeno-associated virus
atggctgccgatggttatcttccagattggctcgaggacactctctctgaaggaataagacagtggtggaagctcaaacctggcccaccaccaccaaagcccgcagagcggcataaggacgacagcaggggtcttgtgcttcctgggtacaagtacctcggacccttcaacggactcgacaagggagagccggtcaacgaggcagacgccgcggccctcgagcacgacaaggcctacgaccggcagctcgacagcggagacaacccgtacctcaagtacaaccacgccgacgcggagtttcaggagcgtcttaaagaagatacgtcttttgggggcaacctcggacgagcagtcttccaggccaaaaagaggattcttgaacctctgggcctggttgaggaacctgttaagacggctccgggaaaaaagaggccggtagagcactctcctgcggagccagactcctcctcgggaaccggaaaagcgggccagcagcctgcaagaaagagattgaattttggtcagactggagacgcagactcagtacctgacccccagcctctcggacagccaccagcagccccctctggtctgggaactaatacgatggcttcaggcagtggcgcaccaatggcagacaataacgagggcgccgacggagtgggtaattcctcgggaaattggcattgcgattccacatggatgggcgacagagtcatcaccaccagcacccgcacctgggccctgcccacctgcaacaaccatctgtacaagcaaatctccagccagtctggagccagcaacgacaaccactactttggctacagcaccccctgggggtattttgacttcaacagattccactgccacttctccccacgtgactggcaaagactcatcaacaacaactggggattccggcccaagagactcagcttcaagctctttaacattcaagtcaaagaggtcacgcagaatgacggtacgacgacgattgccaataaccttaccagcacggttcaggtgtttactgactcggagtaccagctcccgtacgtcctcggctcggcgcatcaaggatgcctcccgccgttcccagcagacgtcttcatggtgccacagtatggatacctcaccctgaacaacggcagtcaggcggtaggacgctcttccttttactgcctggagtattttccttctcagatgcttcgtaccggaaacaactttaccttcagctacacctttgaagacgttcctttccatagcagctacgctcacagccaaagtctggaccgtctcatgaatcctctcatcgaccagtacctgtattacttgagcagaacaaacactccaagcggaaccaccacgatgtccaggcttcagttttctcaggccggagcaagtgacattcgggaccagtctagaaactggcttcctggaccctgttaccgccagcagcgagtatcaaagacagctgcggacaacaacaacagtgattactcgtggactggagctaccaagtaccacctcaatggaagagactctctggtgaatccgggcccagctatggccagccacaaggacgatgaagaaaaatattttcctcagagcggggttctcatctttggaaaacaagactcgggaaaaactaatgtggacattgaaaaggttatgattacagacgaagaggaaatcaggaccaccaatcccgtggctacggagcagtatggttctgtatctacctacctccagagcggcaacacacaagcagctacctcagatgtcaacacacaaggcgttcttccaggcatggtctggcaggacagagacgtgtacctgcgggggcccatctgggcaaagattccacacacggacggacattttcacccctctcccctcatgggcggatttggacttaaacaccctcctccacaaattctcatcaagaacaccccggtacctgcgaatccttcgaccactttcagtgcggcaaagtttgcttccttcatcacacagtactccacggggcaggtcagcgtggagatcgagtgggagctgcagaaggagaacagcaaacgctggaatcccgaaattcagtacacttccaactacaacaaatctgttaatgtggactttactgtggacactaatggtgtgtattcagagcctcgccccattggcaccagatacctgactcgtaatctgtaa

SEQ ID NO: 217 - protein, 735 aa, Adeno-associated virus
MAADGYLPDWLEDTLSEGIRQWWKLKPGPPPPKPAERHKDDSRGLVLPGYKYLGPFNGLDKGEPVNEADAAALEHDKAYDRQLDSGDNPYLKYNHADAEFQERLKEDTSFGGNLGRAVFQAKKRILEPLGLVEEPVKTAPGKKRPVEHSPAEPDSSSGTGKAGQQPARKRLNFGQTGDADSVPDPQPLGQPPAAPSGLGTNTMASGSGAPMADNNEGADGVGNSSGNWHCDSTWMGDRVITTSTRTWALPTCNNHLYKQISSQSGASNDNHYFGYSTPWGYFDFNRFHCHFSPRDWQRLINNNWGFRPKRLSFKLFNIQVKEVTQNDGTTTIANNLTSTVQVFTDSEYQLPYVLGSAHQGCLPPFPADVFMVPQYGYLTLNNGSQAVGRSSFYCLEYFPSQMLRTGNNFTFSYTFEDVPFHSSYAHSQSLDRLMNPLIDQYLYYLSRTNTPSGTTTMSRLQFSQAGASDIRDQSRNWLPGPCYRQQRVSKTAADNNNSDYSWTGATKYHLNGRDSLVNPGPAMASHKDDEEKYFPQSGVLIFGKQDSGKTNVDIEKVMITDEEEIRTTNPVATEQYGSVSTYLQSGNTQAATSDVNTQGVLPGMVWQDRDVYLRGPIWAKIPHTDGHFHPSPLMGGFGLKHPPPQILIKNTPVPANPSTTFSAAKFASFITQYSTGQVSVEIEWELQKENSKRWNPEIQYTSNYNKSVNVDFTVDTNGVYSEPRPIGTRYLTRNL

SEQ ID NO: 218 - DNA, 2208 bp, Adeno-associated virus; identical to SEQ ID NO: 212

SEQ ID NO: 219 - protein, 735 aa, Adeno-associated virus; identical to SEQ ID NO: 213

SEQ ID NO: 220 - DNA, 2208 bp, Adeno-associated virus
atggctgccgatggttatcttccagattggctcgaggacactctctctgaaggaataagacagtggtggaagctcaaacctggcccaccaccaccaaagcccgcagagcggcataaggacggcagcaggggtcttgtgcttcctgggtacaagtacctcggacccttcaacggactcgacaagggagagccggtcaacgaggcagacgccgcggccctcgagcacgacaaggcctacgaccggcagctcaacagcggagacaacccgtacctcaagtacaaccacgccgacgcggagtttcaggagcgccttaaagaagatacgtcttttgggggcaacctcggacgagcagtcttccaggcaaaaaagagggttcttgaacctctgggcctggttgaggagcctgttaaaacggctccgggaaaaaagagaccggtagagcactctcctgcggagccagactcctcctcgggaaccggaaaagcgggccagcagcctgcaagaaagagattgaattttggtcagactggagacgcagactccgtacctgacccccagcctctcggacagccaccagcagccccctctggtctgggatctactacaatggctacaggcagtggcgcaccaatggcagacaataacgagggtgccgatggagtgggtaattcctcaggaaattggcattgcgattcccaatggctgggcgacagagtcatcaccacaagcactcgaacctgggccctgcccacctacaacaaccacctctacaagcaaatctccagccaatcaggagcctcaaacgacaaccactattttggctacagcaccccttgggggtattttgacttcaacagattccactgccacttttcaccacgtgactggcaaagactcatcaacaacaactggggattccgacccaagagactcaacttcaagctctttaacattcaagtcaaagaggtcacgcagaatgacggtacgacgacgattgccaataaccttaccagcacggttcaggtgtttactgactcggagtaccagctcccgtacgtcctcggctcggcgcatcaaggatgcctcccgccgttcccagcggacgtcttcatggtcccacagtatggatacctcaccctgaacaacgggagtcaggcggtaggacgctctcccttttactgcctggagtactttccttctcagatgctgcgtactggaaacaactttcagttcagctacacttttgaagacgtgcctttccacagcagctacgctcacagccagagtctggatcggctgatgaatcctctgatcgaccagtacctgtattatctgaacaagacacaaacaaatagtggaactcttcagcagtctcggctactgtttagccaagctggacccaccaacatgtctcttcaagctaaaaactggctgcctggaccttgctacagacagcagcgtctgtcaaagcaggcaaacgacaacaacaacagcaactttccctggactgcagctacaaagtatcatctaaatggccgggactcgttggttaatccaggaccagctatggccagtcacaaggatgacgaagaaaagtttttccccatgcatggaaccctgatatttggtaaacaaggaacaaatgccaacgacgcggatttggaaaatgtcatgattacagatgaagaagaaatcaggaccaccaatcccgtggctacggagcagtacgggactgtgtcaaataatttgcaaaactcaaacactggtccaactactggaactgtcaatcaccaaggagcgttacctggtatggtgtggcaggatcgagatgtgtaccttcagggacccatttgggccaagattcctcacaccgatggacactttcatccttctccactgatgggaggttttggactcaaacacccgcctcctcagattatgatcaaaaacactcccgttccagccaatcctcctacaaacttcagttctgccaagtttgcttctttcatcacacagtattccacggggcaggtcagcgtggagatcgagtgggagctgcagaaggagaacagcaaacgctggaatcccgaaattcagtacacttccaactacaacaaatctgttaatgtggactttactgtggacaataatggcgtgtactcagagcctcgccccattggcaccagatacctgactcgtaatctgtaa

SEQ ID NO: 221 - protein, 735 aa, Adeno-associated virus
MAADGYLPDWLEDTLSEGIRQWWKLKPGPPPPKPAERHKDGSRGLVLPGYKYLGPFNGLDKGEPVNEADAAALEHDKAYDRQLNSGDNPYLKYNHADAEFQERLKEDTSFGGNLGRAVFQAKKRVLEPLGLVEEPVKTAPGKKRPVEHSPAEPDSSSGTGKAGQQPARKRLNFGQTGDADSVPDPQPLGQPPAAPSGLGSTTMATGSGAPMADNNEGADGVGNSSGNWHCDSQWLGDRVITTSTRTWALPTYNNHLYKQISSQSGASNDNHYFGYSTPWGYFDFNRFHCHFSPRDWQRLINNNWGFRPKRLNFKLFNIQVKEVTQNDGTTTIANNLTSTVQVFTDSEYQLPYVLGSAHQGCLPPFPADVFMVPQYGYLTLNNGSQAVGRSPFYCLEYFPSQMLRTGNNFQFSYTFEDVPFHSSYAHSQSLDRLMNPLIDQYLYYLNKTQTNSGTLQQSRLLFSQAGPTNMSLQAKNWLPGPCYRQQRLSKQANDNNNSNFPWTAATKYHLNGRDSLVNPGPAMASHKDDEEKFFPMHGTLIFGKQGTNANDADLENVMITDEEEIRTTNPVATEQYGTVSNNLQNSNTGPTTGTVNHQGALPGMVWQDRDVYLQGPIWAKIPHTDGHFHPSPLMGGFGLKHPPPQIMIKNTPVPANPPTNFSSAKFASFITQYSTGQVSVEIEWELQKENSKRWNPEIQYTSNYNKSVNVDFTVDNNGVYSEPRPIGTRYLTRNL

SEQ ID NO: 222 - DNA, 2208 bp, Adeno-associated virus
atggctgccgatggttatcttccagattggctcgaggacactctctctgaaggaataagacagtggtggaagctcaaacctggcccaccaccaccaaagcccgcagagcggcataaggacgacagcaggggtcttgtgcttcctgggtacaagtacctcggacccttcaacggactcgacaagggagagccggtcaacgaggcagacgccgcggccctcgagcacgacaaggcctacgaccggcagctcgacagcggagacaacccgtacctcaagtacaaccacgccgacgcggagtttcaggagcgtcttaaagaagatacgtcttttgggggcaacctcggacgagcagtcttccaggccaaaaagaggattcttgaacctctgggcctggttgaggaacctgttaagacggctccgggaaaaaagaggccggtagagcactctcctgcggagccagactcctcctcgggaaccggaaaagcgggccagcagcctgcaagaaagagattgaattttggtcagactggagacgcagactcagtacctgacccccagcctctcggacagccaccagcagccccctctggtctgggaactaatacgatggcttcaggcagtggcgcaccaatggcagacaataacgagggcgccgacggagtgggtaattcctcgggaaattggcattgcgattccacatggatgggcgacagagtcatcaccaccagcacccgcacctgggccctgcccacctacaacaaccatctgtacaagcaaatctccagccagtctggagccagcaacgacaaccactactttggctacagcaccccctgggggtattttgacttcaacagattccactgccacttctccccacgtgactggcaaagactcatcaacaacaactggggattccggcccaagagactcagcttcaagctctttaacattcaagtcaaagaggtcacgcagaatgacggtacgacgacgattgccaataaccttaccagcacggttcaggtgtttactgactcggagtaccagctcccgtacgtcctcggctcggcgcatcaaggatgcctcccgccgttcccagcagacgtcttcatggtgccacagtatggatacctcaccctgaacaacggcagtcaggcggtaggacgctcttccttttactgcctggagtactttccttctcagatgcttcgtaccggaaacaactttaccttcagctacacctttgaagacgttcctttccatagcagctacgctcacagccaaagtctggaccgtctcatgaatcctctcatcgaccagtacctgtattacttgagcagaacaaacactccaagcggaaccaccacgatgtccaggcttcagttttctcaggccggagcaagtgacattcgggaccagtctagaaactggcttcctggaccctgttaccgccagcagcgagtatcaaagacagctgcggacaacaacaacagtgattactcgtggactggagctaccaagtaccacctcaatggaagagactctctggtgaatccgggcccagctatggccagccacaaggacgatgaagaaaaatattttcctcagagcggggttctcatctttggaaaacaagactcgggaaaaactaatgtggacattgaaaaggttatgattacagacgaagaggaaatcaggaccaccaatcccgtggctacggagcagtatggttctgtatctaccaacctccagagcggcaacacacaagcagctacctcagatgtcaacacacaaggcgttcttccaggcatggtctggcaggacagagacgtgtacctgcaggggcccatctgggcaaagattccacacacggacggacattttcacccctctcccctcatgggcggattcggacttaaacaccctcctccacaaattctcatcaagaacaccccggtacctgcgaatccttcgaccactttcagtgcggcaaagtttgcttccttcatcacacagtactccacggggcaggtcagcgtggagatcgagtgggagctgcagaaggagaacagcaaacgctggaatcccgaaattcagtacacttccaactacaacaaatctgttaatgtggactttactgtggacactaatggtgtgtattcagagcctcgccccattggcaccagatacctgactcgtaatctgtaa

SEQ ID NO: 223 - protein, 735 aa, Adeno-associated virus
MAADGYLPDWLEDTLSEGIRQWWKLKPGPPPPKPAERHKDDSRGLVLPGYKYLGPFNGLDKGEPVNEADAAALEHDKAYDRQLDSGDNPYLKYNHADAEFQERLKEDTSFGGNLGRAVFQAKKRILEPLGLVEEPVKTAPGKKRPVEHSPAEPDSSSGTGKAGQQPARKRLNFGQTGDADSVPDPQPLGQPPAAPSGLGTNTMASGSGAPMADNNEGADGVGNSSGNWHCDSTWMGDRVITTSTRTWALPTYNNHLYKQISSQSGASNDNHYFGYSTPWGYFDFNRFHCHFSPRDWQRLINNNWGFRPKRLSFKLFNIQVKEVTQNDGTTTIANNLTSTVQVFTDSEYQLPYVLGSAHQGCLPPFPADVFMVPQYGYLTLNNGSQAVGRSSFYCLEYFPSQMLRTGNNFTFSYTFEDVPFHSSYAHSQSLDRLMNPLIDQYLYYLSRTNTPSGTTTMSRLQFSQAGASDIRDQSRNWLPGPCYRQQRVSKTAADNNNSDYSWTGATKYHLNGRDSLVNPGPAMASHKDDEEKYFPQSGVLIFGKQDSGKTNVDIEKVMITDEEEIRTTNPVATEQYGSVSTNLQSGNTQAATSDVNTQGVLPGMVWQDRDVYLQGPIWAKIPHTDGHFHPSPLMGGFGLKHPPPQILIKNTPVPANPSTTFSAAKFASFITQYSTGQVSVEIEWELQKENSKRWNPEIQYTSNYNKSVNVDFTVDTNGVYSEPRPIGTRYLTRNL

SEQ ID NO: 224 - DNA, 2208 bp, Adeno-associated virus
atggctgccgatggttatcttccagattggctcgaggacactctctctgaaggaataagacagtggtggaagctcaaacctggcccaccaccaccaaagcccgcagagcggcataaggacgacagcaggggtcttgtgcttcctgggtacaagtacctcggacccttcaacggactcgacaagggagagccggtcaacgaggcagacgccgcggccctcgagcacgacaaggcctacgaccggcagctcgacagcggagacaacccgtacctcaagtacaaccacgccgacgcggagtttcaggagcgtcttaaagaagatacgtcttttgggggcaacctcggacgagcagtcttccaggccaaaaagaggattcttgaacctctgggcctggttgaggaacctgttaagacggctccgggaaaaaagaggccggtagagcactctcctgcggagccagactcctcctcgggaaccggaaaagcgggccagcagcctgcaagaaagagattgaattttggtcagactggagacgcagactcagtacctgacccccagcctctcggacagccaccagcagccccctctggtctgggaactaatacgatggcttcaggcagtggcgcaccaatggcagacaataacgagggcgccgacggagtgggtaattcctcgggaaattggcattgcgattccacatggatgggcgacagagtcatcaccaccagcacccgcacctgggccctgcccacctacaacaaccatctgtacaagcaaatctccagccagtctggagccagcaacgacaaccactactttggctacagcaccccctgggggtatttcgacttcaacagattccactgccacttctccccacgtgactggcaaagactcatcaacaacaactggggattccggcccaagagactcagcttcaagctctttaacattcaagtcaaagaggtcacgcagaatgacggtacgacgacgattgccaataaccttaccagcacggttcaggtgtttactgactcggggtaccagctcccgtacgtcctcggctcggcgcatcaaggatgccttccgccgttcccagcagacgtcttcatggtgccacagtatggatacctcaccctgaacaacggcagtcaggcggtaggacgctcttccttttactgcctggagtactttccttctcagatgcttcgtaccggaaacaactttaccttcagctacacctttgaagacgttcctttccatagcagctacgctcacggccaaagtctggaccgtctcatgaatcctctcatcgaccagtacctgtattacttgagcagaacaaacactccaagcggaaccaccacgatgtccaggcttcagttttctcaggccggagcaagtgacgttcgggaccagtctagaaactggcttcctggaccctgttaccgccagcagcgagtatcaaagacagctgcggacaacaacaacagtgattactcgtggactggagctaccaagtaccacctcaatggaagagactctctggtgaatccgggcccagctatggccagccacaaggacgatgaagaaaaatattttcctcagagcggggttctcgtctttggaaaacaagactcgggaaaaactaatgtggacattgaaaaggttatgattacagacgaagaggaaatcaggaccaccaatcccgcggctacggagcagtatggttctgtatctaccaacctccagagcggcaacacacaagcagctacctcagatgtcaacacacaaggcgttcttccaggcatggtctggcaggacagagacgtgtacctgcaggggcccatctgggcaaagattccacacacggacggacattttcacccctctcccctcatgggcggattcggacttaaacaccctcctccacaaattctcatcaagaacaccccggtacctgcgaatccttcgaccactttcagtgcggcaaagtttgtttccttcatcacacagtactccacggggcaggtcagcgtggagatcgagtgggagctgcagaaggagaacagcaaacgctggaatcccgaaattcagtacacttccaactacaacaaatctgttaatgtggactttactgtggacactaatggtgtgtattcagagcctcgccccattggcaccagatacctgactcgtaatctgtaa

SEQ ID NO: 225 - protein, 735 aa, Adeno-associated virus
MAADGYLPDWLEDTLSEGIRQWWKLKPGPPPPKPAERHKDDSRGLVLPGYKYLGPFNGLDKGEPVNEADAAALEHDKAYDRQLDSGDNPYLKYNHADAEFQERLKEDTSFGGNLGRAVFQAKKRILEPLGLVEEPVKTAPGKKRPVEHSPAEPDSSSGTGKAGQQPARKRLNFGQTGDADSVPDPQPLGQPPAAPSGLGTNTMASGSGAPMADNNEGADGVGNSSGNWHCDSTWMGDRVITTSTRTWALPTYNNHLYKQISSQSGASNDNHYFGYSTPWGYFDFNRFHCHFSPRDWQRLINNNWGFRPKRLSFKLFNIQVKEVTQNDGTTTIANNLTSTVQVFTDSGYQLPYVLGSAHQGCLPPFPADVFMVPQYGYLTLNNGSQAVGRSSFYCLEYFPSQMLRTGNNFTFSYTFEDVPFHSSYAHGQSLDRLMNPLIDQYLYYLSRTNTPSGTTTMSRLQFSQAGASDVRDQSRNWLPGPCYRQQRVSKTAADNNNSDYSWTGATKYHLNGRDSLVNPGPAMASHKDDEEKYFPQSGVLVFGKQDSGKTNVDIEKVMITDEEEIRTTNPAATEQYGSVSTNLQSGNTQAATSDVNTQGVLPGMVWQDRDVYLQGPIWAKIPHTDGHFHPSPLMGGFGLKHPPPQILIKNTPVPANPSTTFSAAKFVSFITQYSTGQVSVEIEWELQKENSKRWNPEIQYTSNYNKSVNVDFTVDTNGVYSEPRPIGTRYLTRNL

SEQ ID NO: 226 - DNA, 2208 bp, Adeno-associated virus
atggctgccgatggttatcttccagattggctcgaggacactctctctgaaggaataagacagtggtggaaactcaaacctggcccaccaccaccaaagcccgcagagcggcataaggacgacagcaggggtcttgtgcttcctgggtacaagtacctcggacccttcaacggactcgacaagggagagccggtcaacgaggcagacgccgcggccctcgagcacgacaaggcctacgaccggcagctcgacagcggagacaacccgtacctcaagtacaaccacgccgacgcggagtttcaggagcgccttaaagaagatacgtcttttgggggcaacctcggacgagcagtcttccaggcaaaaaagagggttctggaacctctgagcctggttgaggagcctgttaagacggctccgggaaaaaagaggccggtagagcactctcccgcagagccagattcctcctccggaactggaaagtcgggcaaccagcctgcaagaaagagattgaatttcggtcagactggagactcagactccgtacctgacccccagcctctcggacagccaccagcagccccctctggtctgggaactaatacgatggctacaggcagtggcgcaccaatggcagacaataacgagggcgccgacggagtgggtaattcctcgggaaattggcattgcgattccacatggatgggcgacagagtcatcaccaccagcacccgaacctgggccctgcccacctacaacaaccatctgtacaagcaaatatccagccagtctggagccagcaacgacaatcactactttggctacagcaccccctgggggtattttgacttcaacagattccactgccacttttcaccacgtgactggcaaagactcatcaacaacaactggggattccgacccaagagactcaacttcaagctctttaacattcaagtcaaagaggtcacgcagaatgacggtacgacgacgattgccaataaccttaccagcacggttcaggtgtttactgactcggagtaccagctcccgtacgtcctcggctcggcgcatcaaggatgcctcccgccgttcccagcagacgtcttcatggtgccacagtatggatacctcaccctgaacaacgggagtcaggcagtaggacgctcttcattttactgcctagagtactttccttctcagatgctgcgtaccggaaacaactttaccttcagctacacctttgaggacgttcctttccacagcagctacgctcacagccagagtttggaccgtctcatgaatcctctcatcgaccagtacctgtattacttgagcagaacaaacactccaagcggaaccaccacgcagtccaggcttcagttttctcaggccggagcgagtgacattcaggaccagtctaggaactggcttcctggaccctgttaccgtcagcagcgagtatcaaagacatctgcggataacaacaacagtgaatactcgtggactggagctaccaagtaccacctcaatggcagagactctctggtgaatccgggcccggccatggccagccacaaagacgatgaagaaaagttttttcctcagagcggggttcttatctttgggaagcaaggctcagagaaaacaaatgtggatattgaaaaggtcatgattacagacgaagaggaaatcaggaccaccaatcccgtggctacggagcagtatggttctgtatctaccaacctccagagcggcaacacacaagcagctaccgcagatgtcaacacacaaggcgttcttccaggcatggtcgggcaagacagagacgtgtacctgcaggggcctacttgggcaaagattccacacacggacggacattttcacccctctcccctcatgggcggatttggacttaaacaccctcctccacagattctcatcaagaacaccccggtacctgcgaatccttcgaccaccttcagtgcggcaaagtttgcttccttcattacacagtactccacggggcaggtcagcgtggagatcgagtgggagctgcagaaggagaacagcaaacgctggaatcccgagatccagtacacttccaactacaacaagtctgttaatgtggactttactgtggacactaatggcgtgtattcagagcctcgccccattggcaccagatacctgactcgtaatctgtaa

SEQ ID NO: 227 - protein, 735 aa, Adeno-associated virus
MAADGYLPDWLEDTLSEGIRQWWKLKPGPPPPKPAERHKDDSRGLVLPGYKYLGPFNGLDKGEPVNEADAAALEHDKAYDRQLDSGDNPYLKYNHADAEFQERLKEDTSFGGNLGRAVFQAKKRVLEPLSLVEEPVKTAPGKKRPVEHSPAEPDSSSGTGKSGNQPARKRLNFGQTGDSDSVPDPQPLGQPPAAPSGLGTNTMATGSGAPMADNNEGADGVGNSSGNWHCDSTWMGDRVITTSTRTWALPTYNNHLYKQISSQSGASNDNHYFGYSTPWGYFDFNRFHCHFSPRDWQRLINNNWGFRPKRLNFKLFNIQVKEVTQNDGTTTIANNLTSTVQVFTDSEYQLPYVLGSAHQGCLPPFPADVFMVPQYGYLTLNNGSQAVGRSSFYCLEYFPSQMLRTGNNFTFSYTFEDVPFHSSYAHSQSLDRLMNPLIDQYLYYLSRTNTPSGTTTQSRLQFSQAGASDIQDQSRNWLPGPCYRQQRVSKTSADNNNSEYSWTGATKYHLNGRDSLVNPGPAMASHKDDEEKFFPQSGVLIFGKQGSEKTNVDIEKVMITDEEEIRTTNPVATEQYGSVSTNLQSGNTQAATADVNTQGVLPGMVGQDRDVYLQGPTWAKIPHTDGHFHPSPLMGGFGLKHPPPQILIKNTPVPANPSTTFSAAKFASFITQYSTGQVSVEIEWELQKENSKRWNPEIQYTSNYNKSVNVDFTVDTNGVYSEPRPIGTRYLTRNL

SEQ ID NO: 228 - DNA, 2208 bp, Adeno-associated virus
atggctgccgatggttatcttccagattggctcgaggacactctctctgaaggaataagacagtggtggaagctcaaacctggcccaccaccaccaaagcccgcagagcggcataaggacgacagcaggggtcttgtgcttcctgggtacaagtacctcggacccttcaacggactcgacaagggagagccggtcaacgaggcagacgccgcggccctcgagcacgacaaggcctacgaccggcagctcgacagcggagacaacccgtacctcaagtacaaccacgccgacgcagagtttcaggagcgccttaaagaagatacgtcttttgggggcaacctcggacgagcagtcttccaggcaaaaaagagggttctggaacctctgggcctggttgaggagcctgttaagacggctccgggaaaaaagaggccggtagagcactctcctgcagagccagattcctcctccggaactggaaagtcgggcaaccagcctgcaagaaagagattgaatttcggtcagactggagactcagactccgtacctgacccccagcctctcggacagccaccagcagccccctctggtctgggaactaatacgatggctacaggcagtggcgcaccaatggcagacaataacgagggcgccgacggagtgggtaattcctcgggaaattggcattgcgattccacatggatgggcgacagagtcatcaccaccagcacccgaacctgggccctgcccacctacaacaaccatctgtacaagcaaatatccagccagtctggagccagcaacgacaatcactactttggctacagcaccccctgggggtattttgacttcaacagattccactgccacttttcaccacgtgactggcaaagactcatcaacaacaactggggattccgacccaagagactcaacttcaagctctttaacattcaagtcaaagaggtcacgcagaatgacggtacgacgacgattgccaataaccttaccagcacggttcaggtgtttactgactcggagtaccagctcccgtacgtcctcggctcggcgcatcaaggatgcctcccgccgttcccagcagacgtcttcatggtgccacagtatggatacctcaccctgaacaacgggagtcaggcagtaggacgctcttcattttactgcctagggtactttccttctcagatgctgcgtaccggaaacaactttaccttcagctacacctttgaggacgttcctttccacagcagctacgctcacagccagagtttggaccgtctcatgaatcctctcatcgaccagtacctgtattacttgagcagaacaaacactccaagcggaaccaccacgcagtccaggcttcagttttctcaggccggagcgagtgacattcgggaccagtctaggaactggcttcctggaccctgttaccgtcagcagcgagtatcaaagacatctgcggataacaacaacagtgaatactcgtggactggagctaccaagtaccacctcaatggcagagactctctggtgaatccgggcccggccatggccagccacaaagacgatgaagaaaagttttttcctcagagcggggttcttatctttgggaagcaaggcccagagaaaacaaatgtggatattgaaaaggtcatgattacagacgaagaggaaatcaggaccaccaatcccgtggctacggagcagtatggttctgtatctaccaacctccagagcggcaacacacaagcagctaccgcagatgtcaacacacaaggcgttcttccaggcatggtctggcaagacagagacgtgtacctgcaggggcctatttgggcaaagattccacacacggacggacattttcacccctctcccctcatgggcggatttggacttaaacaccctcctccacagattctcatcaagaacaccccggtacctgcgaatccttcgaccaccttcagtgcggcaaagtttgcttccttcattacacagtactccacggggcaggtcagcgtggagatcgagtgggagctgcagaaggagaacagcaaacgctggaatcccgagatccagtacacttccaactacaacaagtctgttaatgtggactttactgtggacactaatggcgtgtattcagagcctcgccccattggcaccagatacctgactcgtaatctgtaa

SEQ ID NO: 229 - protein, 735 aa, Adeno-associated virus
MAADGYLPDWLEDTLSEGIRQWWKLKPGPPPPKPAERHKDDSRGLVLPGYKYLGPFNGLDKGEPVNEADAAALEHDKAYDRQLDSGDNPYLKYNHADAEFQERLKEDTSFGGNLGRAVFQAKKRVLEPLGLVEEPVKTAPGKKRPVEHSPAEPDSSSGTGKSGNQPARKRLNFGQTGDSDSVPDPQPLGQPPAAPSGLGTNTMATGSGAPMADNNEGADGVGNSSGNWHCDSTWMGDRVITTSTRTWALPTYNNHLYKQISSQSGASNDNHYFGYSTPWGYFDFNRFHCHFSPRDWQRLINNNWGFRPKRLNFKLFNIQVKEVTQNDGTTTIANNLTSTVQVFTDSEYQLPYVLGSAHQGCLPPFPADVFMVPQYGYLTLNNGSQAVGRSSFYCLGYFPSQMLRTGNNFTFSYTFEDVPFHSSYAHSQSLDRLMNPLIDQYLYYLSRTNTPSGTTTQSRLQFSQAGASDIRDQSRNWLPGPCYRQQRVSKTSADNNNSEYSWTGATKYHLNGRDSLVNPGPAMASHKDDEEKFFPQSGVLIFGKQGPEKTNVDIEKVMITDEEEIRTTNPVATEQYGSVSTNLQSGNTQAATADVNTQGVLPGMVWQDRDVYLQGPIWAKIPHTDGHFHPSPLMGGFGLKHPPPQILIKNTPVPANPSTTFSAAKFASFITQYSTGQVSVEIEWELQKENSKRWNPEIQYTSNYNKSVNVDFTVDTNGVYSEPRPIGTRYLTRNL

SEQ ID NO: 230 - protein, 735 aa, Adeno-associated virus
MAADGYLPDWLEDTLSEGIRQWWKLKPGPPPPKPAERHKDDSRGLVLPGYKYLGPFNGLDKGEPVNEADAAALEHDKAYDRQLDSGDNPYLKYNHADAEFQERLKEDTSFGGNLGRAVFQAKKRVLEPLGLVEEPVKTAPGKKRPVEHSPAEPDSSSGTGKSGNQPARKRLNFGQTGDSDSVPDPQPLGQPPAAPSGLGTNTMATGSGAPMADNNEGADGVGNSSGNWHCDSTWMGDRVITTSTRTWALPTYNNHLYKQISSQSGASNDNHYFGYSTPWGYFDFNRFHCHFSPRDWQRLINNNWGFRPKRLNFKLFNIQVKEVTQNDGTTTIANNLTSTVQVFTDSEYQLPYVLGSAHQGCLPPFPADVFMVPQYGYLTLNNGSQAVGRSSFYCLEYFPSQMLRTGNNFTFSYTFEDVPFHSSYAHSQSLDRLMNPLIDQYLYYLSRTNTPSGTTTQSRLQFSQAGASDIRDQSRNWLPGPCYRQQRVSKTSADNNNSEYSWTGATKYHLNGRDSLVNPGPAMASHKDDEEKFFPQSGVLIFGKQGPEKTNVDIEKVMITDEEEIRTTNPVATEQYGSVSTNLQSGNTQAATADVNTQGVLPGMVWQDRDVYLQGPIWAKIPHTDGHFHPSPLMGGFGLKHPPPQILIKNTPVPANPSTTFSAAKFASFITQYSTGQVSVEIEWELQKENSKRWNPEIQYTSNYNKSVNVDFTVDTNGVYSEPRPIGTRYLTRNL

SEQ ID NO: 231 - protein, 735 aa, Adeno-associated virus; identical to SEQ ID NO: 230

SEQ ID NO: 232 - DNA, 2211 bp, Adeno-associated virus
atggctgccgatggttatcttccagattggctcgaggacactctctctgaaggaataagacagtggtggaagctcaaacctggcccaccaccaccaaagcccgcagagcggcataaggacgacagcaggggtcttgtgcttcctgggtacaagtacctcggacccttcaacggactcgacaagggggagccggtcaacgaggcagacgccgcggccctcgagcacgacaaggcctacgaccggcagctcgacagcggagacaacccgtacctcaagtacaaccacgccgacgcagagtttcaggagcgccttaaagaagatacgtcttttgggggcaacctcggacgagcagtcttccaggcgaaaaagagggttcttgaacctctgcggcctggtttgaggaaacctgttaagacggctccgggaaaaaagaggccggtagagcactctcctgtggagccagactcctcctcgggaaccggaaaagcgggccagcagcctgcaagaaaaagattaaattttggtcagactggagacgcagactccgtacctgacccccagcctctcggacagccaccagcagccccctctggtctgggatctactacaatggctacaggcagtggcgcaccaatggcagacaataacgagggtgccgatggagtgggtaattcctcaggaaattggcattgcgattcccaatggctggacgacagagtcatcgccaccagcacccgaacctgggccctgcccacatacaacaaccacctctacaagcaaatctccagccaatcaggagcctgcaacgacaaccactactttggctacagcaccccctgggggtattttgacttcaacagattccactgccacttttcaccacgtgactggcaaagactcatcaacagcaactggggattccggcccaaaagactcaacttcaagctctttaatattcaagtcaaagaggtcacgcagaatgacggtacgacgacgattgccaataaccttaccagcacggttcaggtgtttactgactcggagtaccagctcccgtacgtcccgggctcggcgcatcaaggatgcctcccgccgtttccagcggacgtcttcatggtcccacagtatggatacctcaccctgaacaacgggagtcaggcggtaggacgctcttccttttactgcctggagtactttccttctcagatgctgcgtactggaaacaactttcagttcagctacacttttgaagacgtgcctttccacagcagctacgctcactgccagagtctggatcggctgatgaatcctctgatcgaccagtacctgtattatctgaacaagacacaaacaaatagtggaactcttcagcagtctcggctactgtttagccaagctggaccaaccaacatgtctcttcaagctaaaaactggctgcctggaccttgctacagacagcagcgtctgtcaaaacaggcaaacgacaataacaactgcaactttccctggactgcagctacaaagtatcatctaaatggccgggactcgttggttaatccaggaccagctatggccagtcacaaggatgacgaagaaaagtttttccccatgcatggaaccctgatatttggtaaacaaggaacaaatgccaacgacgcggatttggaaaatgtcatgattacagatgaagaagaaatcaggcccaccaatcccgtggctacggagcagtacgggactgtgtcaaataatttgcaaaactcaaacactggtccaactacaggaactgtcaatcaccaaggagcgttacctggtatggtgtggcaggatcgagacgtgtacctgcagggacccatttgggccaagattcctcacaccgatggacactttcatccttctccactgatgggaggttttggactcaaacacccgcctcctcagatcatgatcaaaagcactcccgttccagccaatcctcccacaaacttcagttctgccaagtttgcttcttccatcacacagtattccacgggacaggtcagcgtggagatcgagtgggagctgcagaaggagaacagcaaacgctggaatcccgaaattcagtacacttccaactacaacaagtctgttaatgtggactttactgtggacactaatggtgtgtattcagagcctcgccccattggcaccagatacctgactcgtaatctgtaa

SEQ ID NO: 233 - protein, 736 aa, Adeno-associated virus
MAADGYLPDWLEDTLSEGIRQWWKLKPGPPPPKPAERHKDDSRGLVLPGYKYLGPFNGLDKGEPVNEADAAALEHDKAYDRQLDSGDNPYLKYNHADAEFQERLKEDTSFGGNLGRAVFQAKKRVLEPLRPGLRKPVKTAPGKKRPVEHSPVEPDSSSGTGKAGQQPARKRLNFGQTGDADSVPDPQPLGQPPAAPSGLGSTTMATGSGAPMADNNEGADGVGNSSGNWHCDSQWLDDRVIATSTRTWALPTYNNHLYKQISSQSGACNDNHYFGYSTPWGYFDFNRFHCHFSPRDWQRLINSNWGFRPKRLNFKLFNIQVKEVTQNDGTTTIANNLTSTVQVFTDSEYQLPYVPGSAHQGCLPPFPADVFMVPQYGYLTLNNGSQAVGRSSFYCLEYFPSQMLRTGNNFQFSYTFEDVPFHSSYAHCQSLDRLMNPLIDQYLYYLNKTQTNSGTLQQSRLLFSQAGPTNMSLQAKNWLPGPCYRQQRLSKQANDNNNCNFPWTAATKYHLNGRDSLVNPGPAMASHKDDEEKFFPMHGTLIFGKQGTNANDADLENVMITDEEEIRPTNPVATEQYGTVSNNLQNSNTGPTTGTVNHQGALPGMVWQDRDVYLQGPIWAKIPHTDGHFHPSPLMGGFGLKHPPPQIMIKSTPVPANPPTNFSSAKFASSITQYSTGQVSVEIEWELQKENSKRWNPEIQYTSNYNKSVNVDFTVDTNGVYSEPRPIGTRYLTRNL

SEQ ID NO: 234 - DNA, 2208 bp, Adeno-associated virus
atggctgccgatggttatcttccagattggctcgaggacactctctctgaaggaataagacagtggtggaagctcaaacctggcccaccaccaccaaagcccgcagagcggcataaggacgacagcaggggtcttgtgcttcctgggtacaagtacctcggacccttcaacggactcgacaagggagagccggtcaacgaggcagacgccgcggccctcgagcacgacaaggcctacgaccggcagctcgacagcggagacaacccgtacctcaagtacaaccacgccgacgcggagtttcaggagcgccttaaagaggatacgtcttttgggggcaacctcggacgagcagtcttccaggcaaaaaagagggttctggaacctctgggcctggttgaggagcctgttaagacggctccgggaaaaaagaggccggtagagcactctcctgcagagccagattcctcctccggaactggaaagtcgggcaaccagcctgcaagaaagagattgaatttcggtcagactggagactcagactccgtacctgacccccagcctctcggacagccaccagcagccccctctggtctgggaactaatacgatggctacaggcagtggcgcaccaatggcagacaataacgagggcgccgacggagtgggtaattcctcgggaaattggcattgcgattccacatggatgggcgacagagtcatcaccaccagcacccgaacctgggccctgcccacctacaacaaccatctgtacaagcaaatatccagccagtctggagccagcaacgacaatcactactttggctacagcaccccctgggggtattttgacttcaacagattccactgccacttttcaccacgtgactggcaaagactcatcaacaacaactggggattccgacccaagagactcaacttcaagctctttaacattcaagtcaaagaggtcacgcagaatgacggtacgacgacgattgccaataaccttaccagcacggttcaggtgtttactgactcggagtaccagctcccgtacgtcctcggctcggcgcatcaaggatgcctcccgccgttcccagcagacgtcttcatggtgccacagtatggatacctcaccctgaacaacgggagtcaggcagtaggacgctcttcattttactgcctagagtactttccttctcagatgctgcgtaccggaaacagctttaccttcagctacacctttgaggacgttcctttccacagcagctacgctcacagccagagtttggaccgtctcatgaatcctctcatcgaccagtacctgtattacttgagcagaacaaacactccaagcggaaccaccacgcagtccaggcttcagttttctcaggccggagcgagtgacattcgggaccagtctaggaactggcttcctggaccctgttaccgtcagcagcgagtatcaaagacatctgcggataacaacaacagtgaatactcgtggactggagctaccaagtaccacctcaatggcagagactctctggtgaatccgggcccggccatggccagccacaaagacgatgaagaaaagttctttcctcagagcggggttcttatctttgggaagcaaggctcagagaaaacaaatgtggatattgaaaaggtcatgattacagacgaagaggaaatcaggaccaccaatcccgtggctacggagcagtatggttctgtatctaccaacctccagagcggcaacacacaagcagctaccgcagatgtcaacacacaaggcgttcttccaggcatggtctggcaagacagagacgtgtacctgcaggggcctatttgggcaaagattccacacacggacggacattttcacccctctcccctcatgggcggatttggacttaaacaccctcctccacagattctcatcaagaacaccccggtacctgcgaatccttcgaccaccttcagtgcggcaaagtttgcttccttcattacacagtactccacggggcaggtcagcgtggagatcgagtgggagctgcagaaggagaacagcaaacgctggaatcccgagatccagtacacttccaactacaacaagtctgttaatgtggactttactgtggacactaatggcgtgtattcagagcctcgccccattggcaccagatacctgactcgtaatctgtaa

SEQ ID NO: 235 - protein, 735 aa, Adeno-associated virus
MAADGYLPDWLEDTLSEGIRQWWKLKPGPPPPKPAERHKDDSRGLVLPGYKYLGPFNGLDKGEPVNEADAAALEHDKAYDRQLDSGDNPYLKYNHADAEFQERLKEDTSFGGNLGRAVFQAKKRVLEPLGLVEEPVKTAPGKKRPVEHSPAEPDSSSGTGKSGNQPARKRLNFGQTGDSDSVPDPQPLGQPPAAPSGLGTNTMATGSGAPMADNNEGADGVGNSSGNWHCDSTWMGDRVITTSTRTWALPTYNNHLYKQISSQSGASNDNHYFGYSTPWGYFDFNRFHCHFSPRDWQRLINNNWGFRPKRLNFKLFNIQVKEVTQNDGTTTIANNLTSTVQVFTDSEYQLPYVLGSAHQGCLPPFPADVFMVPQYGYLTLNNGSQAVGRSSFYCLEYFPSQMLRTGNSFTFSYTFEDVPFHSSYAHSQSLDRLMNPLIDQYLYYLSRTNTPSGTTTQSRLQFSQAGASDIRDQSRNWLPGPCYRQQRVSKTSADNNNSEYSWTGATKYHLNGRDSLVNPGPAMASHKDDEEKFFPQSGVLIFGKQGSEKTNVDIEKVMITDEEEIRTTNPVATEQYGSVSTNLQSGNTQAATADVNTQGVLPGMVWQDRDVYLQGPIWAKIPHTDGHFHPSPLMGGFGLKHPPPQILIKNTPVPANPSTTFSAAKFASFITQYSTGQVSVEIEWELQKENSKRWNPEIQYTSNYNKSVNVDFTVDTNGVYSEPRPIGTRYLTRNL

SEQ ID NO: 236 - DNA, 2211 bp, Adeno-associated virus; identical to SEQ ID NO: 126

SEQ ID NO: 237 - protein, 736 aa, Adeno-associated virus
MAADGYLPDWLEDTLSEGIRQWWKLKPGPPPPKPAERHKDDSRGLVLPGYKYLGPGNGLDKGEPVNAADAAALEHDKAYDQQLKAGDNPYLKYNHADAEFQERLKEDTSFGGNLGRAVFQAKKRLLEPLGLVEEAAKTAPGKKRPVEQSPQEPDSSAGIGKSGSQPAKKKLNFGQTGDTESVPDPQPIGEPPAAPSGVGSLTMASGGGAPVADNNEGADGVGSSSGNWHCDSQWLGDRVITTSTRTWALPTYNNHLYKQISNSTSGGSSNDNAYFGYSTPWGYFDFNRFHCHFSPRDWQRLINNNWGFRPKRLNFKLFNIQVKEVTDNNGVKTIANNLTSTVQVFTDSDYQLPYVLGSAHEGCLPPFPADVFMIPQYGYLTLNDGGQAVGRSSFYCLEYFPSQMLRTGNNFQFSYEFENVPFHSSYAHSQSLDRLMNPLIDQYLYYLSKTINGSGQNQQTLKFSVAGPSNMAVQGRNYIPGPSYRQQRVSTTVTQNNNSEFAWPGASSWALNGRNSLMNPGPAMASHKEGEDRFFPLSGSLIFGKQGTGRDNVDADKVMITNEEEIKTTNPVATESYGQVATNHQSAQAQAQTGWVQNQGILPGMVWQDRDVYLQGPIWAKIPHTDGNFHPSPLMGGFGMKHPPPQILIKNTPVPADPPTAFNKDKLNSFITQYSTGQVSVEIEWELQKENSKRWNPEIQYTSNYYKSNNVEFAVSTEGVYSEPRPIGTRYLTRNL

SEQ ID NO: 238 - DNA, 2211 bp, Adeno-associated virus
atggctgccgatggttatcttccagattggctcgaggacactctctctgaaggaataagacagtggtggaagctcaaacctggcccaccaccaccaaagcccgcagagcggcataaggacgacagcaggggtcttgtgcttcctgggtacaagtacctcggacccggcaacggactcgacaagggggagccggtcaacgcagcagacgcggcggccctcgagcacgacaaggcctacgaccagcagctcaaggccggagacaacccgtacctcaagtacaaccacgccgacgccgagttccaggagcggctcaaagaagatacgtcttttgggggcaacctcgggcgagcagtcttccaggccaaaaagaggcttcttgaacctcttggtctggttgaggaagcggctaagacggctcctggaaagaagaggcctgtagagcagtctcctcaggaaccggactcctccgcgggtattggcaaatcgggttcacagcccgctaaaaagaaactcaatttcggtcagactggcgacacagagtcagtccccgaccctcaaccaatcggagaacctcccgcagccccctcaggtgtgggatctcttacaatggcttcaggtggtggcgcaccagtggcagacaataacgaaggtgccgatggagtgggtagttcctcgggaaattggcattgcgattcccaatggctgggggacagagtcatcaccaccagcacccgaacctgggccctgcccacctacaacaatcacctctacaagcaaatctccaacagcacatctggaggatcttcaaatgacaacgcctacttcggctacagcaccccctgggggtattttgacttcaacagattccactgccacttctcaccacgtgactggcagcgactcatcaacaacaactggggattccggcctaagcgactcaacttcaagctcttcaacattcaggtcaaagaggttacggacaacaatggagtcaagaccatcgccaataaccttaccagcacggtccaggtcttcacggactcagactatcagctcccgtacgtgctcgggtcggctcacgagggctgcctcccgccgttcccagcggacgttttcatgattcctcagtacgggtatctgacgcttaatgatgggagccaggccgtgggtcgttcgtccttttactgcctggaatatttcccgtcgcaaatgctaagaacgggtaacaacttccagttcagctacgagtttgagaacgtacctttccatagcagctacgctcacagccaaagcctggaccgactaatgaatccactcatcgaccaatacttgtactatctctcaaagactattaacggttctggacagaatcaacaaacgctaaaattcagcgtggccggacccagcaacatggctgtccagggaagaaactacatacctggacccagctaccgacaacaacgtgtctcaaccactgtgactcaaaacaacaacagcgaatttgcttggcctggagcttcttcttgggctctcaatggacgtaatagcttgatgaatcctggacctgctatggccagccacaaagaaggagaggaccgtttctttcctttgtctggatctttaatttttggcaaacaaggaactggaagagacaacgtggatgcggacaaagtcatgataaccaacgaagaagaaattaaaactactaacccggtagcaacggagtcctatggacaagtggccacaaaccaccagagtgcccaagcacaggcgcagaccggctgggttcaaaaccaaggaatacttccgggtatggtttggcaggacagagatgtgtacctgcaaggacccatttgggccaaaattcctcacacggacggcaactttcacccttctccgctaatgggagggtttggaatgaagcacccgcctcctcagatcctcatcaaaaacacacctgtacctgcggatcctccaacggctttcaataaggacaagctgaactctttcatcacccagtattctactggccaagtcagcgtggagattgagtgggagctgcagaaggaaaacagcaagcgctggaacccggagatccagtacacttccaactattacaagtctaataatgttgaatttgctgttaatactgaaggtgtatatagtgaaccccgccccattggcaccagatacctgactcgtaatctgtaa

SEQ ID NO: 239 - protein, 736 aa, Adeno-associated virus
MAADGYLPDWLEDTLSEGIRQWWKLKPGPPPPKPAERHKDDSRGLVLPGYKYLGPGNGLDKGEPVNAADAAALEHDKAYDQQLKAGDNPYLKYNHADAEFQERLKEDTSFGGNLGRAVFQAKKRLLEPLGLVEEAAKTAPGKKRPVEQSPQEPDSSAGIGKSGSQPAKKKLNFGQTGDTESVPDPQPIGEPPAAPSGVGSLTMASGGGAPVADNNEGADGVGSSSGNWHCDSQWLGDRVITTSTRTWALPTYNNHLYKQISNSTSGGSSNDNAYFGYSTPWGYFDFNRFHCHFSPRDWQRLINNNWGFRPKRLNFKLFNIQVKEVTDNNGVKTIANNLTSTVQVFTDSDYQLPYVLGSAHEGCLPPFPADVFMIPQYGYLTLNDGSQAVGRSSFYCLEYFPSQMLRTGNNFQFSYEFENVPFHSSYAHSQSLDRLMNPLIDQYLYYLSKTINGSGQNQQTLKFSVAGPSNMAVQGRNYIPGPSYRQQRVSTTVTQNNNSEFAWPGASSWALNGRNSLMNPGPAMASHKEGEDRFFPLSGSLIFGKQGTGRDNVDADKVMITNEEEIKTTNPVATESYGQVATNHQSAQAQAQTGWVQNQGILPGMVWQDRDVYLQGPIWAKIPHTDGNFHPSPLMGGFGMKHPPPQILIKNTPVPADPPTAFNKDKLNSFITQYSTGQVSVEIEWELQKENSKRWNPEIQYTSNYYKSNNVEFAVNTEGVYSEPRPIGTRYLTRNL

SEQ ID NO: 240 - DNA, 2208 bp, Adeno-associated virus
atggctgccgatggttatcttccagattggctcgaggacactctctctgaaggaataagacagcggtggaagctcaaacctggcccaccaccaccagagcccgcagagcggcataaggacgacagcaggggtcttgtgcttcctgggtacaagtacctcggacccttcaacggactcgacaagggagagccggtcaacgaggcagacgccgcggccctcgagcacgacaaagcctacgaccggcagctcgacagcggagacaacccgtacctcaagtacaaccacgccgacgcggagtttcaggagcgccttaaagaagatacgtcttttgggggcaacctcggacgagcagtcttccaggcgaaaaagagggtacttgaacctctgggcctggttgaggaacctgttaagacggctccgggaaaaaagaggccggtagagcactctcctgtggagccagactcctcctcgggaaccggaaaggcgggccagcagcctgcaagaaaaagattgaattttggtcagactggagacgcagactcagtacctgacccccagcctctcggacagccaccagcagccccctctggtctgggaactaatacgatggctacaggcagtggcgcaccaatggcagacaataacgagggcgccgacggagtgggtaattcctcgggaaattggcattgcgattccacatggatgggcgacagagtcatcaccaccagcacccgaacctgggccctgcccacctacaacaaccacctctacaaacaaatttccagccaatcaggagcctcgaacgacaatcactactttggctacagcaccccttgggggtattttgacttcaacagattccactgccacttttcaccacgtgactggcaaagactcatcaacaacaactggggattccgacccaagagactcaacttcaagctctttaacattcaagtcaaagaggtcacgcagaatgacggtacgacgacgattgccaataaccttaccggcacggttcaggtgtttactgactcggagtaccagctcccgtacgtcctcggctcggcgcatcaaggatgcctcccgccgttcccagcagacgtcttcatggtgccacagtatggatacctcaccctgaacaacgggagtcaggcagtaggacgctcttcattttactgcctggagtactttccttctcagatgctgcgtaccggaaacaactttaccttcagctacacttttgaggacgttcctttccacagcagctacgctcacagccagagtctgggccgtctcatgaatcctctcatcgaccagtacctgtattacttgagcagaacaaacactccaagtggaaccaccacgcagtcaaggcttcagttttctcaggccggagcgagtgacattcgggaccagtctaggaactggcttcctggaccctgttaccgccagcagcgagtatcaaagacatctgcggataacaacaacagtgaatactcgtggactggagctaccaagtaccacctcaatggcagagactctctggtgaatccgggcccggccatggcaagccacaaggacgatgaagaaaagttttttcctcagagcggggttctcatctttgggaagcaaggctcagagaaaacaaatgtggacattgaaaaggtcatgattacagacgaagaggaaatcaggacaaccaatcccgtggctacggagcagtatggttctgtatctaccaacctccagagaggcaacagacaagcagctaccgcagatgtcaacacacaaggcgttcttccaggcatggtctggcaggacagagatgtgtaccttcaggggcccatctgggcaaagattccacacacggacggacattttcacccctctcccctcatgggtggattcggacttaaacaccctcctccacagattctcatcaagaacaccccggtacctgcgaatccttcgaccaccttcagtgcggcaaagtttgcttccttcatcacacagtactccacgggacaggtcagcgtggagatcgagtgggagctgcagaaggaaaacagcaaacgctggaatcccgaaattcagtacacttccaactacaacaagtctgttaatgtggactttactgtggacactaatggcgtgtattcagagcctcgccccattggcaccagatacctgactcgtaatctgtaa

SEQ ID NO: 241 - protein, 735 aa, Adeno-associated virus
MAADGYLPDWLEDTLSEGIRQRWKLKPGPPPPEPAERHKDDSRGLVLPGYKYLGPFNGLDKGEPVNEADAAALEHDKAYDRQLDSGDNPYLKYNHADAEFQERLKEDTSFGGNLGRAVFQAKKRVLEPLGLVEEPVKTAPGKKRPVEHSPVEPDSSSGTGKAGQQPARKRLNFGQTGDADSVPDPQPLGQPPAAPSGLGTNTMATGSGAPMADNNEGADGVGNSSGNWHCDSTWMGDRVITTSTRTWALPTYNNHLYKQISSQSGASNDNHYFGYSTPWGYFDFNRFHCHFSPRDWQRLINNNWGFRPKRLNFKLFNIQVKEVTQNDGTTTIANNLTGTVQVFTDSEYQLPYVLGSAHQGCLPPFPADVFMVPQYGYLTLNNGSQAVGRSSFYCLEYFPSQMLRTGNNFTFSYTFEDVPFHSSYAHSQSLGRLMNPLIDQYLYYLSRTNTPSGTTTQSRLQFSQAGASDIRDQSRNWLPGPCYRQQRVSKTSADNNNSEYSWTGATKYHLNGRDSLVNPGPAMASHKDDEEKFFPQSGVLIFGKQGSEKTNVDIEKVMITDEEEIRTTNPVATEQYGSVSTNLQRGNRQAATADVNTQGVLPGMVWQDRDVYLQGPIWAKIPHTDGHFHPSPLMGGFGLKHPPPQILIKNTPVPANPSTTFSAAKFASFITQYSTGQVSVEIEWELQKENSKRWNPEIQYTSNYNKSVNVDFTVDTNGVYSEPRPIGTRYLTRNL

SEQ ID NO: 242 - DNA, 2208 bp, Adeno-associated virus
atggctgccgatggttatcttccagattggctcgaggacactctctctgaaggaataagacagcggtggaagctcaaacctggcccaccaccaccagagcccgcagagcggcataaggacgacagcaggggtcttgtgcttcctgggtacaagtacctcggacccttcaacggactcgacaagggagagccggtcaacgaggcagacgccgcggccctcgagcacgacaaagcctacgaccggcagctcgacagcggagacaacccgtacctcaagtacaaccacgccgacgcggagtttcaggagcgccttaaagaagatacgtcctttgggggcaacctcggacgagcagtcttccaggcgaaaaagagggtacttgaacctctgggcctggttgaggaacctgttaagacggctccgggaaaaaagaggccggtagagcactctcctgtggagccagactcctcctcgggaaccggaaaggcgggccagcagcctgcaagaaaaagattgaattttggtcagactggagacgcagactcagtacctgacccccagcctctcggacagccaccagcagccccctctggtctgggaactaatacgatggctacaggcagtggcgcaccaatggcagacaataacgagggcgccgacggagtgggtaattcctcgggaaattggcattgcgattccacatggatgggcgacagagtcatcaccaccagcacccgaacctgggccctgcccacctacaacaaccacctctacaaacaaatttccagccaatcaggagcctcgaacgacaatcactactttggctacagcaccccttgggggtattttgacttcaacagattccactgccacttttcaccacgtgactggcaaagactcatcaacaacaactggggattccgacccaagagactcaacttcaagctctttaacattcaagtcaaagaggtcacgcagaatgacggtacgacgacgattgccaataaccttaccagcacggttcaggtgtttactgactcggagtaccagctcccgtacgtcctcggctcggcgcatcaaggatgcctcccgccgttcccagcagacgtcttcatggtgccacagtatggatacctcaccctgaacaacgagagtcaggcagtaggacgctcttcattttactgcctggagtactttccttctcagatgctgcgtaccggaaacaactttaccttcagctacacttttgaggacgttcctttccacagcagctacgctcacagccagagtctgggccgtctcatgaatcctctcatcgaccagtacctgtattacttgagcagaacaaacactccaagtggaaccaccacgcagtcaaggcttcagttttctcaggccggagcgagtgacattcgggaccagtctaggaactggcttcctggaccctgttaccgccagcagcgagtatcaaagacatctgcggataacaacaacagtgaatactcgtggactggagctaccaagtaccacctcaatggcagagactctctggtgaatccgggcccggccatggcaagccacaaggacgatgaagaaaagttttttcctcagagcggggttctcatctttgggaagcaaggctcagagaaaacaaatgtggacattgaaaaggtcatgattacagacgaagaggaaatcaggacaaccaatcccgtggctacggagcagtatggttctgtatctaccaacctccagagaggcaacagacaagcagctaccgcagatgtcaacacacaaggcgttcttccaggcatggtctggcaggacagagatgtgtaccttcaggggcccatctgggcaaagattccacacacggacggacattttcacccctctcccctcatgggtggattcggacttaaacaccctcctccacagattctcatcaagaacaccccggtacctgcgaatccttcgaccaccttcagtgcggcaaagtttgcttccttcatcacacagtactccacgggacaggtcagcgtggagatcgagtgggagctgcagaaggaaaacagcaaacgctggaatcccgaaattcagtacacttccaactacaacaagtctgttaatgtggactttactgtggacactaatggcgtgtattcagagcctcgccccattggcaccagatacctgactcgtaatctgtaa

SEQ ID NO: 243 - protein, 735 aa, Adeno-associated virus
MAADGYLPDWLEDTLSEGIRQRWKLKPGPPPPEPAERHKDDSRGLVLPGYKYLGPFNGLDKGEPVNEADAAALEHDKAYDRQLDSGDNPYLKYNHADAEFQERLKEDTSFGGNLGRAVFQAKKRVLEPLGLVEEPVKTAPGKKRPVEHSPVEPDSSSGTGKAGQQPARKRLNFGQTGDADSVPDPQPLGQPPAAPSGLGTNTMATGSGAPMADNNEGADGVGNSSGNWHCDSTWMGDRVITTSTRTWALPTYNNHLYKQISSQSGASNDNHYFGYSTPWGYFDFNRFHCHFSPRDWQRLINNNWGFRPKRLNFKLFNIQVKEVTQNDGTTTIANNLTSTVQVFTDSEYQLPYVLGSAHQGCLPPFPADVFMVPQYGYLTLNNESQAVGRSSFYCLEYFPSQMLRTGNNFTFSYTFEDVPFHSSYAHSQSLGRLMNPLIDQYLYYLSRTNTPSGTTTQSRLQFSQAGASDIRDQSRNWLPGPCYRQQRVSKTSADNNNSEYSWTGATKYHLNGRDSLVNPGPAMASHKDDEEKFFPQSGVLIFGKQGSEKTNVDIEKVMITDEEEIRTTNPVATEQYGSVSTNLQRGNRQAATADVNTQGVLPGMVWQDRDVYLQGPIWAKIPHTDGHFHPSPLMGGFGLKHPPPQILIKNTPVPANPSTTFSAAKFASFITQYSTGQVSVEIEWELQKENSKRWNPEIQYTSNYNKSVNVDFTVDTNGVYSEPRPIGTRYLTRNL

SEQ ID NO: 244 - DNA, 2208 bp, Adeno-associated virus
atggctgccgatggttatcttccagattggctcgaggacactctctctgaaggaataagacagcggtggaagctcaaacctggcccaccaccaccagagcccgcagagcggcataaggacgacagcaggggtcttgtgcttcctgggtacaagtacctcggacccttcaacggactcgacaagggagagccggtcaacgaggcagacgccgcggccctcgagcacgacaaagcctacgaccggcagctcgacagcggagacaacccgtacctcaagtacaaccacgccgacgcggagtttcaggagcgccttaaagaagatacgtcttttgggggcaacctcggacgagcagtcttccaggcgaaaaagagggtacttgaacctctgggcctggttgaggaacctgttaagacggctccgggaaaaaagaggccggtagagcactctcctgtggagccagactcctcctcgggaaccggaaaggcgggccagcagcctgcaagaaaaagattgaattttggtcagactggagacgcagactcagtacctgacccccagcctctcggacagccaccagcagccccctctggtctgggaactaatacgatggctacaggcagtggcgcaccaatggcagacaataacgagggcgccgacggagtgggtaattcctcgggaaattggcattgcgattccacatggatgggcgacagagtcatcaccaccagcacccgaacctgggccctgcccacctacaacaaccacctctacaaacaaatttccagccaatcaggagcctcgaacgacaatcactactttggctacagcaccccttgggggtattttgacttcaacagattccactgccacttttcaccacgtgactggcaaagactcatcaacaacaactggggattccgacccaagagactcaacttcaagctctttaacattcaagtcaaagaggtcacgcagaatgacggtacgacgacgattgccaataaccttaccagcacggttcaggtgtttactgactcggagtaccagctcccgtacgtcctcggctcggcgcatcaaggatgcctcccgccgttcccagcagacgtcttcatggtaccacagtatggatacctcaccctgaacaacgggagtcaggcagtaggacgctcttcattttactgcctggagtactttccttctcagatgctgcgtaccggaaacaactttaccttcagctacacttttgaggacgttcctttccacagcagctacgctcacagccagagtctgggccgtctcatgaatcctctcatcgaccagtacctgtattacttgagcagaacaaacactccaagtggaaccaccacgcagtcaaggcttcagttttctcaggccggagcgagtgacattcgggaccagtctaggaactggcttcctggaccctgttaccgccagcagcgagtatcaaagacatctgcggataacaacaacagtgaatactcgtggactggagctaccaagtaccacctcaatggcagagactctctggtgaatccgggcccggccatggcaagccacaaggacgatgaagaaaagttttttcctcagagcggggttctcatctttgggaagcaaggctcagagaaaacaaatgtggacattgaaaaggtcatgattacagacgaagaggaaatcaggacaaccaatcccgtggctacggagcagtatggttctgtatctaccaacctccagagaggcaacagacaagcagctaccgcagatgtcaacacacaaggcgttcttccaggcatggtctggcaggacagagatgtgtaccttcaggggcccatctgggcaaagattccacacacggacggacattttcacccctctcccctcatgggtggattcggacttaaacaccctcctccacagattctcatcaagaacaccccggtacctgcgaatccttcgaccaccttcagtgcggcaaagtttgcttccttcatcacacagtactccacgggacaggtcagcgtggagatcgagtgggagctgcagaaggaaaacagcaaacgctggaatcccgaaattcagtacacttccaactacaacaagtctgttaatgtggactttactgtggacactaatggcgtgtattcagagcctcgccccattggcaccagatacctgactcgtaatctgtaa

SEQ ID NO: 245 - protein, 735 aa, Adeno-associated virus
MAADGYLPDWLEDTLSEGIRQRWKLKPGPPPPEPAERHKDDSRGLVLPGYKYLGPFNGLDKGEPVNEADAAALEHDKAYDRQLDSGDNPYLKYNHADAEFQERLKEDTSFGGNLGRAVFQAKKRVLEPLGLVEEPVKTAPGKKRPVEHSPVEPDSSSGTGKAGQQPARKRLNFGQTGDADSVPDPQPLGQPPAAPSGLGTNTMATGSGAPMADNNEGADGVGNSSGNWHCDSTWMGDRVITTSTRTWALPTYNNHLYKQISSQSGASNDNHYFGYSTPWGYFDFNRFHCHFSPRDWQRLINNNWGFRPKRLNFKLFNIQVKEVTQNDGTTTIANNLTSTVQVFTDSEYQLPYVLGSAHQGCLPPFPADVFMVPQYGYLTLNNGSQAVGRSSFYCLEYFPSQMLRTGNNFTFSYTFEDVPFHSSYAHSQSLGRLMNPLIDQYLYYLSRTNTPSGTTTQSRLQFSQAGASDIRDQSRNWLPGPCYRQQRVSKTSADNNNSEYSWTGATKYHLNGRDSLVNPGPAMASHKDDEEKFFPQSGVLIFGKQGSEKTNVDIEKVMITDEEEIRTTNPVATEQYGSVSTNLQRGNRQAATADVNTQGVLPGMVWQDRDVYLQGPIWAKIPHTDGHFHPSPLMGGFGLKHPPPQILIKNTPVPANPSTTFSAAKFASFITQYSTGQVSVEIEWELQKENSKRWNPEIQYTSNYNKSVNVDFTVDTNGVYSEPRPIGTRYLTRNL

SEQ ID NO: 246 - DNA, 2208 bp, Adeno-associated virus
atggctgccgatggttatcttccagattggctcgaggacactctctctgaaggaataagacagcggtggaagctcaaacctggcccaccaccaccagagcccgcagagcggcataaggacgacagcaggggtcttgtgcttcctgggtacaagtacctcggacccttcaacggactcgacaagggagagccggtcaacgaggcagacgccgcggccctcgagcacgacaaagcctacgaccggcagctcgacagcggagacaacccgtacctcaagtacaaccacgccgacgcggagtttcaggagcgccttaaagaagatacgtcttttgggggcaacctcggacgagcagtcttccaggcgaaaaagagggtactcgaacctctgggcctggttgaggaacctgttaagacggctccgggaaaaaagaggccggtagagcactctcctgtggagccagactcctcctcgggaaccggaaaggcgggccagcagcctgcaagaaaaagattgaattttggtcagactggagacgcagactcagtacctgacccccagcctctcggacagccaccagcagccccctctggtctgggaactaatacgatggctacaggcagtggcgcaccaatggcagacaataacgagggcgccgacggagtgggtaattcctcgggaaattggcattgcgattccacatggatgggcgacagagtcatcaccaccagcacccgaacctgggccctgcccacctacaacaaccacctctacaaacaaatttccagccaatcaggagcctcgaacgacaatcactactttggctacagcaccccttgggggtattttgacttcaacagattccactgccacttttcaccacgtgactggcaaagactcatcaacaacaactggggattccgacccaagagactcaacttcaagctctttaacattcaagtcaaagaggtcacgcagaatgacggtacgacgacgattgccaataaccttaccagcacggttcaggtgtttactgactcggagtaccagctcccgtacgtcctcggctcggcgcatcaaggatgcctcccgccgttcccagcagacgtcttcatggtgccacagtatggatacctcaccctgaacaacgggagtcaggcagcaggacgctcttcattttactgcctggagtactttccttctcagatgctgcgtaccggaaacaactttaccttcagctacacttttgaggacgttcctttccacagcagctacgctcacagccagagtctgggccgtctcatgaatcctctcatcgaccagtacctgtattacttgagcagaacaaacactccaagtggaaccaccacgcagtcaaggcttcagttttctcaggccggagcgagtgacattcgggaccagtctaggaactggcttcctggaccctgttaccgccagcagcgagtatcaaagacatctgcggataacaacaacagtgaatactcgtggactggagctaccaagtaccacctcaatggcagagactctctggtgaatccgggcccggccatggcaagccacaaggacgatgaagaaaagttttttcctcagagcggggttctcatctttgggaagcaaggctcagagaaaacaaatgtggacattgaaaaggtcatgattacagacgaagaggaaatcaggacaaccaatcccgtggctacggagcagtatggttctgtatctaccaacctccagagaggcaacagacaagcagctaccgcagatgtcaacacacaaggcgttcttccaggcatggtctggcaggacagagatgtgtaccttcaggggcccatctgggcaaagattccacacacggacggacattttcacccctctcccctcatgggtggattcggacttaaacaccctcctccacagattctcatcaagaacaccccggtacctgcgaatccttcgaccaccttcagtgcggcaaagtttgcttccttcatcacacagtactccacgggacaggtcagcgtggagatcgagtgggagctgcagaaggaaaacagcaaacgctggaatcccgaaattcagtacacttccaactacaacaagtccgttaatgtggactttactgtggacactaatggcgtgtattcagagcctcgccccattggcaccagatacctgactcgtaatctgtaa

SEQ ID NO: 247 - protein, 735 aa, Adeno-associated virus
MAADGYLPDWLEDTLSEGIRQRWKLKPGPPPPEPAERHKDDSRGLVLPGYKYLGPFNGLDKGEPVNEADAAALEHDKAYDRQLDSGDNPYLKYNHADAEFQERLKEDTSFGGNLGRAVFQAKKRVLEPLGLVEEPVKTAPGKKRPVEHSPVEPDSSSGTGKAGQQPARKRLNFGQTGDADSVPDPQPLGQPPAAPSGLGTNTMATGSGAPMADNNEGADGVGNSSGNWHCDSTWMGDRVITTSTRTWALPTYNNHLYKQISSQSGASNDNHYFGYSTPWGYFDFNRFHCHFSPRDWQRLINNNWGFRPKRLNFKLFNIQVKEVTQNDGTTTIANNLTSTVQVFTDSEYQLPYVLGSAHQGCLPPFPADVFMVPQYGYLTLNNGSQAAGRSSFYCLEYFPSQMLRTGNNFTFSYTFEDVPFHSSYAHSQSLGRLMNPLIDQYLYYLSRTNTPSGTTTQSRLQFSQAGASDIRDQSRNWLPGPCYRQQRVSKTSADNNNSEYSWTGATKYHLNGRDSLVNPGPAMASHKDDEEKFFPQSGVLIFGKQGSEKTNVDIEKVMITDEEEIRTTNPVATEQYGSVSTNLQRGNRQAATADVNTQGVLPGMVWQDRDVYLQGPIWAKIPHTDGHFHPSPLMGGFGLKHPPPQILIKNTPVPANPSTTFSAAKFASFITQYSTGQVSVEIEWELQKENSKRWNPEIQYTSNYNKSVNVDFTVDTNGVYSEPRPIGTRYLTRNL

SEQ ID NO: 248 - protein, 738 aa, Adeno-associated virus; identical to SEQ ID NO: 90

SEQ ID NO: 249 - DNA, 2217 bp, Adeno-associated virus
atggctgctgacggttatcttccagattggctcgaggacaacctctctgagggcattcgcgagtggtgggacctgaaacctggagcccccaagcccaaggccaaccagcagaagcaggacgacggccggggtctggtgcttcctggctacaagtacctcggacccttcaacggactcgacaagggggagcccgtcaacgcggcggacgcagcggccctcgagcacgacaaggcctacgaccagcagctcaaagcgggtgacaatccgtacctgcggtataaccacgccgacgccgagtttcaggagcgtctgcaagaagatacgtcttttgggggcaacctcgggcgagcagtcttccaggccaagaagcgggttctcgaacctctcggtctggttgaggaagctgctaagacggctcctggaaagaagagaccggtagaaccgtcacctcagcgttcccccgactcctccacgggcatcggcaagaaaggccagcagcccgctaaaaagagactgaactttggtcagactggcgactcagagtcagtccccgaccctcaaccaatcggagaaccaccagcaggcccctctggtctgggatctggtacaatggctgcaggcggtggcgctccaatggcagacaataacgaaggcgccgacggagtgggtagttcctcaggaaattggcattgcgattccacatggctgggcgacagagtcatcaccaccagcacccgaacctgggccctgcccacctacaacaaccacctctacaagcaaatatccaatgggacatcgggaggaagcaccaacgacaacacctacttcggctacagcaccccctgggggtattttgacttcaacagattccactgccacttctcaccacgtgactggcagcgactcatcaacaacaactggggattccggccaaaaagactcagcttcaagctcttcaacatccaggtcaaggaggtcacgcagaatgaaggcaccaagaccatcgccaataaccttaccagcacgattcaggtatttacggactcggaataccagctgccgtacgtcctcggctccgcgcaccagggctgcctgcctccgttcccggcggacgtcttcatgattccccagtacggctaccttacactgaacaatggaagtcaagccgtaggccgttcctccttctactgcctggaatattttccatctcaaatgctgcgaactggaaacaattttgaattcagctacaccttcgaggacgtgcctttccacagcagctacgcacacagccagagcttggaccgactgatgaatcctctcatcgaccagtacctgtactacttatccagaactcagtccacaggaggaactcaaggtacccagcaattgttattttctcaagctgggcctgcaaacatgtcggctcaggctaagaactggctacctggaccttgctaccggcagcagcgagtctctacgacactgtcgcaaaacaacaacagcaactttgcttggactggtgccaccaaatatcacctgaacggaagagactctttggtaaatcccggtgtcgccatggcaacccacaaggacgacgaggaacgcttcttcccgtcgagtggagtcctgatgttcggaaaacagggtgctggaagagacaatgtggactacagcagcgttatgctaaccagcgaagaagaaattaaaaccactaaccccgtagccacagaacaatacggtgtggtggctgacaacttgcagcaaaccaatacagggcctattgtgggaaatgtcaacagccaaggagccttacctggcatggtctggcagaaccgagacgtgtacctgcagggtcccatctgggccaagattcctcacacggacggcaacttccacccttcaccgctaatgggaggatttggactgaagcacccacctcctcagatcctgatcaagaacacgccggtacctgcggatcctccaacaacgttcagccaggcgaaattggcttccttcattacgcagtacagcaccggacaggtcagcgtggaaatcgagtgggagctgcagaaggagaacagcaaacgctggaacccagagattcagtacacttcaaactactacaaatctacaaatgtggactttgctgtcaatacagagggaacttattctgagcctcgccccattggtactcgttacctcacccgtaatctgtaa

SEQ ID NO: 250 - protein, 738 aa, Adeno-associated virus
MAADGYLPDWLEDNLSEGIREWWDLKPGAPKPKANQQKQDDGRGLVLPGYKYLGPFNGLDKGEPVNAADAAALEHDKAYDQQLKAGDNPYLRYNHADAEFQERLQEDTSFGGNLGRAVFQAKKRVLEPLGLVEEAAKTAPGKKRPVEPSPQRSPDSSTGIGKKGQQPAKKRLNFGQTGDSESVPDPQPIGEPPAGPSGLGSGTMAAGGGAPMADNNEGADGVGSSSGNWHCDSTWLGDRVITTSTRTWALPTYNNHLYKQISNGTSGGSTNDNTYFGYSTPWGYFDFNRFHCHFSPRDWQRLINNNWGFRPKRLSFKLFNIQVKEVTQNEGTKTIANNLTSTIQVFTDSEYQLPYVLGSAHQGCLPPFPADVFMIPQYGYLTLNNGSQAVGRSSFYCLEYFPSQMLRTGNNFEFSYTFEDVPFHSSYAHSQSLDRLMNPLIDQYLYYLSRTQSTGGTQGTQQLLFSQAGPANMSAQAKNWLPGPCYRQQRVSTTLSQNNNSNFAWTGATKYHLNGRDSLVNPGVAMATHKDDEERFFPSSGVLMFGKQGAGRDNVDYSSVMLTSEEEIKTTNPVATEQYGVVADNLQQTNTGPIVGNVNSQGALPGMVWQNRDVYLQGPIWAKIPHTDGNCHPSPLMGGFGLKHPPPQILIKNTPVPADPPTTFSQAKLASFITQYSTGQVSVEIEWELQKENSKRWNPEIQYTSNYYKSTNVDFAVNTEGTYSEPRPIGTRYLTRNL

SEQ ID NO: 251 - protein, 738 aa, Adeno-associated virus
MAADGYLPDWLEDNLSEGIREWWDLKPGAPKPKANQQKQDDGRGLVLPGYKYLGPFNGLDKGEPVNAADAAALEHDKAYDQQLKAGDNPYLRYNHADAEFQERLQEDTSFGGNLGRAVFQAKKRVLEPLGLVEEGAKTAPGKKRPVEPSPQRSPDSSTGIGKKGQQPARKRLNFGRTGDSESVPDPQPIGEPPAAPSSVGSGTMAAGGGAPMADNNEGADGVGSSSGNWHCDSTWLGDRVITTSTRTWALPTYNNHLYKQISNGTSGGSTNDNTYFGYSTPWGYLDFNRFHCHFSPRDWQRLINNNWGFRPKRLSFKLFNIQVKEVTQNEGTKTIANNLASTIQVFTDSEYQPPYVLGSAHQGCLPPFPADVFMIPQYGYLTLNNGSQAVGRSSFYCLEYFPSQMLRTGNNFSFSYTFEDVPFHSSYAHSQSLDRLMNPLIDQYLYYLSRTQSTGGTAGTQQLLFSRAGPSNMSAQARNWLPGPCYRQQRVSTTLSQNNNSNFAWTGATKYHLNGRDSLVNPGVAMATNKDDEDRFFPSSGILMFGKQGAGKDNVDYSNVMLTSEEEIKTTNPVATEQYGVVADNLQQQNTAPTVGAVNSQGALPGMVWQNRDVYLQGPIWAKIPHTDGNFHPSPLMGGFGLKHPPPQILIKNTPVPADPPTAFNQAKLNSFIAQYSTGQVSVEIEWELQKENSKRWNPEIQYTSNYYKSTNADFAVNTEGVYSEPRPIGTRYLTRNL

SEQ ID NO: 252 - DNA, 2217 bp, Adeno-associated virus
atggctgccgatggttatcttccagattggctcgaggacaacctctctgagggcattcgcgagtggtgggacctgaaacctggagccccgaaacccaaagccaaccagcaaaagcaggacgacggccggggtctggtgcttcctggctacaagtacctcggacccttcaacggactcgacaagggggagcccgtcaacgcggcggacgcagcggccctcgagcacgacaaggcctacgaccagcagctcaaagcgggtgacaatccgtacctgcggtataatcacgccgacgccgagtttcaggagcgtctgcaagaagatacgtcttttgggggcaacctcgggcgagcagtcttccaggccaagaagcgggttctcgaacctctcggtctggttgaggaaggcgctaagacggctcctggaaagaagagaccggtagagccgtcaccacagcgttcccccgactcctccacgggcatcggcaagaaaggccagcagcccgccagaaagagactcaatttcggtcggactggcgactcagagtcagtccccgaccctcaacctatcggagaacctccagcagcgccctctagtgtgggatctggtacaatggctgcaggcggtggcgcaccaatggcagacaataacgaaggtgccgacggagtgggtagttcctcgggaaattggcattgcgattccacatggctgggcgacagagttatcaccaccagcacccgaacctgggccctgcccacctacaacaaccacctctacaagcaaatctccaacgggacctcgggaggcagcaccaacgacaacacctactttggctacagcaccccctgggggtatcttgactttaacagattccactgccacttctcaccacgtgactggcagcgactcatcaacaacaactggggattccggcccaagagactcagcttcaagctcttcaacatccaggtcaaagaggtcacgcagaatgaaggcaccaagaccatcgccaataacctcgccagcaccatccaggtgtttacggactcggaataccagccgccgtacgtcctcggctctgcccaccagggctgcctgcctccgttcccggcggacgtcttcatgattcctcagtacggctacctgactctcaacaacggtagtcaggccgtgggacgttcctccttctactgcctggagtacttcccctctcagatgctgagaacgggcaacaacttttccttcagctacactttcgaggacgtgcctttccacagcagctacgcgcacagccagagtttggacaggctgatgaatcctctcatcgaccagtacctgtactacctgtcaagaacccagtctacgggaggcacagcgggaacccagcagttgctgttttctcgggccgggcctagcaacatgtcggctcaggccagaaactggctgcctggaccctgctacagacagcagcgcgtctccacgacactgtcgcaaaacaacaacagcaactttgcctggactggtgccaccaagtatcatctgaacggcagagactctctggtgaatccgggcgtcgccatggcaaccaacaaggacgacgaggaccgcttcttcccatccagcggcatcctcatgtttggcaagcagggagctggaaaagacaacgtggactatagcaacgtgatgctaaccagcgaggaagaaatcaagaccaccaaccccgtggccacagaacagtatggcgtggtggctgataacctacagcagcaaaacaccgctcctactgtgggggccgtcaacagccagggagccttacctggcatggtctggcagaaccgggacgtgtacctgcagggtcctatttgggccaagattcctcacacagatggcaactttcacccgtctcctttaatgggcggctttggacttaaacatccgcctcctcagatcctcatcaaaaacactcctgttcctgcggatcctccaacagcgttcaaccaggccaagctgaattctttcatcgcgcagtacagcaccggacaagtcagcgtggagatcgagtgggagctgcagaaggagaacagcaagcgctggaacccagagattcagtatacttccaactactacaaatctacaaatgcggactttgctgttaatactgagggtgtttactctgagcctcgccccattggcactcgttacctcacccgtaatctgtaa

SEQ ID NO: 253 - DNA, 2208 bp, Adeno-associated virus
atggctgccgatggttatcttccagattggctcgaggacactctctctgaaggaataagacagtggtggaagctcaaacctggcccaccaccaccaaagcccgcagagcggcataaggacgacagcaggggtcttgtgcttcctgggtacaagtacctcggacccttcaacggactcgacaagggggagccggtcaacgaggcagacgccgcggccctcgagcacgacaaggcctacgaccggcagctcgacagcggagacaacccgtacctcaagtacaaccacgccgacgcagagtttcaggagcgccttaaagaagatacgtcttttgggggcaacctcggacgagcagtcttccaggcgaaaaagagggttcttgaacctctgggcctggttgaggagcctgttaagacggctccgggaaaaaagaggccggtagagcactctcctgtggagccagactcctcctcgggaaccggaaaagcgggccagcagcctgcaagaaaaagattaaattttggtcagactggagacgcagactccgtacctgacccccagcctctcggacagccaccagcagccccctctggtctgggatctactacaatggctacaggcagtggcgcaccaatggcagacaataacgagggtgccgatggagtgggtaattcctcaggaaattggcattgcgattcccaatggctgggcgacagagtcatcaccaccagcacccgaacctgggccctgcccacatacaacaaccacctctacaagcaaatctccagccaatcaggagccagcaacgacaaccactactttggctacagcaccccctgggggtattttgacttcaacagattccactgccacttttcaccacgtgactggcaaagactcgtcaacaacaaccggggattccggcccaaaagactcaacttcaagctctttaatattcaagtcaaagaggtcacgcagaatgacggtacgacgacgattgccaataaccttaccagcacggttcaggtgtttactgactcggagtaccagctcccgtacgtcctgggctcggcgcatcaaggatgcctcccgccgtttccagcggacgtcttcatggtcccacagtatggatacctcaccctgaacaacgggagtcaggcggtaggacgctcttccttttactgcctggagtactttccttctcagatgctgcgtactggaaacaactttcagttcagctacacttttgaagacgtgcctttccacagcagctacgctcacagccagagtctggatcggctgatgaatcctctgatcgaccagtacctgtattatctgaacaagacacaaacaaatagtggaactcttcagcagtctcggctactgtttagccaagctggaccaaccaacatgtctcttcaagctaaaaactggctgcctggaccttgctacagacagcagcgtctgtcaaaacaggcaaacgacaacaacaacagcaactttccctggactgcagctacaaagtatcatctaaatggccgggactcgttggttaatccaggaccagctatggccagtcacaaggatgacgaagaaaagtttttccccatgcatggaaccctgatatttggtaaacaaggaacaaatgccaacgacgcggatttggaaaatgtcatgattacagatgaagaagaaatcagggccaccaatcccgtggctacggagcagtacgggactgtgtcaaataatttgcaaaactcaaacactggtccaactactggaactgtcaatcaccaaggagcgttacctggtatggtgtggcaggatcgagacgtgtacctgcagggacccatttgggccaagattcctcacaccgatggacactttcatccttctccactgatgggaggttttggactcaaacacccgcctcctcagatcatgatcaaaaacactcccgttccagccaatcctcccacaaacttcagttctgccaagtttgcttctttcatcacacagtattccacgggacaggtcagcgtggagatcgagtgggagctgcagaaggagaacagcaaacgctggaatcccgaaattcagtacacttccaactacaacaagtctgttaatgtggactttactgtggacactaatggtgtgtattcagagcctcgccccattggcaccagatacctgactcgtaatctgtaa

SEQ ID NO: 254 - protein, 735 aa, Adeno-associated virus
MAADGYLPDWLEDTLSEGIRQWWKLKPGPPPPKPAERHKDDSRGLVLPGYKYLGPFNGLDKGEPVNEADAAALEHDKAYDRQLDSGDNPYLKYNHADAEFQERLKEDTSFGGNLGRAVFQAKKRVLEPLGLVEEPVKTAPGKKRPVEHSPVEPDSSSGTGKAGQQPARKRLNFGQTGDADSVPDPQPLGQPPAAPSGLGSTTMATGSGAPMADNNEGADGVGNSSGNWHCDSQWLGDRVITTSTRTWALPTYNNHLYKQISSQSGASNDNHYFGYSTPWGYFDFNRFHCHFSPRDWQRLVNNNRGFRPKRLNFKLFNIQVKEVTQNDGTTTIANNLTSTVQVFTDSEYQLPYVLGSAHQGCLPPFPADVFMVPQYGYLTLNNGSQAVGRSSFYCLEYFPSQMLRTGNNFQFSYTFEDVPFHSSYAHSQSLDRLMNPLIDQYLYYLNKTQTNSGTLQQSRLLFSQAGPTNMSLQAKNWLPGPCYRQQRLSKQANDNNNSNFPWTAATKYHLNGRDSLVNPGPAMASHKDDEEKFFPMHGTLIFGKQGTNANDADLENVMITDEEEIRATNPVATEQYGTVSNNLQNSNTGPTTGTVNHQGALPGMVWQDRDVYLQGPIWAKIPHTDGHFHPSPLMGGFGLKHPPPQIMIKNTPVPANPPTNFSSAKFASFITQYSTGQVSVEIEWELQKENSKRWNPEIQYTSNYNKSVNVDFTVDTNGVYSEPRPIGTRYLTRNL

SEQ ID NO: 255 - protein, 738 aa, Adeno-associated virus
MAADGYLPDWLEDNLSEGIREWWDLKPGAPKPKANQQKQDDGRGLVLPGYKYLGPFNGLDKGEPVNAADAAALEHDKAYDQQLKAGDNPYLRYNHADAEFQERLQEDTSFGGNLGRAVFQAKKRVLEPLGLVEEAAKTAPGKKRPVEPSPQRSPDSSTGIGKKGQQPAKKRLSFGQTGDSESVPDPQPIGEPPAGPSGLGSGTMAAGGGAPMADNNEGADGVGSSSGNWHCDSTWLGDRVITTSTRTWALPTYNNHLYKQISNGTSGGSTNDNTYFGYSTPWGYFDFNRFHCHFSPRDWQRLINNNWGFRPKRLSFKLFNIQVKEVTQNEGTKTIANNLTSTIQVFTDSEYQLPYVLGSAHQGCLPPFPADVFMIPQYGYLTLNNGSQAVGRSSFYCLEYFPSQMLRTGNNSEFSYTFEDVPFHSSYAHSQSLDRLMNPLIDQYLYYLSRTQSTGGTQGTQQLLFSQAGPANMSAQAKNWLPGPCYRQQRVSTTLSQNNNSNFAWTGATKYHLNGRDSLVNPGVAMATHKDDEERFFPSSGVLMFGKQGAGRDNVDYSSVMLTSEEEIKTTNPVATEQYGVVADNLQQTNTGPIVGNVNSQGALPGMVWQNRDVYLQGPIWAKIPHTDGNFHPSPLMGGFGLKHPPPQILIKNTPVPADPPTTFSQAKLASFITQYSTGQVSVEIEWELQKENSKRWNPEIQYTSNYYKSTNVDFAVNTEGTYSEPRPIGTRYLTRNL

SEQ ID NO: 256 - DNA, 2217 bp, Adeno-associated virus
atggctgctgacggttatcttccagattggctcgaggacaacctctctgagggcattcgcgagtggtgggacctgaaacctggagcccccaagcccaaggccaaccagcagaagcaggacgacggccggggtctggtgcttcctggctacaagtacctcggacccttcaacggactcgacaagggggagcccgtcaacgcggcggacgcagcggccctcgagcacgacaaggcctacgaccagcagctcaaagcgggtgacaatccgtacctgcggtataaccacgccgacgccgagtttcaggagcgtctgcaagaagatacgtcttttgggggcaacctcgggcgagcagtcttccaggccaagaagcgggttctcgaacctctcggtctggttgaggaagctgctaagacggctcctggaaagaagagaccggtagaaccgtcacctcagcgttcccccgactcctccacgggcatcggcaagaaaggccagcagcccgctaaaaagagactgagctttggtcagactggcgactcagagtcagtccccgaccctcaaccaatcggagaaccaccagcaggcccctctggtctgggatctggtacaatggctgcaggcggtggcgctccaatggcagacaataacgaaggcgccgacggagtgggtagttcctcaggaaattggcattgcgattccacatggctgggcgacagagtcatcaccaccagcacccgaacctgggccctgcccacctacaacaaccacctctacaagcaaatatccaatgggacatcgggaggaagcaccaacgacaacacctacttcggctacagcaccccctgggggtattttgacttcaacagattccactgccacttctcaccacgtgactggcagcgactcatcaacaacaactggggattccggccaaaaagactcagcttcaagctcttcaacatccaggtcaaggaggtcacgcagaatgaaggcaccaagaccatcgccaataaccttaccagcacgattcaggtatttacggactcggaataccagctgccgtacgtcctcggctccgcgcaccagggctgcctgcctccgttcccggcggacgtcttcatgattccccagtacggctaccttacactgaacaatggaagtcaagccgtaggccgttcctccttctactgcctggaatattttccatctcaaatgctgcgaactggaaacaattctgaattcagctacaccttcgaggacgtgcctttccacagcagctacgcacacagccagagcttggaccgactgatgaatcctctcatcgaccagtacctgtactacttatccagaactcagtccacaggaggaactcaaggtacccagcaattgttattttctcaagctgggcctgcaaacatgtcggctcaggctaagaactggctacctggaccttgctaccggcagcagcgagtctctacgacactgtcgcaaaacaacaacagcaactttgcttggactggtgccaccaaatatcacctgaacggaagagactctttggtaaatcccggtgtcgccatggcaacccacaaggacgacgaggaacgcttcttcccgtcgagtggagtcctgatgtttggaaaacagggtgctggaagagacaatgtggactacagcagcgttatgctaaccagcgaagaagaaattaaaaccactaaccctgtagccacagaacaatacggtgtggtggctgacaacttgcagcaaaccaatacagggcctattgtgggaaatgtcaacagccaaggagccttacctggcatggtctggcagaaccgagacgtgtacctgcagggtcccatctgggccaagattcctcacacggacggcaacttccacccttcaccgctaatgggaggatttggactgaagcacccacctcctcagatcctgatcaagaacacgccggtacctgcggatcctccaacaacgttcagccaggcgaaattggcttccttcattacgcagtacagcaccggacaggtcagcgtggaaatcgagtgggagctgcagaaggagaacagcaaacgctggaacccagagattcagtacacttcaaactactacaaatctacaaatgtggactttgctgtcaatacagagggaacttattctgagcctcgccccattggtactcgttacctcacccgtaatctgtaa

SEQ ID NO: 257 - protein, 738 aa, Adeno-associated virus
MAADGYLPDWLEDNLSEGIREWWDLKPGAPKPKANQQKQDDGRGLVLPGYKYLGPFNGLDKGEPVNAADAAALEHDKAYDQQLKAGDNPYLRYNHADAEFQERLQEDTSFGGNLGRAVFQAKKRVLEPLGPVEEAAKTAPGKKRPVEPPPQRSPDSSTGIGKKGQQPAKKRLNFGQTGDSESVPDPQPIGEPPAGPSGLGSGTMAAGGGAPMADNNEGADGVGSSSGNWHCDSTWLGDRVITTSTRTWALPTYNNHLYKQISNGTSGGSTNDNTYFGYSTPWGYFDFNRFHCHFSPRDWQRLINNNWGFRPKRLSFKLFNIQVKEVTQNEGTKTVANNLTSTIQVFTDSEYQLPYVLGSAHQGCLPPFPADVFMIPQYGYLTLNNGSQAVGRSSFYCLEYFPSQMLRTGNNFEFSYTFEDVPFHSSYAHSQSLDRLMNPLIDQYLYYLSRTQSTGGTQGTQQLLFSQAGPANMSAQAKNWLPGPCYRQQRVSTTLSQNNNSNFAWTGATKYHLNGRDSLVNPGVAMATHKDDEERFFPSSGVLMFGKQGAGRDNVDYSSVMLTSEEEIKTTNPVATEQYGVVADNLQQTNTGPIVGNVNSQGALPGMVWQNRDVYLQGPIWAKIPHTDGNFHPSPLMGGFGLKHPPPQILIKNTPVPADPPTTFSQAKLASFITQYSTGQVSVEIEWELQKENSKRWNPEIQYTSNYYKSTNVDFAVNTEGTYSEPRPIGTRYLTRNL

SEQ ID NO: 258 - DNA, 2217 bp, Adeno-associated virus
atggctgctgacggttatcttccagattggctcgaggacaacctctctgagggcattcgcgagtggtgggacctgaaacctggagcccccaagcccaaggccaaccagcagaagcaggacgacggccggggtctggtgcttcctggctacaagtacctcggacccttcaacggactcgacaagggggagcccgtcaacgcggcggacgcagcggccctcgagcacgacaaggcctacgaccagcagctcaaagcgggtgacaatccgtacctgcggtataaccacgccgacgccgagtttcaggagcgtctacaagaagatacgtcttttgggggcaacctcgggcgagcagtcttccaggccaagaagcgggttctcgaacctctcggtccggttgaggaagctgctaagacggctcctggaaagaagagaccggtagaaccgccacctcagcgttcccccgactcctccacgggcatcggcaagaaaggccagcagcccgctaaaaagagactgaactttggtcagactggcgactcagagtcagtccccgaccctcaaccaatcggagaaccaccagcaggcccctctggtctgggatctggtacaatggctgcaggcggtggcgctccaatggcagacaataacgaaggcgccgacggagtgggtagttcctcaggaaattggcattgcgattccacatggctgggcgacagagtcatcaccaccagcacccgaacctgggccctgcccacctacaacaaccacctctacaagcaaatatccaatgggacatcgggaggaagcaccaacgacaacacctacttcggctacagcaccccctgggggtattttgacttcaacagattccactgccacttctcaccacgtgactggcagcgactcatcaacaacaactggggattccggccaaaaagactcagcttcaagctcttcaacatccaggtcaaggaggtcacgcagaatgaaggcaccaagaccgtcgccaataaccttaccagcacgattcaggtatttacggactcggaataccagctgccgtacgtcctcggctccgcgcaccagggctgcctgcctccgttcccggcggacgtcttcatgattccccagtacggctaccttacactgaacaatggaagtcaagccgtaggccgttcctccttctactgcctggaatattttccatctcaaatgctgcgaactggaaacaattttgaattcagctacaccttcgaggacgtgcctttccacagcagctacgcacacagccagagcttggaccgactgatgaatcctctcatcgaccagtacctgtactacttatccagaactcagtccacaggaggaactcaaggtacccagcaattgttattttctcaagctgggcctgcaaacatgtcggctcaggctaagaactggctacctggaccttgctaccggcagcagcgagtctctacgacactgtcgcaaaacaacaacagcaactttgcttggactggtgccaccaaatatcacctgaacggaagagactctttggtaaatcccggtgtcgccatggcaacccacaaggacgacgaggaacgcttcttcccgtcgagtggagtcctgatgtttggaaaacagggtgctggaagagacaatgtggactacagcagcgttatgctaaccagcgaagaagaaattaaaaccactaaccctgtagccacagaacaatacggtgtggtggctgacaacttgcagcaaaccaatacagggcctattgtgggaaatgtcaacagccaaggagccttacctggcatggtctggcagaaccgagacgtgtacctgcagggtcccatctgggccaagattcctcacacggacggcaacttccacccttcaccgctaatgggaggatttggactgaagcacccacctcctcagatcctgatcaagaacacgccggtacctgcggatcctccaacaacgttcagccaggcgaaattggcttccttcattacgcagtacagcaccggacaggtcagcgtggaaatcgagtgggagctgcagaaggagaacagcaaacgttggaacccagagattcagtacacttcaaactactacaaatctacaaatgtggactttgctgtcaatacagagggaacttattctgagcctcgccccattggtactcgttacctcacccgtaatctgtaa

SEQ ID NO: 259 - protein, 738 aa, Adeno-associated virus
MAADGYLPDWLEDNLSEGIREWWDLKPGAPKPKANQQKQDDGRGLVLPGYKYLGPFNGLDKGEPVNAADAAALEHDKAYDQQLKAGDNPYLRYNHADAEFQERLQEDTSFGGNLGRAVFQAKKRVLEPLGLVEEAAKTAPGKKRPVEPSPQRSPDSSTGIGKKGQQPAKKRLNFGQTGDSESVPDPQPIGEPPAGPSGLGSGTMAAGGGAPMADNNEGADGVGSSSGNWHCDSTWLGDRVITTSTRTWALPTYNNHLYKQISNGTSGGSTNDNTYFGYSTPWGYFDFNRFHCHFSPRDWQRLINNNWGFRPKRLSFKLFNIQVKEVTQNEGTKTIANNLTSTIQVFTDSEYQLPYVLGSAHQGCLPPFPADVFMIPQYGYLTLNNGSQAVGRSSFYCLEYFPSQMLRTGNNFEFSYTFEDVPFHSSYAHSQSLDRLMNPLIDQYLYYLSRTQSTGGTQGTQQLLFSQAGPANMSAQAKNWLPGPCYRQQRVSTTLSQSNNSNFAWTGATKYHLNGRDSLVNPGVAMATHKDDEERFFPSSGVLMFGKQGAGRDNVDYSSVMLTSEEEIKTTNPVATEQYGVVADNLQQTNTGPIVGNVNSQGALPGMVWQNRDVYLQGPIWAKIPHTDGNFHPSPLMGGLGLKHPPPQILIKNTPVPADPPTTFSQAKLASFITQYSTGQVSVEIEWELQKENSKRWNPEIQYTSNYYKSTNVDFAVNTEGTYSEPRPIGTRYLTRNL

SEQ ID NO: 260 - DNA, 2217 bp, Adeno-associated virus
atggctgctgacggttatcttccagattggctcgaggacaacctctctgagggcattcgcgagtggtgggacctgaaacctggagcccccaagcccaaggccaaccagcagaagcaggacgacggccggggtctggtgcttcctggctacaagtacctcggacccttcaacggactcgacaagggggagcccgtcaacgcggcggacgcagcggccctcgagcacgacaaggcctacgaccagcagctcaaagcgggtgacaatccgtacctgcggtataaccacgccgacgccgagtttcaggagcgtctgcaagaagatacgtcttttgggggcaacctcgggcgagcagtcttccaggccaagaagcgggttctcgaacctctcggtctggttgaggaagcggctaagacggctcctggaaagaagagaccggtagaaccgtcacctcagcgttcccccgactcctccacgggcatcggcaagaaaggccagcagcccgctaaaaagagactgaactttggtcagactggcgactcagagtcagtccccgaccctcaaccaatcggagaaccaccagcaggcccctctggtctgggatctggtacaatggctgcaggcggtggcgctccaatggcagacaataacgaaggcgccgacggagtgggtagttcctcaggaaattggcattgcgattccacatggctgggcgacagagtcatcaccaccagcacccgaacctgggccctgcccacctacaacaaccacctctacaagcaaatatccaatgggacatcgggaggaagcaccaacgacaacacctacttcggctacagcaccccctgggggtattttgacttcaacagattccactgccacttctcaccacgtgactggcagcgactcatcaacaacaactggggattccggccaaaaagactcagcttcaagctcttcaacatccaggtcaaggaggtcacgcagaatgaaggcaccaagaccatcgccaataaccttaccagcacgattcaggtatttacggactcggaataccagctgccgtacgtcctcggctccgcgcaccagggctgcctgcctccgttcccggcggacgtcttcatgattccccagtacggctaccttacactgaacaatggaagtcaagccgtaggccgttcctccttctactgcctggaatattttccatctcaaatgctgcgaactggaaacaattttgaattcagctacaccttcgaggacgtgcctttccacagcagctacgcacacagccagagcttggaccgactgatgaatcctctcatcgaccagtacctgtactacttatccagaactcagtccacaggaggaactcaaggtacccagcaattgttattttctcaagctgggcctgcaaacatgtcggctcaggctaagaactggctacctggaccttgctaccggcagcagcgagtctctacgacactgtcgcaaagcaacaacagcaactttgcttggactggtgccaccaaatatcacctgaacggaagagactctttggtaaatcccggtgtcgccatggcaacccacaaggacgacgaggaacgcttcttcccgtcgagtggagtcctgatgtttggaaaacagggtgctggaagagacaatgtggactacagcagcgttatgctaaccagcgaagaagaaattaaaaccactaaccctgtagccacagaacaatacggtgtggtggctgacaacttgcagcaaaccaatacagggcctattgtgggaaatgtcaacagccaaggagccttacctggcatggtctggcagaaccgagacgtgtacctgcagggtcccatctgggccaagattcctcacacggacggcaacttccacccttcaccgctaatgggaggacttggactgaagcacccacctcctcagatcctgatcaagaacacgccggtacctgcggatcctccaacaacgttcagccaggcgaaattggcttccttcattacgcagtacagcaccggacaggtcagcgtggaaatcgagtgggagctgcagaaggagaacagcaaacgctggaacccagagattcagtacacttcaaactactacaaatctacaaatgtggactttgctgtcaatacagagggaacttattctgagcctcgccccattggtactcgttacctcacccgtaatctgtaa

SEQ ID NO: 261 - protein, 737 aa, Adeno-associated virus
MAADGYLPDWLEDNLSEGIREWWDLKPGAPKPKANQQKQDDGRGLVLPGYKYLGPFNGLDKGEPVNAADAAALEHDKAYDQQLKAGDNPYPRYNHADAEFQERLQEDTPFGGNLGRAVFQAKKRVLEPLGLVEEAAKTAPGKKRPVEPSPQRSPDSSTGIGKKGQQPAKKRLNFGQTGDSESVPDPQPIGEPPAGPSGLGSGTMAAGGGAPMADNNEGADGVGNASGNWHCDSTWLGDRVITTSTRTWALPTYNNHLYKQISSASTGASNDNHYFGYSTPWGYFDFNRFHCHFSPRDWQRLINNNWGFRPKRLNFKLFNIQVKEVTTNDGVTTIANNLTSTVQVFSDSEYQLPYVLGSAHQGCLPPFPADVFMIPQYGYLTLNNGSQAVGRSSFYCLEYFPSQMLRTGNNFTFSYTFEEVPLHSSYAHSQSLDRLMNPLIVQYLYYLNRTQNQSGSAQNKDLLFSRGSPAGMSVQPKNWLPGPCYRQQRVSKTKTDNNNSNFTWTGASKYNLNGRESIINPGTAMASHKDDEDKFFPMSGVMIFGKESAGASNTALDNVMITDEEEIKATNPVATERFGTVAVNFQSSSTDPATGDVHAMGALPGMVWQDRDVYLQGPIWAKIPHTDGHFHPSPLMGGFGLKNPPPQILIKNTPVPANPPAEFSATKFASFITQYSTGQVSVEIEWELQKENSKRWNPEVQYTSNYAKSASVDFTVDNNGLYTEPRPIGTRYLTRPL

SEQ ID NO: 262 - protein, 737 aa, Adeno-associated virus
MAADGYLPDWLEDNLSEGIREWWDLKPGAPKPKANQQKQDDGRGLVLPGYKYLGPFNGLDKGEPVNAADAAALEHDKAYDQQLKAGDNPYPRYNHADAEFQERLQEDTSFGGNLGRAVFQAKKRVLEPLGLVEEAAKTAPGKKRPVEPSPQRSPDSSTGIGKKGQQPAKKRLNFGQTGDSESVPDPQPIGEPPAGPSGLGSGTMAAGGGAPMADNNEGADGVGNASGNWHCDSTWLGDRVITTSTRTWALPTYNNHLYKQISSASTGASNDNHYFGYSTPWGYFDFNRFHCHFSPRDWQRLINNNWGFRPKRLNFKLFNIQVKEVTTNDGVTTIANNLTSTVQVFSDSEYQLPYVLGSAHQGCLPPFPADVFMIPQYGYLTLNNGSQAVGRSSFYCLEYFPSQMLRTGNNFTFSYTFEEVPLHSSYAHSQSLDRLMNPLIDQYLYYLNRTQNQSGSAQNKDLLFSRGSPAGMSVQPKNWLPGPCYRQQRVSKTKTDNNNSNFTWTGASKYNLNGRESIINPGTAMASHKDDEDKFFPMSGVMIFGKESAGASNTALDNVMITDEEEIKATNPVATERFGTVAVNFQSSSTDPATGDVHAMGALPGMVWQDRDVYLQGPIWAKIPHTDGHFHPSPLMGGFGLKNPPPQILIKNTPVPANPPAEFSATKFASFITQYSTGQVSVEIEWELQKENSKRWNPEVQYTSNYAKSASVDFTVDNNGLYTEPRPIGTRYLTRPL

SEQ ID NO: 263 - DNA, 2214 bp, Adeno-associated virus
atggctgctgacggttatcttccagattggctcgaggacaacctctctgagggcattcgcgagtggtgggacctgaaacctggagcccccaagcccaaggccaaccagcagaagcaggacgacggccggggtctggtgcttcctggctacaagtacctcggacccttcaacggactcgacaagggggagcccgtcaacgcggcggacgcagcggccctcgagcacgacaaggcctacgaccagcagctcaaagcgggtgacaatccgtacccgcggtataaccacgccgacgccgagtttcaggagcgtctgcaagaagatacgccttttgggggcaacctcgggcgagcagtcttccaggccaagaagcgggttctcgaacctctcggtctggttgaggaagctgctaagacggctcctggaaagaagagaccggtagaaccgtcacctcagcgttcccccgactcctccacgggcatcggcaagaaaggccagcagcccgctaaaaagagactgaactttggtcagactggcgactcagagtcagtccccgaccctcaaccaatcggagaaccaccagcaggcccctctggtctgggatctggtacaatggctgcaggcggtggcgctccaatggcagacaataacgaaggcgccgacggagtgggtaatgcctcaggaaattggcattgcgattccacatggctgggcgacagagtcatcaccaccagcacccgcacctgggccttgcccacctacaataaccacctctacaagcaaatctccagtgcttcaacgggggccagcaacgacaaccactacttcggctacagcaccccctgggggtattttgatttcaacagattccactgccacttttcaccacgtgactggcagcgactcatcaacaacaattggggattccggcccaagagactcaacttcaaactcttcaacatccaagtcaaggaggtcacgacgaatgatggcgtcacaaccatcgctaataaccttaccagcacggttcaagtcttctcggactcggagtaccagcttccgtacgtcctcggctctgcgcaccagggctgcctccctccgttcccggcggacgtgttcatgattccgcaatacggctacctgacgctcaacaatggcagccaagccgtgggacgttcatccttttactgcctggaatatttcccttctcagatgctgagaacgggcaacaactttaccttcagctacacctttgaggaagtgcctctccacagcagctacgcgcacagccagagcctggaccggctgatgaatcctctcatcgtccaatacctgtattacctgaacagaactcaaaatcagtccggaagtgcccaaaacaaggacttgctgttcagccgtgggtctccagctggcatgtctgttcagcccaaaaactggctacctggaccctgttatcggcagcagcgcgtttctaaaacaaaaacagacaacaacaacagcaattttacctggactggtgcttcaaaatataacctcaatgggcgtgaatccatcatcaaccctggcactgctatggcctcacacaaagacgacgaagacaagttctttcccatgagcggtgtcatgatttttggaaaagagagcgccggagcttcaaacactgcattggacaatgtcatgattacagacgaagaggaaattaaagccactaaccctgtggccaccgaaagatttgggaccgtggcagtcaatttccagagcagcagcacagaccctgcgaccggagatgtgcatgctatgggagcattacctggcatggtgtggcaagatagagacgtgtacctgcagggtcccatttgggccaaaattcctcacacagatggacactttcacccgtctcctcttatgggcggctttggactcaagaacccgcctcctcagatcctcatcaaaaacacgcctgttcctgcgaatcctccggcggagttttcagctacaaagtttgcttcattcatcacccaatactccacaggacaagtgagtgtggaaattgaatgggagctgcagaaagaaaacagcaagcgctggaatcccgaagtgcagtacacatccaattatgcaaaatctgccagcgttgattttactgtggacaacaatggactttatactgagcctcgccccattggcacccgttaccttacccgtcccctgtaa

SEQ ID NO: 264 - protein, 736 aa, Adeno-associated virus
MAADGYLPDWLEDTLSEGIRQWWKLRPGPPPPKPAERHKDDSRGLVLPGYKYLGPFNGLDKGEPVNEADAAALEHDKAYDRQLDSGDNPYLKYNHADAEFQERLKEDTSFGGNLGRAVFQAKKRVLEPLGLVEEGAETAPGKKRPVEQSPQGPDSSSGIGKTGQQPAKKRLNFGQTGDSESVPDPQPLGEPPATPAAVGPTTMASGGGAPMADNNEGADGVGNASGNWHCDSTWLGDRVITTSTRTWALPTYNNHLYKQISSASTGASNDNHYFGYSTPWGYFDFNRFHCHFSPRDWQRLINNNWGFRPKRLNFKLFNIQVKEVTTNDGVTTIANNLTSTVQVFSDSEYQLPYVLGSAHQGCLPPFPADVFMIPQYGYLTLNNGSQAVGRSSFYCLEYFPSQMLRTGNNFTFSYTFEEVPFHSSYAHSQSLDRLMNPLIDQYLYYPNRTQNQSGSAQNKDLLFSRGSPAGMSVQPKNWLPGPCYRQQRVSKTKTDNNNSNFTWTGASKYNLNGRESIINPGTAMASHKDDEDKFFPMSGVMIFGKESAGASNTALDNVMITDEEEIKATNPVATERFGTVAVNFQSSSTDPATGDVHAMGALPGMVWQGRDVYLQGPIWAKIPHTDGHFHPSPLMGGFGLKNPPPQILIKNTPVPANPPAEFSATKFASFITQYSTGQVSVEIEWELQKENSKRWNPEVQYTSNYAKSANVDFTVDNNGLYTEPRPIGTRYLTRPL

SEQ ID NO: 265 - DNA, 2211 bp, Adeno-associated virus
atggctgccgatggttatcttccagattggctcgaggacactctctctgaaggaataagacagtggtggaagctcagacctggcccaccaccaccaaagcccgcagagcggcataaggacgacagcaggggtcttgtgcttcctgggtacaagtacctcggacccttcaacggactcgacaagggagagccggtcaacgaggcagacgccgcggccctcgagcacgacaaagcctacgaccggcagctcgacagcggagacaacccgtacctcaagtacaaccacgccgacgcggagtttcaggagcgccttaaagaagatacgtcttttgggggcaacctcgggcgagcagtcttccaggccaagaagcgggttctcgaacctctcggtctggttgaggaaggcgctgagacggctcctggaaagaaacgtccggtagagcagtcgccacaagggccagactcctcctcgggcatcggcaagacaggccagcagcccgctaaaaagagactcaattttggtcagactggcgactcagagtcagtccccgatccacaacctctcggagaacctccagcaacccccgctgctgtgggacctactacaatggcttcaggcggtggcgcaccaatggcagacaataacgaaggcgccgacggagtgggtaatgcctcaggaaattggcattgcgattccacatggctgggcgacagagtcatcaccaccagcacccgcacctgggccttgcccacctacaataaccacctctacaagcaaatctccagtgcttcaacgggggccagcaacgacaaccactacttcggctacagcaccccctgggggtattttgatttcaacagattccactgccacttttcaccacgtgactggcagcgactcatcaacaacaattggggattccggcccaagagactcaacttcaaactcttcaacatccaagtcaaggaggtcacgacgaatgatggcgtcacaaccatcgctaataaccttaccagcacggttcaagtcttctcggactcggagtaccagcttccgtacgtcctcggctctgcgcaccagggctgcctccctccgttcccggcggacgtgttcatgattccgcaatacggctacctgacgctcaacaatggcagccaagccgtgggacgttcatccttttactgcctggaatatttcccttctcagatgctgagaacgggcaacaactttaccttcagctacacctttgaggaagtgcctttccacagcagctacgcgcacagccagagcctggaccggctgatgaatcctctcatcgaccaatacctgtattacccgaacagaactcaaaatcagtccggaagtgcccaaaacaaggacttgctgtttagccgtgggtctccagctggcatgtctgttcagcccaaaaactggctacctggaccctgttatcggcagcagcgcgtttctaaaacaaaaacagacaacaacaacagcaattttacctggactggtgcttcaaaatataacctcaatgggcgtgaatccatcatcaaccctggcactgctatggcctcacacaaagacgacgaagacaagttctttcccatgagcggtgtcatgatttttggaaaagagagcgccggagcttcaaacactgcattggacaatgtcatgattacagacgaagaggaaattaaagccactaaccctgtggccaccgaaagatttgggaccgtggcagtcaatttccagagcagcagcacagaccctgcgaccggagatgtgcatgctatgggagcattacctggcatggtgtggcaaggtagagacgtgtacctgcagggtcccatttgggccaaaattcctcacacagatggacactttcacccgtctcctcttatgggcggctttggactcaagaacccgcctcctcagatcctcatcaaaaacacgcctgttcctgcgaatcctccggcggagttttcagctacaaagtttgcttcattcatcacccaatactccacaggacaagtgagtgtggaaattgaatgggagctgcagaaagaaaacagcaagcgctggaatcccgaagtgcagtacacatccaattatgcaaaatctgccaacgttgattttactgtggacaacaatggactttatactgagcctcgccccattggcacccgttaccttacccgtcccctgtaa

SEQ ID NO: 266 - protein, 736 aa, Adeno-associated virus
MAADGYLPDWLEDTLSEGIRQWWKLRPGPPPPKPAERHKDDSRGLVLPGYKYLGPFNGLDKGEPVNEADAAALEHDKAYDRQLDSGDNPYLKYNHADAEFQERLKEDTSFGGNLGRAVFQAKKRVLEPLGLVEEGAKTAPGKKRPVEQSPQGPDSSSGIGKTGQQPAKKRLNFGQTGDSESVPDPQPLGEPPATPAAVGPTTMASGGGAPMADNNEGADGVGNASGNWHCDSTWLGDRVITTSTRTWALPTYNNHLYKQISSASTGASNDNHYFGYSTPWGYFDFNRFHCHFSPRDWQRLINNNWGFRPKRLNFKLFNIQVKEVTTNDGVTTIANNLTSTVQVFSDSEYQLPYVLGSAHQGCLPPFPADVFMIPQYGYLTLNNGSQAVGRSSFYCLEYFPSQMLRTGNNFTFSYTFEEVPFHSSYAHSQSLDRLMNPLIDQYLYYPNRTQNQSGSAQNKDLLFSRGSPAGMSVQPKNWLPGPCYRQQRVSKTKTDNNNSNFTWTGASKYNLNGRESIINPGTAMASHKDDEDKFFPMSGVMIFGKESAGASNTALDNVMITDEEEIKATNPVATERFGTVAVNFQSSSTDPATGDVHAMGALPGMVWQGRDVYLQGPIWAKIPHTDGHFHPSPLMGGFGLKNPPPQILIKNTPVPANPPAEFSATKFASFITQYSTGQVSVEIEWELQKENSKRWNPEVQYTSNYAKSANVDFTVDNNGLYTEPRPIGTRYLTRPL

SEQ ID NO: 267 - protein, 736 aa, Adeno-associated virus
MAADGYLPDWLEDTLSEGIRQWWKLRPGPPPPKPAERHKDDSRGLVLPGYKYLGPFNGLDKGEPVNEADAAALEHDKAYDRQLDSGDNPYLKYNHADAEFQERLKEDTSFGGNLGRAVFQAKKRVLEPLGLVEEGAKTAPGKKRPVEQSPQGPDSSSGIGKTGQQPAKKRLNFGQTGDSESVPDPQPLGEPPATPAAVGPTTMASGGGAPMADNNEGADGVGNASGNWHCDSTWLGDRVITTSTRTWALPTYNNHLYKQISSASTGASNDNHYFGYSTPWGYFDFNRFHCHFSPRDWQRLINNNWGFRPKRLNFKLFNIQVKEVTTNDGVTTIANNLTSTVQVFSDSEYQLPYVLGSAHQGCLPPFPADVFMIPQYGYLTLNNGSQAVGRSSFYCLEYFPSQMLRTGNNFTFSYTFEEVPFHSSYAHSQSLDRLMNPLIDQYLYYLNRTQNQSGSAQNKDLLFSRGSPAGMSVQPKNWLPGPCYRQQRVSKTKTDNNNSNFTWTGASKYNLNGRESIINPGTAMASHKDDEDKFFPMSGVMIFGKESAGASNTALDNVMITDEEEIKATNPVATERFGTVAVNFQSSSTDPATGDVHAMGALPGMVWQGRDVYLQGPIWAKIPHTDGHFHPSPLMGGFGLKNPPPQILIKNTPVPANPPAEFSATKFASFITQYSTGQVSVEIEWELQKENSKRWNPEVQYTSNYAKSANVDFTVDNNGLYTEPRPIGTRYLTRPL

SEQ ID NO: 268 - protein, 736 aa, Adeno-associated virus
MAADGYLPDWLEDTLSEGIRQWWKLRPGPPPPKPAERHKDDSRGLVLPGYKYLGPFNGLDKGEPVNEADAAALEHDKAYDRQLDSGDNPYLKYNHADAEFQERLKEDTSFGGNLGRAVFQAKKRVLEPLGLVEEGAKTAPGKKRPVEQSPQGPDSSSGIGKTGQQPAKKRLNFGQTGDSESVPDPQPLGEPPATPAAVGPTTMASGGGAPMADNNEGADGVGNASGNWHCDSTWLGDRVITTSTRTWALPTYNNHLYKQISSASTGASNDNHYFGYSTPWGYFDFNRFHCHFSPRDWQRLINNNWGFRPKRLNFKLFNIQVKEVTTNDGVTTIANNLTSTVQVFSDSEYQLPYVLGSAHQGCLPPFPADVFMIPQYGYLTLNNGSQAVGRSSFYCLEYFPSQMLRTGNNFTFSYTFEEVPFHSSYAHSQSLDRLMNPLIDQYLYYLNRTQNQSGSAQNKDLLFSRGSPAGMSVQPKNWLPGPCYRQQRVSKTKTDNNNSNFTWTGASKYNLNGRESIINPGTAMASHKDDEDKFFPMSGVMIFGKESAGASNTALDNVMITDEEEIKATNPVATERFGTVAVNFQSSSTDPATGDVHAMGALPGMVWQDRDVYLQGPIWAKIPHTDGHFHPSPLMGGFGLKNPPPQILIKNTPVPANPPAEFSATKFASFITQYSTGQVSVEIEWELQKENSKRWNPEVQYTSNYAKSANVDFTVDNNGLYTEPRPIGTRYLTRPL

SEQ ID NO: 269 - DNA, 2208 bp, Adeno-associated virus
atggctgccgatggctatcttccagattggctcgaggacactctctctgaaggaataagacagtggtggaagctcaaacctggcccaccaccaccaaagcccgcagagcggcatagggacgacagcaggggtcttgtgcttcctgggtacaagtacctcggacccttcaacggactcgacaagggagagccggtcaacgaggcagacgccgcggccctcgagcacgacaaagcctacgaccggcagctcgacagcggagacaacccgtacctcaagtacaaccacgccgacgcggagtttcaggagcgccttaaagaagatacgtcttttgggggcaacctcggacgagcagtcttccaggcgaaaaagagggttcttgaacctctgggcctggttgaggaacctgttaagacggctccgggaaaaaagaggccggtagagcactctcctgtggagccagactcctcctcgggaaccggaaaggcgggccagcagcctgcaagaaaaagattgaattttggtcagactggagacgcagactcagtacctgacccccagcctctcggacagccaccagcagccccctctggtctgggaactaatacgatggctacaggcagtggcgcaccaatggcagacaataacgagggcgccgacggagtgggtaattcctcgggaaattggcattgcgattccacatggatgggcgacagagtcatcaccaccagcacccgaacctgggccctgcccacctacaacaaccacctctacaaacaaatttccagccaatcaggagcctcgaacgacaatcactactttggctacagcaccccttgggggtattttgacttcaacagattccactgccacttttcaccacgtgactggcaaagactcatcaacaacaactggggattccgacccaagagactcaacttcaagctctttaacattcaagtcaaagaggtcacgcagaatgacggtacgacgacgattgccaataaccttaccagcacggttcaggtgtttactgactcggggtaccagctcccgtacgtcctcggctcggcgcatcaaggatgcctcccgccgttcccagcagacgtcttcatggtgccacagtatggataccccaccctgaacaacgggagtcaggcagtaggacgctcttcattttactgcctggagtactttccttctcagatgctgcgtaccggaaacaactttaccttcagctacacttttgaggacgttcctttccacagcagctacgctcacagccagagtctggaccgtctcatgaatcctctcatcgaccagtacctgtattacttgagcacaacaaacactccaagtggaaccaccacgcagtcaaggcttcagttttctcaggccggagcgagtgacattcgggaccagtctaggaactggcttcctggaccctgttaccgccagcagcgagtatcaaagacatctgcggataacaacaacagtgaatactcgtggactggagctaccaagtaccacctcaatggcagagactctctggtgaatccgggcccggccgtggcaagccacaaggacgatgaagaaaagttttttcctcagagcggggttctcatctttgggaagcaaggctcagagaaaacaaatgtggacattgaaaaggtcatgattacagacgaagaggaaatcaggacaaccaatcccgtggctacggagcagtatggttctgtatctaccaacctccagagaggcaacagacaagcagctaccgcagatgtcaacacacaaggcgttcttccaggcatggtctggcaggacagagatgtgtaccttcaggggcccatctgggcaaagattccacacacggacggacattttcacccctctcccctcatgggtggattcggacttaaacaccctcctccacagattctcatcaagaacaccccggtacctgcgaatccttcgaccaccttcagtgcggcaaagtttgcttccttcatcacacagtactccacgggacaggtcagcgtggagatcgagtgggagctgcagaaggaaaacagcaaacgctggaatcccgaaattcagtacacttccaactacaacaagtctgttaatgtggactttactgtggacactaatggcgtgtattcagagcctcgccccattggcaccagatacctgactcgtaatctgtaa

SEQ ID NO: 270 - protein, 735 aa, Adeno-associated virus
MAADGYLPDWLEDTLSEGIRQWWKLKPGPPPPKPAERHRDDSRGLVLPGYKYLGPFNGLDKGEPVNEADAAALEHDKAYDRQLDSGDNPYLKYNHADAEFQERLKEDTSFGGNLGRAVFQAKKRVLEPLGLVEEPVKTAPGKKRPVEHSPVEPDSSSGTGKAGQQPARKRLNFGQTGDADSVPDPQPLGQPPAAPSGLGTNTMATGSGAPMADNNEGADGVGNSSGNWHCDSTWMGDRVITTSTRTWALPTYNNHLYKQISSQSGASNDNHYFGYSTPWGYFDFNRFHCHFSPRDWQRLINNNWGFRPKRLNFKLFNIQVKEVTQNDGTTTIANNLTSTVQVFTDSGYQLPYVLGSAHQGCLPPFPADVFMVPQYGYPTLNNGSQAVGRSSFYCLEYFPSQMLRTGNNFTFSYTFEDVPFHSSYAHSQSLDRLMNPLIDQYLYYLSTTNTPSGTTTQSRLQFSQAGASDIRDQSRNWLPGPCYRQQRVSKTSADNNNSEYSWTGATKYHLNGRDSLVNPGPAVASHKDDEEKFFPQSGVLIFGKQGSEKTNVDIEKVMITDEEEIRTTNPVATEQYGSVSTNLQRGNRQAATADVNTQGVLPGMVWQDRDVYLQGPIWAKIPHTDGHFHPSPLMGGFGLKHPPPQILIKNTPVPANPSTTFSAAKFASFITQYSTGQVSVEIEWELQKENSKRWNPEIQYTSNYNKSVNVDFTVDTNGVYSEPRPIGTRYLTRNL

SEQ ID NO: 271 - DNA, 2211 bp, Adeno-associated virus
atggctgccgacggttatcttccagattggctcgaggacactctctctgaaggaataagacagtggtggaagctcaaacctggcccaccaccaccaaagcccgcagagcggcataaggacgacagcaggggtcttgtgcttcctgggtacaagtacctcggacccttcaacggactcgacaagggagagccggtcaacgaggcagacgccgcggccctcgagcacgacaaagcctacgaccggcagctcgacagcggagacaacccgtacctcaagtacaaccacgccgacgcggagtttcaggagcgccttaaagaagatacgtcttttgggggcaacctcgggcgggcagtcttccaggccaagaagcgggttctcgaacctctcggtctggttgaggaaggcgctaagacggctcctggaaagaaacgtccggtagagcagtcgccacaagagccagactccccctcgggcatcggcaagacaggccagcagcccgctaaaaagagactcaattttggtcagactggcgactcagagtcagtccccgatccacaacctctcggagaacctccagcaacccccgctgctgtgggacctactacaatggcttcaggcggtggcgcaccaatggcagacaataacgaaggcgccgacggagtgggtaatgcctcaggaaattggcactgcgattccacatggctgggcgacagagtcatcaccaccagcacccgcacctgggccttgcccacctacaataaccacctctacaagcaaatctccagtgcttcaacgggggccagcaacgacaaccactacttcggctacagcaccccctgggggtattttgatttcaacagattccactgccacttttcaccacgtgactggcagcgactcatcaacaacaattggggattccggcccaagagactcaacttcaaactcttcaacatccaagtcaaggaggtcacgacgaatgatggcgtcacaaccatcgctaataaccttaccagcacggttcaagtcttctcggactcggagtaccagcttccgtacgtcctcggctctgcgcaccagggccgcctccctccgttcccggcggacgtgttcatgattccgcaatacggctacctgacgctcaacaatggcagccaagccgtgggacgttcatcctcttactgcctggaatatttcccttctcagatgctgagaacgggcaacaactttaccttcagctacacctttgaggaagtgcctctccacagcagctgcgcgcacagccagagcctggaccggctgatgaatcctctcatcgaccaatacctgtattacctgaacagaactcaaaatcagtccggaagtgcccaaaacagggacttgctgttcagccgtgggtctccagctggcatgtctgttcagcccaaaaactggctacctggaccctgttatcggcagcagcgcgtttctaaaacaaaaacagacaacaacaacagcaattttacctggactggtgcttcaaaatataacctcaatgggcgtgaatccatcatcaaccctggcactgctatggcctcacacaaagacgacgaagacaagttctttcccatgagcggtgtcatgatttttggaaaagagagcgccggagcttcaaacactgcattggacaatgtcatgattacagacgaagaggaaattaaagccactaaccctgtggccaccgaaagatttgggaccgtggcagtcaatttccagagcagcagcacagaccctgcgaccggagatgtgcatgctatgggagcattacctggcatggtgtggcaagatagagacgtgtacctgcagggtcccatttgggccaaaattcctcacacagatggacactttcacccgtctcctcttatgggcggctttggactcaagaacccgcctcctcagatcctcatcaaaaacacgcctgttcctgcgaatcctccggcggagttttcagctacaaagtttgcttcattcatcacccaatactccgcaggacaagtgagtgtggaaattgaatgggagctgcagaaagaaaacagcaagcgctggaatcccgaagtgcagtacacatccaattatgcaaaatctgccaacgttgattttactgtggacaacaatggactttatactgagcctcgccccattggcacccgttaccttacccgtcccctgtaa

SEQ ID NO: 272 - protein, 736 aa, Adeno-associated virus
MAADGYLPDWLEDTLSEGIRQWWKLKPGPPPPKPAERHKDDSRGLVLPGYKYLGPFNGLDKGEPVNEADAAALEHDKAYDRQLDSGDNPYLKYNHADAEFQERLKEDTSFGGNLGRAVFQAKKRVLEPLGLVEEGAKTAPGKKRPVEQSPQEPDSPSGIGKTGQQPAKKRLNFGQTGDSESVPDPQPLGEPPATPAAVGPTTMASGGGAPMADNNEGADGVGNASGNWHCDSTWLGDRVITTSTRTWALPTYNNHLYKQISSASTGASNDNHYFGYSTPWGYFDFNRFHCHFSPRDWQRLINNNWGFRPKRLNFKLFNIQVKEVTTNDGVTTIANNLTSTVQVFSDSEYQLPYVLGSAHQGRLPPFPADVFMIPQYGYLTLNNGSQAVGRSSSYCLEYFPSQMLRTGNNFTFSYTFEEVPLHSSCAHSQSLDRLMNPLIDQYLYYLNRTQNQSGSAQNRDLLFSRGSPAGMSVQPKNWLPGPCYRQQRVSKTKTDNNNSNFTWTGASKYNLNGRESIINPGTAMASHKDDEDKFFPMSGVMIFGKESAGASNTALDNVMITDEEEIKATNPVATERFGTVAVNFQSSSTDPATGDVHAMGALPGMVWQDRDVYLQGPIWAKIPHTDGHFHPSPLMGGFGLKNPPPQILIKNTPVPANPPAEFSATKFASFITQYSAGQVSVEIEWELQKENSKRWNPEVQYTSNYAKSANVDFTVDNNGLYTEPRPIGTRYLTRPL

SEQ ID NO: 273 - protein, 736 aa, Adeno-associated virus
MAADGYLPDWLEDTLSEGIRQWWKLKPGPPPPKPAERHKDDSRGLVLPGYKYLGPFNGLDKGEPVNEADAAALEHDKAYDRQLDSGDNPYLKYNHADAEFQERLKEDTSFGGNLGRAVFQAKKRVLEPLGLVEEGAKTAPGKKRPVEQSPQEPDSSSGIGKTGQQPAKKRLNFGQTGDSESVPDPQPLGEPPATPAAVGPTTMASGGGAPMADNNEGADGVGNASGNWHCDSTWLGDRVITTSTRTWALPTYNNHLYKQISSASTGASNDNHYFGYSTPWGYFDFNRFHCHFSPRDWQRLINNNWGFRPKRLNFKLFNIQVKEVTTNDGVTTIANNLTSTVQVFSDSEYQLPYVLGSAHQGCLPPFPADVFMIPQYGYLTLNNGSQAVGRSSFYCLEYFPSQMLRTGNNFTFSYTFEEVPLHSSCAHSQSLDRLMNPLIDQYLYYLNRTQNQSGSAQNRDLLFSRGSPAGMSVQPKNWLPGPCYRQQRVSKTKTDNNNSNFTWTGASKYNLNGRESIINPGTAMASHKDDEDKFFPMSGVMIFGKESAGASNTALDNVMITDEEEIKATNPVATERFGTVAVNFQSSSTDPATGDVHAMGALPGMVWQDRDVYLQGPIWAKIPHTDGHFHPSPLMGGFGLKNPPPQILIKNTPVPANPPAEFSATKFASFITQYSTGQVSVEIEWELQKENSKRWNPEVQYTSNYAKSANVDFTVDNNGLYTEPRPIGTRYLTRPL

SEQ ID NO: 274 - DNA, 2208 bp, Adeno-associated virus
atggctgccgatggctatcttccagattggctcgaggacactctctctgaaggaataagacagtggtggaagctcaaacctggcccaccaccaccaaagcccgcagagcggcatagggacgacagcaggggtcttgtgcttcctgggtacaagtacctcggacccttcaacggactcgacaagggagagccggtcaacgaggcagacgccgcggccctcgagcacgacaaagcctacgaccggcagctcgacagcggagacaacccgtacctcaagtacaaccacgccgacgcggagtttcaggagcgccttaaagaagatacgtcttttgggggcaacctcggacgagcagtcttccaggcgaaaaagagggttcttgaacctctgggcctggttggggaacctgttaagacggctccgggaaaaaagaggccggtagagcactctcctgtggagccagactcctcctcgggaaccggaaaggcgggccagcagcctgcaagaaaaagattgaattttggtcagactggagacgcagactcagtacctgacccccagcctctcggacagccaccagcagccccctctggtctgggaactaatacgatggctacaggcagtggcgcaccaatggcagacaataacgagggcgccgacggagtgggtaattcctcgggaaattggcattgcgattccacatggatgggcgacagagtcatcaccaccagcacccgaacctgggccctgcccacctacaacaaccacctctacaaacaaatttccagccaatcaggagcctcgaacgacagtcactactttggctacagcaccccttgggggtattttgacttcaacagattccactgccacttttcaccacgtgactggcaaagactcatcaacaacaactggggattccgacccaagagactcaacttcaagctctttaacattcaagtcaaagaggtcacgcagaatgacggtacgacgacgattgccaataaccttaccagcacggttcaggtgtttactgactcggagtaccagctcccgtacgtcctcggctcggcgcatcaaggatgcctcccgccgttcccagcagacgtcttcatggtgccacagtatggatacctcaccctgaacaacgggagtcaggcagtaggacgctcttcattttactgcctggagtactttccttctcagatgctgcgtaccggaaacaactttaccttcagctacacttttgaggacgttcctttccacagcagctacgctcacagccagagtctggaccgtctcatgaatcctctcatcgaccagtacctgtattacttgagcacaacaaacactccaagtggaaccaccacgcagtcaaggctccagttttctcaggccggagcgagtgacattcgggaccagtctaggaactggcttcctggaccctgttaccgccagcagcgagtatcaaagacatctgcggataacaacaacagtgaatactcgtggactggagctaccaagtaccacctcaatggcagagactctctggtgaatccgggcccggccatggcaagccacaaggacaatgaagaaaagttttttcctcagagcggggttctcatctttgggaagcaaggctcagagaaaacaaatgtggacattgaaaaggtcatgattacagacgaagaggaaatcaggacaaccaatcccgtggctacggagcagtatggttctgtatctaccaacctccagagaggcaacagacaagcagctaccgcagatgtcaacacacaaggcgttcttccaggcatggtctggcaggacagagatgtgtaccttcaggggcccatctgggcaaagattccacacacggacggacattttcacccctctcccctcatgggtggattcggacttaaacaccctcctccacagattctcatcaagaacaccccggtacctgcgaatccttcgaccaccttcagtgcggcaaagtttgcttccttcatcacacagtactccacgggacaggtcagcgtggagatcgagtgggagctgcagaaggaaaacagcaaacgctggaatcccgaaattcagtacacttccaactacaacaagtctgttaatgtggactttactgtggacactaatggcgtgtattcagagcctcgccccattggcaccagatacctgactcgtaatctgtaa

SEQ ID NO: 275 - protein, 735 aa, Adeno-associated virus
MAADGYLPDWLEDTLSEGIRQWWKLKPGPPPPKPAERHRDDSRGLVLPGYKYLGPFNGLDKGEPVNEADAAALEHDKAYDRQLDSGDNPYLKYNHADAEFQERLKEDTSFGGNLGRAVFQAKKRVLEPLGLVGEPVKTAPGKKRPVEHSPVEPDSSSGTGKAGQQPARKRLNFGQTGDADSVPDPQPLGQPPAAPSGLGTNTMATGSGAPMADNNEGADGVGNSSGNWHCDSTWMGDRVITTSTRTWALPTYNNHLYKQISSQSGASNDSHYFGYSTPWGYFDFNRFHCHFSPRDWQRLINNNWGFRPKRLNFKLFNIQVKEVTQNDGTTTIANNLTSTVQVFTDSEYQLPYVLGSAHQGCLPPFPADVFMVPQYGYLTLNNGSQAVGRSSFYCLEYFPSQMLRTGNNFTFSYTFEDVPFHSSYAHSQSLDRLMNPLIDQYLYYLSTTNTPSGTTTQSRLQFSQAGASDIRDQSRNWLPGPCYRQQRVSKTSADNNNSEYSWTGATKYHLNGRDSLVNPGPAMASHKDNEEKFFPQSGVLIFGKQGSEKTNVDIEKVMITDEEEIRTTNPVATEQYGSVSTNLQRGNRQAATADVNTQGVLPGMVWQDRDVYLQGPIWAKIPHTDGHFHPSPLMGGFGLKHPPPQILIKNTPVPANPSTTFSAAKFASFITQYSTGQVSVEIEWELQKENSKRWNPEIQYTSNYNKSVNVDFTVDTNGVYSEPRPIGTRYLTRNL

SEQ ID NO: 276 - protein, 737 aa, Adeno-associated virus
RMAADGYLPDWLEDNLSEGIREWWDLKPGAPKPKANQQKQDDGRGLVLPGYKYLGPFNGLDKGEPVNAADAAALEHDKAYDQQLKAGDNPYLRYNHADAEFQERLQEDTSFGGNLGRAVFQAKKRVLEPLGLVEEGAKTAPGKKRPVEQSPQEPDSSSGIGKTGQQPAKKRLNFGQTGDSESVPDPQPLGEPPATPAAVGPTTMASGGGAPMADNNEGADGVGNASGNWHCDSTWLGDRVITTSTRTWALPTYNNHLYKQISSTSTGASNDNHYFGYGTPWGYFDFNRFHCHFSPRDWQRLINNNWGFRPKRLNFKLFNIQVEEVTTNDGVTTIANNLTSTVQVFSDSEYQLPYVLGSAHQGCLPPFPADVFMIPQYGYLTLNNGSQAVGRSSFYCLEYFPSQMLRTGNNFTFSYTFEEVPFHSSYAHSQSLDRLMNPLIDQYLYYLNRTQNQSGSAQNKDLLFSRGSPAGMSVQPKNWLPGPCYRQQRVSKTKTDNNNSNFTWTGASKYNLNGRESIINPGTAVASHKDDEDKFFPMSGVMIFGKESAGASSTALDNVMITDEEEIKATNPVATERFGTVAVNFQSSSTDPATGDVHAMGALPGMVWQDRDVYLQGPIWAKIPHTDGHFHPSPLMGGFGLKNPPPQILIKNTPVPANPPAEFSATKFASFITQYSTGQVSVEIEWELQKENSKRWNPEVQYTSNYAKSANVDFTVDNNGLYTEPRPIGTRYLTRPL

SEQ ID NO: 277 - protein, 736 aa, Adeno-associated virus
MAADGYLPDWLEDNLSEGIREWWDLKPGAPKPKANQQKQDDGRGLVLPGYKYLGPFNGLDKGEPVNAADAAALEHDKAYDQQLKAGDNPYLRYNHADAEFQERLQEDTSFGGNLGRAVFQAKKRVLEPLGLVEEGAKTAPGKKRPVEQSPQEPDSSSGIGKTGQQPAKKRLNFGQTGDSESVPDPQPLGEPPATPAAVGPTTMASGGGAPMADNNEGADGVGNASGNWHCDSTWLGDRVITTSTRTWALPTYNNHLYKQISSTSTGASNDNHYFGYGTPWGYFDFNRFHCHFSPRDWQRLINNNWGFRPKRLNFKLFNIQVEEVTTNDGVTTIANNLTSTVQVFSDSEYQLPYVLGSAHQGCLPPFPADVFMIPQYGYLTLNNGSQAVGRSSFYCLEYFPSQMLRTGNNFTFSYTFEEVPFHSSYAHSQSLDRLMNPLIDQYLYYLNRTQNQSGSAQNKDLLFSRGSPAGMSVQPKNWLPGPCYRQQRVSKTKTDNNNSNFTWTGASKYNLNGRESIINPGTAVASHKDDEDKFFPMSGVMIFGKESAGASSTALDNVMITDEEEIKATNPVATERFGTVAVNFQSSSTDPATGDVHAMGALPGMVWQDRDVYLQGPIWAKIPHTDGHFHPSPLMGGFGLKNPPPQILIKNTPVPANPPAEFSATKFASFITQYSTGQVSVEIEWELQKENSKRWNPEVQYTSNYAKSANVDFTVDNNGLYTEPRPIGTRYLTRPL

SEQ ID NO: 278 - DNA, 2211 bp, Adeno-associated virus
atggctgccgatggttatcttccagattggctcgaggacaacctctctgagggcattcgcgagtggtgggacttgaaacctggagccccgaagcccaaagccaaccagcaaaagcaggacgacggccggggtctggtgcttcctggctacaagtacctcggacccttcaacggactcgacaagggggagcccgtcaacgcggcggacgcagcggccctcgagcacgacaaggcctacgaccagcagctcaaagcgggtgacaatccgtacctgcggtataaccacgccgacgccgagtttcaggagcgtctgcaagaagatacgtcttttgggggcaacctcgggcgagcagtcttccaggccaagaagcgggttctcgaacctctcggtctggttgaggaaggcgctaagacggctcctggaaagaaacgtccggtagagcagtcgccacaagagccagactcctcctcgggcatcggcaagacaggccagcagcccgctaaaaagagactcaattttggccagactggcgactcagagtcagtccccgatccacaacctctcggagaacctccagcaacccccgctgctgtgggacctactacaatggcttcaggcggtggcgcaccaatggcagacaataacgaaggcgccgacggagtgggtaatgcctcaggaaattggcattgcgattccacatggctgggcgacagagtcatcaccaccagcacccgcacctgggccttgcccacctacaataaccacctctacaagcaaatctccagtacttcaacgggggccagcaacgacaaccactacttcggctacggcaccccctgggggtattttgatttcaacagattccactgccacttttcaccacgtgactggcagcgactcatcaacaacaattggggattccggcccaagagactcaacttcaaactcttcaacatccaagtcgaggaggtcacgacgaatgatggcgtcacaaccatcgctaataaccttaccagcacggttcaagtcttctcggactcggagtaccagcttccgtacgtcctcggctctgcgcaccagggctgcctccctccgttcccggcggacgtgttcatgattccgcaatacggctacctgacgctcaacaatggcagccaagccgtgggacgttcatccttttactgcctggaatatttcccttctcagatgctgagaacgggcaacaactttaccttcagctacacctttgaggaagtgcctttccacagcagctacgcgcacagccagagcctggaccggctgatgaatcctctcatcgaccaatacctgtattacctgaacagaacacaaaatcagtccggaagtgcccaaaacaaggacttgctgtttagccgtgggtctccagctggcatgtctgttcagcccaaaaactggctacctggaccctgttatcggcagcagcgcgtttctaaaacaaaaacagacaacaacaacagcaattttacctggactggtgcttcaaaatataacctcaatgggcgtgaatccatcatcaaccctggcaccgctgtggcctcacacaaagacgacgaagacaagttctttcccatgagcggtgtcatgatttttggaaaagagagcgccggagcttcaagcactgcattggacaatgtcatgattacagacgaagaggaaattaaagccactaaccctgtggccaccgaaagatttgggaccgtggcagtcaatttccagagcagcagcacagaccctgcgaccggagatgtgcatgctatgggagcattacctggcatggtgtggcaagatagagacgtgtacctgcagggtcccatttgggccaaaattcctcacacagatggacactttcacccgtctcctcttatgggcggctttggactcaagaacccgcctcctcagatcctcatcaaaaacacgcctgttcctgcgaatcctccggcggagttttcagctacaaagtttgcttcattcatcacccaatactccacaggacaagtgagtgtggaaattgaatgggagctgcagaaagaaaacagcaagcgctggaatcccgaagtgcagtacacatccaattatgcaaaatctgccaacgttgattttactgtggacaacaatggactttatactgagcctcgccccattggcacccgttaccttacccgtcccctgtaa

SEQ ID NO: 279 - protein, 737 aa, Adeno-associated virus
RMAADGYLPDWLEDNLSEGIREWWDLKPGAPKPKANQQKQDDGRGLVLPGYKYLGPFNGLDKGEPVNAADAAALEHDKAYDQQLKAGDNPYLRYNHADAEFQERLQEDTSFGGNLGRAVFQAKKRVLEPLGLVEEGAKTAPGKKRPVEQSPQEPDSSSGIGKTGQQPAKKRLNFGQTGDSESVPDPQPLGEPPATPAAVGPTTMASGGGAPMADNNEGADGVGNASGNWHCDSTWLGDRVITTSTRTWALPTYNNHLYKQISSTSTGASNDNHYFGYSTPWGYFDFNRFHCHFSPRDWQRLINNNWGFRPKRLNFKLFNIQVEEVTTNDGVTTIANNLTSTVQVFSDSEYQLPYVLGSAHQGCLPPFPADVFMIPQYGYLTLNNGSQAVGRSSFYCLEYFPSQMLRTGNNFTFSYTFEEVPFHSSYAHSQSLDRLMNPLIDQYLYYLNRTQNQSGSAQNKDLLFSRGSPAGMSVQPKNWLPGPCYRQQRVSKTKTDNNNSNFTWTGASKYNLNGRESIINPGTAVASHKDDEDKFFPMSGVMIFGKESAGASSTALDNVMITDEEEIKATNPVATERFGTVAVNFQSSSTDPATGDVHAMGALPGMVWQDRDVYLQGPIWAKIPHTDGHFHPSPLMGGFGLKNPPPQILIKNTPVPANPPAEFSATKFASFITQYSTGQVSVEIEWELQKENSKRWNPEVQYTSNYAKSANVDFTVDNNGLYTEPRPIGTRYLTRPL

SEQ ID NO: 280 - protein, 737 aa, Adeno-associated virus
RMAADGYLPDWLEDNLSEGIREWWDLKPGAPKPKANQQKQDDGRGLVLPGYKYLGPFNGLDKGEPVNAADAAALEHDKAYDQQLKAGDNPYLRYNHADAEFQERLQEDTSFGGNLGRAVFQAKKRVLEPLGLVEEGAKTAPGKKRPVEQSPQEPDSSSGIGKTGQQPAKKRLNFGQTGDSESVPDPQPLGEPPATPAAVGPTTMASGGGAPMADNNEGADGVGNASGNWHCDSTWLGDRVITTSTRTWALPTYNNHLYKQISSTSTGASNDNHYFGYSTPWGYFDFNRFHCHFSPRDWQRLINNNWGFRPKRLNFKLFNIQVKEVTTNDGVTTIANNLTSTVQVFSDSEYQLPYVLGSAHQGCLPPFPADVFMIPQYGYLTLNNGSQAVGRSSFYCLEYFPSQMLRTGNNFTFSYTFEEVPFHSSYAHSQSLDRLMNPLIDQYLYYLNRTQNQSGSAQNKDLLFSRGSPAGMSVQPKNWLPGPCYRQQRVSKTKTDNNNSNFTWTGASKYNLNGRESIINPGTAVASHKDDEDKFFPMSGVMIFGKESAGASSTALDNVMITDEEEIKATNPVATERFGTVAVNFQSSSTDPATGDVHAMGALPGMVWQDRDVYLQGPIWAKIPHTDGHFHPSPLMGGFGLKNPPPQILIKNTPVPANPPAEFSATKFASFITQYSTGQVSVEIEWELQKENSKRWNPEVQYTSNYAKSANVDFTVDNNGLYTEPRPIGTRYLTRPL

SEQ ID NO: 281 - protein, 737 aa, Adeno-associated virus
RMAADGYLPDWLEDNLSEGIREWWDLKPGAPKPKANQQKQDDGRGLVLPGYKYLGPFNGLDKGEPVNAADAAALEHDKAYDQQLKAGDNPYLRYNHADAEFQERLQEDTSFGGNLGRAVFQAKKRVLEPLGLVEEGAKTAPGKKRPVEQSPQEPDSSSGIGKTGQQPAKKRLNFGQTGDSESVPDPQPLGEPPATPAAVGPTTMASGGGAPMADNNEGADGVGNASGNWHCDSTWLGDRVITTSTRTWALPTYNNHLYKQISSTSTGASNDNHYFGYSTPWGYFDFNRFHCHFSPRDWQRLINNNWGFRPKRLNFKLFNIQVKEVTTNDGVTTIANNLTSTVQVFSDSEYQLPYVLGSAHQGCLPPFPADVFMIPQYGYLTLNNGSQAVGRSSFYCLEYFPSQMLRTGNNFTFSYTFEEVPFHSSYAHSQSLDRLMNPLIDQYLYYLNRTQNQSGSAQNKDLLFSRGSPAGMSVQPKNWLPGPCYRQQRVSKTKTDNNNSNFTWTGASKYNLNGRESIINPGTAVASHKDDEDKFFPMSGVMIFGKESAGANSTALDNVMITDEEEIKATNPVATERFGTVAVNFQSSSTDPATGDVHAMGALPGMVWQDRDVYLQGPIWAKIPHTDGHFHPSPLMGGFGLKNPPPQILIKNTPVPANPPAEFSATKFASFITQYSTGQVSVEIEWELQKENSKRWNPEVQYTSNYAKSANVDFTVDNNGLYTEPRPIGTRYLTRPL

SEQ ID NO: 282 - DNA, 2208 bp, Adeno-associated virus
atggctgccgatggttatcttccagattggctcaaggacactctctctgaaggaataagacagtggtggaagctcaaacctggcccaccaccaccaaagcccgcagagcggcataaggacgacagcgggggtcttgtgcttcctgggtacaagtacctcggacccttcaacggactcgacaagggagagccggtcaacgaggcagacgccgcggccctcgagtacgacaaggcctacgaccggcagctcgacagcggagacaacccgtacctcaagtacaaccacgccgacgcggagtttcaggagcgccttaaagaagatacgtcttttgggggcaacctcggacgagcagtcttccaggcgaaaaagagggttcttgaacctctgggcctggttgaggaacctgttaagacggctccgggaaaaaagaggccggtagagcactctcctgtggagccagactcctcctcgggaacaggaaaagcgggccagcagcctgcgagaaagagattgaattttggtcagactggagacgcagactccgtacctgacccccagcctctcggacagccaccagcagccccctctggtctgggaactaatacgatggctacaggcagtggcgcaccaatggcagacaataacgagggcgccgacggagtgggtaattcctcgggaagttggcattgcgattccacatggatgggcgacagagtcatcaccaccagcacccgaacctgggctctgcccacctacaacaaccatctgtacaagcagatctccagccaatcaggagccagcaacgacaaccactactttggctacagcaccccttgggggtattttgacttcaacagattccactgccacttttcaccacgtgactggcaaagactcatcaacaacaactggggattccggcccaagagactcaacttcaagctctttaacattcaagtcaaggaggtcacgcagaatgacggtacgacgacgattgccaataaccttaccagcacggttcaggtgtttactgactcggagtaccagctcccgtacgtccccggctcggcgcatcaaggatgcctcccgccgttcccagcagacgtcttcatggtgccacagtatggatacctcaccctgaacaacgggagtcaggcagtaggacgctcttcattttactgcctggagtactttccttctcagatgcttcgtaccggaaacaactttaccttcagctacacctttgaggatgttcctttccacagcagctacgctcacagccagagtttggaccgtctcatgaatcctctcatcgaccagtacctgtattacttgagcagaacaaacactccaagcggaaccaccacgcagtccaggcttcagttttctcaggccggagcaagtgacattcgggaccagtctaggaactggcttcctggaccctgttaccgccagcagcgagtatcaaagacagctgcggacaacaacaacagtgaatactcgtggactggagctaccaagtaccacctcaatggcagagactctctggtgaatccgggcccggccatggccagccacaaggacgatgaagaaaagttttttcctcaaagcggggttctcatctttgggaagcaaggctcagagaaaacaaatgtggacattgaaaaggtcatgattacagacgaagaggaaatcagaaccaccaatcccgtggccacggagcagtatggttctgtatctaccaacctccagagcggcaacacacaagcagctactgcagatgtcaacacacaaggcgttcttccaggcatggtctggcaggacagagacgtgcacctgcaggggcctatctgggcaaagattccacacacggacggacattttcacccctctcccctcatgggcggatttggacttaaacaccctcctccacagattctcatcaagaacaccccggtacctgcaaatccttcgaccaccttcagtgcggcaaagtttgcttccttcatcacacagtattccacagggcaggtcagcgtggagatcgagtgggagctgcagaaggagaacagcaaacgctggaaccccgagatccagtacacttccaactacaacaaatctgttaatgtggactttactgtggacactaatggtgtgtattcagagcctcgccccattggcaccagatacctgactcgtaatctgtaa

SEQ ID NO: 283 - protein, 735 aa, Adeno-associated virus
MAADGYLPDWLKDTLSEGIRQWWKLKPGPPPPKPAERHKDDSGGLVLPGYKYLGPFNGLDKGEPVNEADAAALEYDKAYDRQLDSGDNPYLKYNHADAEFQERLKEDTSFGGNLGRAVFQAKKRVLEPLGLVEEPVKTAPGKKRPVEHSPVEPDSSSGTGKAGQQPARKRLNFGQTGDADSVPDPQPLGQPPAAPSGLGTNTMATGSGAPMADNNEGADGVGNSSGSWHCDSTWMGDRVITTSTRTWALPTYNNHLYKQISSQSGASNDNHYFGYSTPWGYFDFNRFHCHFSPRDWQRLINNNWGFRPKRLNFKLFNIQVKEVTQNDGTTTIANNLTSTVQVFTDSEYQLPYVPGSAHQGCLPPFPADVFMVPQYGYLTLNNGSQAVGRSSFYCLEYFPSQMLRTGNNFTFSYTFEDVPFHSSYAHSQSLDRLMNPLIDQYLYYLSRTNTPSGTTTQSRLQFSQAGASDIRDQSRNWLPGPCYRQQRVSKTAADNNNSEYSWTGATKYHLNGRDSLVNPGPAMASHKDDEEKFFPQSGVLIFGKQGSEKTNVDIEKVMITDEEEIRTTNPVATEQYGSVSTNLQSGNTQAATADVNTQGVLPGMVWQDRDVHLQGPIWAKIPHTDGHFHPSPLMGGFGLKHPPPQILIKNTPVPANPSTTFSAAKFASFITQYSTGQVSVEIEWELQKENSKRWNPEIQYTSNYNKSVNVDFTVDTNGVYSEPRPIGTRYLTRNL

SEQ ID NO: 284 - DNA, 2208 bp, Adeno-associated virus
atggctgccgatggttatcttccagattggctcgaggacactctctctgaaggaataagacagtggtggaagctcaaacctggcccaccaccaccaaagcccgcagagcggcataaggacgacagcaggggtcttgtgcttcctgggtacaagtacctcggacccttcaacggactcgacaagggggagccggtcaacgaggcagacgccgcggccctcgagcacgacaaggcctacgaccggcagctcgacagcggagacaacccgtacctcaagtacaaccacgccgacgcagagtttcaggagcgccttaaagaagatacgtcttttgggggcaacctcggacgagcagtcttccaggcgaaaaagagggttcttgaacctctgggcctggttgaggaacctgttaagacggctccgggaaaaaagaggccggtagagcactctcctgtggagccagactcctcctcgggaaccggaaaagcgggccagcagcctgcaagaaaaagattaaattttggtcagactggagacgcagactccgtacctgacccccagcctctcggacagccaccagcagccccctctggtctgggatctactacaatggctacaggcagtggcgcaccaatggcagacaataacgagggtgccgatggagtgggtaattcctcaggaaattggcattgcgattcccaatggctgggcgacagagtcatcaccaccagcacccgaacctgggccctgcccacatacaacaaccacctctacaagcaaatctccagccaatcaggagccagcaacgacaaccactactttggctacagcaccccctgggggtattttgacttcaacagattccactgccacttttcaccacgtgactggcaaagactcatcaacaacaactggggattccggcccaaaagactcaacttcaagctctttaatattcaagtcaaagaggtcacgcagaatgacggtacgacgacgattgccaataaccttaccagcacggttcaggtgtttactgactcggagtaccagctcccgtacgtcctgggctcggcgcatcaaggatgcctcccgccgtttccagcggacgtcttcatggtcccacagtatggatacctcaccctgaacaacgggagtcaggcggtaggacgctcttccttttactgcctggagtactttccttctcagatgctgcgtactggaaacaactttcagttcagctacacttttgaagacgtgcctttccacagcagctacgctcacagccagagtctggatcggctgatgaatcctctgatcgaccagtacctgtattatctgaacaagacacaaacaaatagtggaactcttcagcagtctcggctactgtttagccaagctggaccaaccaacatgtctcttcaagctaaaaactggctgcctggaccttgctacagacagcagcgtctgtcaaaacaggcaaacgacaacaacaacagcaactttccctggactgcagctacaaagtatcatctaaatggccgggactcgttggttaatccaggaccagctatggccagtcgcaaggatgacgaagaaaagtttttccccatgcatggaaccctgatatttggtaaacaaggaacaaatgccaacgacgcggatttggaaaatgtcatgattacagatgaagaagaaatcagggccaccaatcccgtggctacggagcagtacgggactgtgtcaaataatttgcaaaactcaaacactggtccaactactggaactgtcaatcaccaaggagcgttacctggtatggtgtggcaggatcgagacgtgtacctgcagggacccatttgggccaagattcctcacaccgatggacactttcatccttctccactgatgggaggttttggactcaaacacccgcctcctcagatcatgatcaaaaacactcccgttccagccaatcctcccacaaacttcagttctgccaagtttgcttctttcatcacacagtattccacgggacaggtcagcgtggagatcgagtgggagctgcagaaggagaacagcaaacgctggaatcccgaaattcagtacacttccaactacaacaagtctgttaatgtggactttactgtggacactaatggtgtgtattcagagcctcgccccattggcaccagatacctgactcgtaatctgtaa

SEQ ID NO: 285 - protein, 735 aa, Adeno-associated virus
MAADGYLPDWLEDTLSEGIRQWWKLKPGPPPPKPAERHKDDSRGLVLPGYKYLGPFNGLDKGEPVNEADAAALEHDKAYDRQLDSGDNPYLKYNHADAEFQERLKEDTSFGGNLGRAVFQAKKRVLEPLGLVEEPVKTAPGKKRPVEHSPVEPDSSSGTGKAGQQPARKRLNFGQTGDADSVPDPQPLGQPPAAPSGLGSTTMATGSGAPMADNNEGADGVGNSSGNWHCDSQWLGDRVITTSTRTWALPTYNNHLYKQISSQSGASNDNHYFGYSTPWGYFDFNRFHCHFSPRDWQRLINNNWGFRPKRLNFKLFNIQVKEVTQNDGTTTIANNLTSTVQVFTDSEYQLPYVLGSAHQGCLPPFPADVFMVPQYGYLTLNNGSQAVGRSSFYCLEYFPSQMLRTGNNFQFSYTFEDVPFHSSYAHSQSLDRLMNPLIDQYLYYLNKTQTNSGTLQQSRLLFSQAGPTNMSLQAKNWLPGPCYRQQRLSKQANDNNNSNFPWTAATKYHLNGRDSLVNPGPAMASRKDDEEKFFPMHGTLIFGKQGTNANDADLENVMITDEEEIRATNPVATEQYGTVSNNLQNSNTGPTTGTVNHQGALPGMVWQDRDVYLQGPIWAKIPHTDGHFHPSPLMGGFGLKHPPPQIMIKNTPVPANPPTNFSSAKFASFITQYSTGQVSVEIEWELQKENSKRWNPEIQYTSNYNKSVNVDFTVDTNGVYSEPRPIGTRYLTRNL

SEQ ID NO: 286 - DNA, 2208 bp, Adeno-associated virus
atggctgccgatggttatcttccagattggctcgaggacactctctctgaaggaataagacagtggtggaagctcaaacctggcccaccaccaccaaagcccgcagagcggcataaggacgacagcaggggtcttgtgcttcctgggtacaagtacctcggacccttcaacggactcgacaagggagagccggtcaacgaggcagacgccgcggccctcgagcacgacaaagcctacgaccggcagctcgacagcggagacaacccgtacctcaagtacaaccacgccgacgcggagtttcaggagcgccttaaagaagatacgtcttttgggggcaacctcggacgagcagtcttccaggcgaaaaagagggttcttgaacctctgggcctggttggggaacctgtcaagacggctccaggaaaaaagaggccggtagagcactctcctgtggagccagactcctcctcgggaaccggaaaggcgggccagcagcctgcaagaaaaagattgaattttggtcagactggagacgcagactcagtacctgacccccagcctctcggacagccaccagcagccccctctggtctgggaactaatacgatggctacaggcagtggcgcaccaatggcagacaataacgagggcgccgacggagtgggtaattcctcgggaaattggcattgcgattccacatggatgggcgacagagtcatcaccaccagcacccgaacctgggccctgcccacctacaacaaccacctctacaaacaaatttccagccaatcaggagcctcgaacgacaatcactactttggctacagcaccccttgggggtattttgacttcaacagattccactgccacttttcaccacgtgactggcaaagactcatcaacaacaactggggattccgacccaagagactcaacttcaagctctttaacattcaagtcaaagaggtcacgcagaatgacggtacgacgacgattgccaataaccttaccagcacggttcaggtgtttactgactcggagtaccagctcccgtacgtcctcggctcggcgcatcaaggatgcctcccgccgttcccagcagacgtcttcatggtgccacagtatggatacctcaccctgaacaacgggagtcaggcagtaggacgctcttcattttactgcctggagtactttccttctcagatgctgcgtaccggaaacaactttaccttcagctacacttttgaggacgttcctttccacagcggctacgctcacagccagagtctggaccgtctcatgaatcctctcatcgaccagtacctgtattacttgagcacaacaaacactccaagtggaaccaccacgcagtcaaggcttcagttttctcaggccggagcgagtgacattcgggaccagtctaggaactggcttcctggaccctgttaccgccagcagcgagtatcaaagacatctgcggataacaacaacagtgaatactcgtggactggagctaccaagtaccacctcaatggcagagactctctggtgaatccgggcccggccatggcaagccacaaggacaatgaagaaaagttttttcctcagagcggggttctcatctttgggaagcaaggctcagagaaaacaaatgtggacattgaaaaggtcatgattacagacgaagaggaaatcaggacaaccaatcccgtggctacggagcagtacggttctgtatctaccaacctccagagaggcaacagacaagcagctaccgcagatgtcaacacacaaggcgttcttccaggcatggtctggcaggacagagatgtgtaccttcaggggcccatctgggcaaagattccacacacggacggacattttcacccctctcccctcatgggtggattcggacttaaacaccctcctccacagattctcatcaagaacaccccggtacctgcgaatccttcgaccaccttcagtgcggcaaagtttgcttccttcatcacacagtactccacgggacaggtcagcgtggagatcgagtgggagctgcagaaggaaaacagcaaacgctggaatcccgaaattcagtacacttccaactacaacaagtctgttaatgtggactttactgtggacactaatggcgtgtattcagagcctcgccccattggcaccagatacctgactcgtaatctgtaa

SEQ ID NO: 287 - protein, 735 aa, Adeno-associated virus
MAADGYLPDWLEDTLSEGIRQWWKLKPGPPPPKPAERHKDDSRGLVLPGYKYLGPFNGLDKGEPVNEADAAALEHDKAYDRQLDSGDNPYLKYNHADAEFQERLKEDTSFGGNLGRAVFQAKKRVLEPLGLVGEPVKTAPGKKRPVEHSPVEPDSSSGTGKAGQQPARKRLNFGQTGDADSVPDPQPLGQPPAAPSGLGTNTMATGSGAPMADNNEGADGVGNSSGNWHCDSTWMGDRVITTSTRTWALPTYNNHLYKQISSQSGASNDNHYFGYSTPWGYFDFNRFHCHFSPRDWQRLINNNWGFRPKRLNFKLFNIQVKEVTQNDGTTTIANNLTSTVQVFTDSEYQLPYVLGSAHQGCLPPFPADVFMVPQYGYLTLNNGSQAVGRSSFYCLEYFPSQMLRTGNNFTFSYTFEDVPFHSGYAHSQSLDRLMNPLIDQYLYYLSTTNTPSGTTTQSRLQFSQAGASDIRDQSRNWLPGPCYRQQRVSKTSADNNNSEYSWTGATKYHLNGRDSLVNPGPAMASHKDNEEKFFPQSGVLIFGKQGSEKTNVDIEKVMITDEEEIRTTNPVATEQYGSVSTNLQRGNRQAATADVNTQGVLPGMVWQDRDVYLQGPIWAKIPHTDGHFHPSPLMGGFGLKHPPPQILIKNTPVPANPSTTFSAAKFASFITQYSTGQVSVEIEWELQKENSKRWNPEIQYTSNYNKSVNVDFTVDTNGVYSEPRPIGTRYLTRNL

SEQ ID NO: 288 - DNA, 2208 bp, Adeno-associated virus
atggctgccgatggttatcttccagattggctcgaggacactctctctgaaggaataagacagtggtggaagctcaaacctggcccaccaccaccaaagcccgcagagcggcataaggacgacagcaggggtcttgtgcttcctgggtacaagtacctcggacccttcaacggactcgacaagggagagccggtcaacgaggcagacgccgcggccctcgagcacgacaaagcctacgaccggcagctcgacagcggagacaacccgtacctcaagtacaaccacgccgacgcggagtttcaggagcgccttaaagaagatacgtcttttgggggcaacctcggacgagcagtcttccaggcgaaaaagagggttcttgaacctctgggcctggttggggaacctgttaagacggctccgggaaaaaagaggccggtagagcactctcctgtggagccagactcctcctcgggaaccggaaaggcgggccagcagcctgcaagaaaaagattgaattttggtcagactggagacgcagactcagtacctgacccccagcctctcggacagccaccagcagccccctctggtctgggaactaatacgatggctacaggcagtggcgcaccaatggcagacaataacgagggcgccgacggagtgggtaattcctcgggaaatcggcattgcgattccacatggatgggcgacagagtcatcaccaccagcacccgaacctgggccctgcccacctacaacaaccacctctacagacaaatttccagccaatcaggagcctcgaacgacaatcactactttggctacagcaccccttgggggtattttgacttcaacagattccactgccacttttcaccacgtgactggcaaagactcatcaacaacaactggggattccgacccaagagactcaacttcaagctctttaacattcaagtcaaagaggtcacgcagaatgacggtacgacgacgattgccaataaccttaccagcacggttcaggtgtttactgactcggagtaccagctcccgtacgtcctcggctcggcgcatcaaggatgcctcccgccgttcccagcagacgtcttcatggtgccacagtatggatacctcaccctgagcaacgggagtcaggcagtaggacgctcttcattttactgcccggagtactttccttctcagatgctgcgtaccggaaacaactttaccttcagctacacttttgaggacgttcctttccacagcagctacgctcacagccagagtctggaccgtctcatgaatcctctcatcgaccagtacctgtattacttgagcacaacaaacactccaagtggaaccaccacgcagtcaaggcttcagttttctcaggccggagcgagtgacattcgggaccagtctaggaactggcttcctggaccctgttaccgccagcagcgagtatcaaagacatctgcggataacaacaacagtgaatactcgtggactggagctaccaagtaccacctcaatggcagagactctctggtgaatccgggcccggccatggcaagccacaaggacaatgaagaaaagttttttcctcagagcggggttctcatctttgggaagcaaggctcagagaaaacaaatgtggacattgaaaaggtcatgattacagacgaagaggaaatcaggacaaccaatcccgtggctacggagcagtatggttctgtatctaccaacctccagagaggcaacagacaagcagctaccgcagatgtcaacacacaaggcgttcttccaggcatggtctggcaggacagagatgtgtaccttcaggggcccatctgggcaaagattccacacacggacggacattttcacccctctcccctcatgggtggattcggacctaaacaccctcctccacagattctcatcaagaacaccccggtacctgcgaatccttcgaccaccttcagtgcggcaaagtttgcttccttcatcacacagtactccacgggacaggtcagcgtggagatcgagtgggagctgcagaaggaaaacagcaaacgctggaatcccgaaattcagtacacttccaactacaacaagtctgttaatgtggactttactgtggacactaatggcgtgtattcagagcctcgccccattggcaccagatacctgactcgtaatttgtaa

SEQ ID NO: 289 - protein, 735 aa, Adeno-associated virus
MAADGYLPDWLEDTLSEGIRQWWKLKPGPPPPKPAERHKDDSRGLVLPGYKYLGPFNGLDKGEPVNEADAAALEHDKAYDRQLDSGDNPYLKYNHADAEFQERLKEDTSFGGNLGRAVFQAKKRVLEPLGLVGEPVKTAPGKKRPVEHSPVEPDSSSGTGKAGQQPARKRLNFGQTGDADSVPDPQPLGQPPAAPSGLGTNTMATGSGAPMADNNEGADGVGNSSGNRHCDSTWMGDRVITTSTRTWALPTYNNHLYRQISSQSGASNDNHYFGYSTPWGYFDFNRFHCHFSPRDWQRLINNNWGFRPKRLNFKLFNIQVKEVTQNDGTTTIANNLTSTVQVFTDSEYQLPYVLGSAHQGCLPPFPADVFMVPQYGYLTLSNGSQAVGRSSFYCPEYFPSQMLRTGNNFTFSYTFEDVPFHSSYAHSQSLDRLMNPLIDQYLYYLSTTNTPSGTTTQSRLQFSQAGASDIRDQSRNWLPGPCYRQQRVSKTSADNNNSEYSWTGATKYHLNGRDSLVNPGPAMASHKDNEEKFFPQSGVLIFGKQGSEKTNVDIEKVMITDEEEIRTTNPVATEQYGSVSTNLQRGNRQAATADVNTQGVLPGMVWQDRDVYLQGPIWAKIPHTDGHFHPSPLMGGFGPKHPPPQILIKNTPVPANPSTTFSAAKFASFITQYSTGQVSVEIEWELQKENSKRWNPEIQYTSNYNKSVNVDFTVDTNGVYSEPRPIGTRYLTRNL

SEQ ID NO: 290 - DNA, 2205 bp, Adeno-associated virus
atggctgccgatggttatcttccagattggctcgaggacactctctctgaaggaataagacagtggtggaagctcaaacctggcccaccaccaccaaagcccgcagagcggcataaggacgacagcaggggtcttgtgcttcctgggtacaagtacctcggacccttcaacggactcgacaagggagagccggtcaacgaggcagacgccgcggccctcgagcacgacaaggcctacgaccggcagctcgacagcggagacaacccgtacctcaagtacaaccacgccgacgcggagtttcaggagcgtcttaaagaagatacgtcttttgggggcaacctcggacgagcagtcttccaggcgaaaaagagggttcttgaacctctgggcctggttgaggaacctgttaagacggctccgggaaaaaagaggccggtagagcactctcctgcggagccagactcctcctcgggaaccggaaaagcgggccagcagcctgcaagaaaaagactgaatttcggtcagactggagacgcagactccgtacctgacccccagcctctcagacagccaccagcagcccccacaagtttgggatctactacaatggctacaggcagtggcgcaccaatggcagacaataacgagggtgccgatggagtgggtaattcctcaggaaattggcattgcgattcccaatggctgggcgacagagtcatcaccaccagcacccgaacctgggccctgcccacctacaacaaccacctttacaagcaaatctccagccaatcaggagcctcaaacgacaaccactactttggctacagcaccccctgggggtattttgacttcaacagattccactgccacttttcaccacgtgactggcaaagactcatcaacaacaactggggattccgacccaagagactcaacttcaagctctttaacattcaagtcaaagaggtcacgcagaatgacggtacgacgacgattgccaataaccttaccagcacggttcaggtgtttactgactcggagtaccagctcccgtacgtcctcggctcggcgcatcaaggatgcctcccgccgtttccagcggacgtcttcatggtcccacagtatggatacctcaccctgaacaacgggagtcaggcggtaggacgctcttccttttactgcctggagtactttccttctcagatgctgcgtactggaaacaactttcagttcagctacacttttgaagacgtgcctttccacagcagctacgctcacagccagagtttggatcggctgatgaatcctctgatcgaccagtacctgtattatctaaacagaacacaaacagctagtggaactcagcagtctcggctactgtttagccaagctggacccacaagcatgtctcttcaagctaaaaactggctgcctggaccgtgttatcgccagcagcgtttgtcaaagcaggcaaacgacaacaacaacagcaactttccctggactggagctaccaagtactacctcaatggcagagactctttggtgaacccgggcccggccatggccagccacaaggacgatgaagaaaagtttttccccatgcatggaaccctaatatttggtaaagaaggaacaaatgctaccaacgcggaattggaaaatgtcatgattacagatgaagaggaaatcaggaccaccaatcccgtggctacagagcagtacggatatgtgtcaaataatttgcaaaactcaaatactgctgcaagtactgaaactgtgaatcaccaaggagcattacctggtatggtgtggcaggatcgagacgtgtacctgcagggacccatttgggccaagattcctcacaccgatggacactttcatccttctccactgatgggaggttttggactcaaacacccgcctcctcagattatgatcaaaaacactcccgttccagccaatcctcccacaaacttcagttctgccaagtttgcttccttcatcacacagtattccacgggacaggtcagcgtggagatcgagtgggagctgcagaaggagaacagcaaacgctggaatcccgaaattcagtacacttccaactacaacaaatctgttaatgtggactttactgtggacactaatggtgtgtattcagagcctcgccccattggcaccagatacctgactcgtaatctgtaa

SEQ ID NO: 291 - protein, 734 aa, Adeno-associated virus
MAADGYLPDWLEDTLSEGIRQWWKLKPGPPPPKPAERHKDDSRGLVLPGYKYLGPFNGLDKGEPVNEADAAALEHDKAYDRQLDSGDNPYLKYNHADAEFQERLKEDTSFGGNLGRAVFQAKKRVLEPLGLVEEPVKTAPGKKRPVEHSPAEPDSSSGTGKAGQQPARKRLNFGQTGDADSVPDPQPLRQPPAAPTSLGSTTMATGSGAPMADNNEGADGVGNSSGNWHCDSQWLGDRVITTSTRTWALPTYNNHLYKQISSQSGASNDNHYFGYSTPWGYFDFNRFHCHFSPRDWQRLINNNWGFRPKRLNFKLFNIQVKEVTQNDGTTTIANNLTSTVQVFTDSEYQLPYVLGSAHQGCLPPFPADVFMVPQYGYLTLNNGSQAVGRSSFYCLEYFPSQMLRTGNNFQFSYTFEDVPFHSSYAHSQSLDRLMNPLIDQYLYYLNRTQTASGTQQSRLLFSQAGPTSMSLQAKNWLPGPCYRQQRLSKQANDNNNSNFPWTGATKYYLNGRDSLVNPGPAMASHKDDEEKFFPMHGTLIFGKEGTNATNAELENVMITDEEEIRTTNPVATEQYGYVSNNLQNSNTAASTETVNHQGALPGMVWQDRDVYLQGPIWAKIPHTDGHFHPSPLMGGFGLKHPPPQIMIKNTPVPANPPTNFSSAKFASFITQYSTGQVSVEIEWELQKENSKRWNPEIQYTSNYNKSVNVDFTVDTNGVYSEPRPIGTRYLTRNL

SEQ ID NO: 292 - DNA, 3160 bp, Adeno-associated virus
acccttcactaaagggactagtcctgcaggtttaaacgaattcgcccttgctgcgtcaactggaccaatgagaactttcccttcaacgactgtgtcgacaagatggtgatttggtgggaggaggggaagatgaccgccaaggtcgtggagtcggccaaagccattctcggaggaagcaaggtgcgcgtggaccagaaatgcaagtcctcggcccagatagatccgactcccgtgatcgtcacctccaacaccaacatgtgcgccgtgattgacgggaactcaacgaccttcgaacaccagcagccgttgcaagaccggatgttcaaatttgaactcacccgccgtctggatcatgactttgggaaggtcaccaagcgggaagtcaaagactttttccggtgggcaaaggatcacgtggttgaggtggagcatgaattctacgtcaaaaagggtggagccaagaaaagacccgcccctagtgacgcagatataagtgagcccaaacgggtgcgcgagtcagttgcgcagccatcgacgtcagacgcggaagcttcgatcaactacgcggacaggtaccaaaacaaatgttctcgtcacgtgggcatgaatctgatgctgtttccctgcagacaatgcgagagaatgaatcaaaattcaaatatctgcttcactcacggacagaaagactgtttagagtgctttcccgtgtcagaatctcaacctgtttctgtcgtcaaaaaggcgtatcagaaactgtgctacattcatcatatcatgggaaaggtgccagacgcttgcactgcctgcgatctggtcaatgtggatttggatgactgcatctctgaacaataaatgatttaaatcaggtatggctgccgatggttatcttccagattggctcgaggacactctctctgaaggaataagacagtggtggaagctcaaacctggcccaccaccaccaaagcccgcagagcggcataaggacgacagcaggggtcttgtgcttcctgggtacaagtacctcggacccttcaacggactcgacaagggagagccggtcaacgaggcagacgccgcggccctcgagcacgacaaggcctacgaccggcagctcgacagcggagacaacccgtacctcaagtacaaccacgccgacgcggagtttcaggagcgtcttaaagaagatacgtcttttgggggcaacctcggacgagcagtcttccaggcgaaaaagagggttcttgaacctctgggcctggttgaggaacctgttaagacggctccgggaaaaaagaggccggtagagcactctcctgcggagccagactcctcctcgggaaccggaaaagcgggccagcagcctgcaagaaaaagactgaatttcggtcagactggagacgcagactccgtacctgacccccagcctctcagacagccaccagcagcccccacaagtttgggatctactacaatggctacaggcagtggcgcaccaatggcagacaataacgagggtgccgatggagtgggtaattcctcaggaaattggcattgcgattcccaatggctgggcgacagagtcatcaccaccagcacccgaacctgggccctgcccacctacaacaaccacctttacaagcaaatctccagccaatcaggagcctcaaacgacaaccactactttggctacagcaccccctgggggtattttgacttcaacagattccactgccacttttcaccacgtgactggcaaagactcatcaacaacaactggggattccgacccaagagactcaacttcaagctctttaacattcaagtcaaagaggtcacgcagaatgacggtacgacgacgattgccaataaccttaccagcacggttcaggtgtttactgactcggagtaccagctcccgtacgtcctcggctcggcgcatcaaggatgcctcccgccgtttccagcggacgtcttcatggtcccacagtatggatacctcaccctgaacaacgggagtcaggcggtaggacgctcttccttttactgcctggagtactttccttctcagatgctgcgtactggaaacaactttcagttcagctacacttttgaagacgtgcctttccacagcagctacgctcacagccagagtttggatcggctgatgaatcctctgatcgaccagtacctgtattatctaaacagaacacaaacagctagtggaactcagcagtctcggctactgtttagccaagctggacccacaagcatgtctcttcaagctaaaaactggctgcctggaccgtgttatcgccagcagcgtttgtcaaagcaggcaaacgacaacaacaacagcaactttccctggactggagctaccaagtactacctcaatggcagagactctttggtgaacccgggcccggccatggccagccacaaggacgatgaagaaaagtttttccccatgcatggaaccctaatatttggtaaagaaggaacaaatgctaccaacgcggaattggaaaatgtcatgattacagatgaagaggaaatcaggaccaccaatcccgtggctacagagcagtacggatatgtgtcaaataatttgcaaaactcaaatactgctgcaagtactgaaactgtgaatcaccaaggagcattacctggtatggtgtggcaggatcgagacgtgtacctgcagggacccatttgggccaagattcctcacaccgatggacactttcatccttctccactgatgggaggttttggactcaaacacccgcctcctcagattatgatcaaaaacactcccgttccagccaatcctcccacaaacttcagttctgccaagtttgcttccttcatcacacagtattccacgggacaggtcagcgtggagatcgagtgggagctgcagaaggagaacagcaaacgctggaatcccgaaattcagtacacttccaactacaacaaatctgttaatgtggactttactgtggacactaatggtgtgtattcagagcctcgccccattggcaccagatacctgactcgtaatctgtaattgcttgttaatcaataaaccgtttaattcgtttcagttgaactttggtctctgcgaagggcgaattcgcggccgctaaatcaatcg

SEQ ID NO: 293 - protein, 734 aa, Adeno-associated virus
MAADGYLPDWLEDTLSEGIRQWWKLKPGPPPPKPAERHKDDSRGLVLPGYKYLGPFNGLDKGEPVNEADAAALEHDKAYDRQLDSGDNPYLKYNHADAEFQERLKEDTSFGGNLGRAVFQAKKRVLEPLGLVEEPVKTAPGKKRPVEHSPAEPDSSSGTGKAGQQPARKRLNFGQTGDADSVPDPQPLGQPPAAPTSLGSTTMATGSGAPMADNNEGADGVGNSSGNWHCDSQWLGDRVITTSTRTWALPTYNNHLYKQISSQSGASNDNHYFGYSTPWGYFDFNRFHCRFSPRDWQRLINNNWGFRPKRLNFKLFNIQVKEVTQNDGTTTIANNLTSTVQVFTDSEYQLPYVLGSAHQGCLPPFPADVFMVPQYGYLTLNNGSQAVGRSSFYCLEYFPSQMLRTGNNFQFSYTFEDVPFHSSYAHSQGLDRLMNPLIDQYLYYLNRTQTASGTQQSRLLFSQAGPTSMSLQAKNWLPGPCYRQQRLSKQANDNNNSNFPWTGATKYHLNGGDSLVNPGPAMASHKDDEEKFFPMHGTLIFGKEGTNATNAELENVMITDEEEIRTTNPVATEQYGYVSNNLQNSNTAASTETVNHQGALPGMVWQDRDVYLRGPIWAKIPHADGHFHPSPLMGGFGLKHPPPQIMIKNTPVPANPPTNFSSAKFASFITQYSTGQVSVEIEWELQKENSKRWNPEIQYTSNYNKSVNVDFTVDTNGVYSEPRPIGTRYLTRNL

SEQ ID NO: 294 - DNA, 3157 bp, Adeno-associated virus
ctcactaagggactagtcctgcaggtttaaacgaattcgcccttgctgcgtcaactggaccaatgagaactttcccttcaacgactgtgtcgacaagatggtgatttggtgggaggaggggaagatgaccgccaaggtcgtggagtcggccaaagccactctcggaggaagcaaggtgcgcgtggaccagaaacgcaagtcctcggcccagatagatccgactcccgtgatcgtcacctccaacaccaacatgtgcgccgtgattgacgggaactcaacgaccttcgaacaccagcagccgttgcaagaccgaatgttcaaatttgaactcacccgccgtctggatcatgacttcgggaaggtcaccaagcaggaagtcaaagactttttccggtgggcaaaggatcacgtggttgaggtggagcatgaattctacgtcaaaaagggtggagccaagaaaagacccgcccctagtgacgcagatataagtgagcccaaacgggtgcgcgagtcagttgcgcagccatcgacgtcagacgcggaagcttcgatcaactacgcggacaggtaccaaaacaaatgttctcgtcacgtgggcatgaatctgatgctgtttccctgcagacaatgcgagagaatgaatcaaaattcaaatatctgcttcactcacggacagaaagactgtttagagtgctttcccgtgtcagaatctcaacctgtttctgtcgtcaaaaaggcgtatcagaaactgtgctacattcatcatatcatgggaaaggtgccagacgcttgcactgcctgcgatctggtcaatgtggatttggatgactgcatctctgaacaataaatgatttaaatcaggtatggctgccgatggttatcttccagattggctcgaggacactctctctgaaggaataagacagtggtggaagctcaaacctggcccaccaccaccaaagcccgcagagcggcataaggacgacagcaggggtcttgtgcttcctgggtacaagtacctcggacccttcaacggactcgacaagggagagccggtcaacgaggcagacgccgcggctctcgagcacgacaaggcctacgaccggcagctcgacagcggagacaacccgtacctcaagtacaaccacgccgacgcggagtttcaggagcgtcttaaagaagatacgtcttttgggggcaacctcggacgagcagtcttccaggcgaaaaagagggttcttgaacctctgggcctggttgaggaacctgttaagacggctccgggaaaaaagaggccggtagagcactctcctgcggagccagactcctcctcgggaaccggaaaagcgggccagcagcctgcaagaaaaagactgaatttcggtcagactggagacgcagactccgtacctgacccccagcctctcggacagccaccagcagcccccacaagtttgggatctactacaatggctacaggcagtggcgcaccaatggcagacaataacgagggtgccgatggagtgggtaattcctcaggaaattggcattgcgattcccaatggctgggcgacagagtcatcaccaccagcacccgaacctgggccctgcccacctacaacaaccacctttacaagcaaatctccagccaatcaggagcctcaaacgacaaccactactttggctacagcaccccctgggggtattttgacttcaacagattccactgccgcttttcaccacgtgactggcaaagactcatcaacaacaactggggattccgacccaagagactcaacttcaagctctttaacattcaagtcaaagaggtcacgcagaatgacggtacgacgacgattgccaataaccttaccagcacggttcaggtgtttactgactcggagtaccagctcccgtacgtcctcggctcggcgcatcaaggatgcctcccgccgtttccagcggacgtcttcatggtcccacagtatggatacctcaccctgaacaacgggagtcaggcggtaggacgctcttccttttactgcctggagtactttccttctcagatgctgcgtactggaaacaactttcagttcagctacacttttgaagacgtgcctttccacagcagctacgctcacagccagggtttggatcggctgatgaatcctctgatcgaccagtacctgtattatctaaacagaacacaaacagctagtggaactcagcagtctcggctactgtttagccaagctggacccacaagcatgtctcttcaagctaaaaactggctgcctggaccgtgttatcgccagcagcgtttgtcaaagcaggcaaacgacaacaacaacagcaactttccctggactggagctaccaagtaccacctcaatggcggagactctttggtgaacccgggcccggccatggccagccacaaggacgatgaagaaaagtttttccccatgcatggaaccctaatatttggtaaagaaggaacaaatgctaccaacgcggaattggaaaatgtcatgattacagatgaagaggaaatcaggaccaccaatcccgtggctacagagcagtacggatatgtgtcaaataatttgcaaaactcaaatactgctgcaagtactgaaactgtgaatcaccaaggagcattacctggtatggtgtggcaggatcgagacgtgtacctgcggggacccatttgggccaagattcctcacgccgatggacactttcatccttctccactgatgggaggttttggactcaaacacccgcctcctcagattatgatcaaaaacactcccgttccagccaatcctcccacaaacttcagttctgccaagtttgcttccttcatcacacagtattccacgggacaggtcagcgtggagatcgagtgggagctgcagaaggagaacagcaaacgctggaatcccgaaattcagtacacttccaactacaacaaatctgttaatgtggactttactgtggacactaatggtgtgtattcagagcctcgccccattggcaccagatacctgactcgtaatctgtaattgcttgttaatcaataaaccgtttaattcgtttcagttgaactttggtctctgcgaagggcgaattcgcggccgctaaattcaattcg

SEQ ID NO: 295 - protein, 734 aa, Adeno-associated virus
MAADGYLPDWLEDTLSEGIRQWWKLKPGPPPPKPAERHKDDSRGLVLPGYKYLGPFNGLDKGEPVNEADAAALEHDKAYDRQLDSGDNPYLKYNHADAEFQERLKEDTSFGGNLGRAVFQAKKRVLEPLGLVEEPVKTAPGKKRPVEHSPAEPDSSSGTGKAGQQPARKRLNFGQTGDADSVPDPQPLGQPPAAPTSLGSTTMATGSGAPMADNNEGADGVGNSSGNWHCDSQWLGDRVITTSTRTWALPTYNNHLYKQISSQSGASNDNHYFGYSTPWGYFDFNRFHCHFSPRDWQRLINNNWGFRPKRLNFKLFNIQVKEVTQNDGTTTIANNLTSTVQVFTDSEYQLPYVLGSAHQGCLPPFPADVFMVPQYGYLTLNNGSQAVGRSSFYCLECFPSQMLRTGNNFQFSYTFEDVPFHSSYAHSQSLDRLMNPLIDQYLYYLNRTQTASGTQQSRLLFSQAGPTSMSLQAKNWLPGPCYRQQRLSKQANDNNNSNFPWTGATKYHLNGRDSLVNPGPAMASHKDDEEKFFPMHGTLIFGKEGTNATNAELENVMITDEEEIRTTNPVATEQYGYVSNNLQNSNTAASTETVNHQGALPGMVWQDRDVYLQGPIWAKIPHTDGHFHPSPLMGGFGLKHPPPQIMIKNTPVPANPPTNFSSAKFASFITQYSTGQVSVEIEWELQKENSKRWNPEIQYTSNYNKSVNVDFTVDTNGVYSEPRPIGTRYLTRNL

SEQ ID NO: 296 - DNA, 2208 bp, Adeno-associated virus
atggctgccgatggttatcttccagattggctcgaggacactctctctgaaggaataagacagtggtggaagctcaaacctggcccaccaccaccaaagcccgcagagcggcataaggacgacagcaggggtcttgtgcttcctggatacaagtacctcggacccttcaacggactcgacaagggagagccggtcaacgaggcagacgccgcggccctcgagcacgacaaggcctacgaccggcagctcgacagcggagacaacccgtacctcaagtacaaccacgccgacgcggagtttcaggagcgccttaaagaagatacgtcttttgggggcaacctcggacgagcagtcttccaggcgaaaaagagggttcttgaacctctgggcctggttgaggaacctgttaagacggctccgggaaaaaagaggccggtagagcactctcctgtggagccagactcctcctcgggaaccggaaaagcgggcaaccagcctgcaagaaaaagattgaatttcggtcagactggagacgcagactccgtacctgacccccagcctctcggacagccaccagcatccccctctggtctgggaactaatacgatggctacaggcagtggcgcaccaatggcagacaataacgagggcgccgacggagtgggtaattcctcgggaaattggcattgcgattccacatggatgggcgacagagtcgtcaccaccagcacccgcacctgggccctgcccacctacaacaaccacctctacaagcagatttccagccaatcaggagccagcaacgacaaccactactttggctacagcaccccttgggggtattttgacttcaacagattccactgccacttttcgccacgcgactggcagagactcatcaacaacaactggggattccggcccaaaagactcaacttcaagctgtttaacattcaagtcaaggaggtcacgcagaatgacggtacgacgacgattgccaataaccttaccagcacggttcaggtgtttactgacttggagtaccagctcccgtacgtcctcggctcggcgcatcaaggatgcctcccgccgttcccagcagacgtcttcatggtgccacagtatggatacctcaccctgaacaacgggagtcaggcggtaggacgctcttccttttactgcctggagtactttccttctcagatgcttcgcaccggaaacaactttaccttcagctacacttttgaagacgttcctttccacagcagctacgctcacagtcaaagtctggaccgtctcatgaatcctctcatcgaccagtacctgtattacttgagcagaacaaacactccaagcggaaccactacgcagtccaggcttcagttttctcaggccggagcgagtgacattcgggaccagtctaggaactggcttcctggaccctgttaccgccagcagcgagtatcaaagacagctgcggataacaacaacagtgaatactcgtggactggagctaccaagtaccacctcaatggcagagactctctggtgaatccgggcccggccatggccagccacaaggacgatgaagaaaagttttttcctcaaagcggggttctcatctttgggaagcaaggctcagagaaaacaaatgtggacattgaaaaggtcatgattacagacgaagaggaaatcaggaccaccaatcccgtggctacggagcagtatggttctgtatctaccaacctccagagcggcaacacacaagcagctacctcagatgtcaacacacaaggcgttcttccaggcatggtctggcaggacagagacgtgtacctgcaggggcccatctgggcaaaaattccacacacggacggacattttcacccctctcccctcatgggcggatttggacttaaacaccctcctccacagattctcattaagaataccccggtacctgcgaatccttcgaccaccttcagcgcggcaaagtttgcttccttcatcacacagtattccacggggcaggtcagcgtggagatcgagtgggagctgcagaaggagaacagcaaacgctggaatcccgaaattcagtacacttccaactacaacaaatctgttaatgtggactttactgtggacactaatggggtgtattcagagcctcgccctattggcaccagatacctgactcgtaatctgtaa

SEQ ID NO: 297 - DNA, 3159 bp, Adeno-associated virus
gattgatttagcggccgcgaattcgcccttgctgcgtcaactggaccaatgagaactttcccttcaacgattgcgtcgacaagatggtgatctggtgggaggagggaaagatgaccgccaaggtcgtggagtcggccaaagccattctcggaggaagcaaggtgcgtgtggaccaaaagtgcaagtcttcggcccagatcgacccgactcccgtgatcgtcacctccaacaccaacatgtgcgccgtgattgatggaaactcaacgaccttcgagcaccagcagccgttgcaagaccggatgttcaaatttgaacttacccgccgtctggatcatgactttggaaaggtcaccaagcaggaagtgaaagactttttccggtgggcaaaggatcacgtggttgaggtggagcatgagttctacgtcaaaaagggtggagccaaaaaaagacccgcccccagtgacgcagatataagtgagcccaaacgggcgcgcgagtcagttgcgcagccatcgacgtcagacgcggaagcttcgatcaactacgcggacaggtaccaaaacaaatgttctcgtcacgtgggcatgaatctgatgctgtttccctgcagacaatgcgagagaatgaatcagaattcaaatatctgcttcactcacggacagaaagactgtccatagtgctttcccgtgtcagaatctcaacccgtttctgtcgtcaaaaaggcgtatcagaaactgtgctacattcatcacatcatgggaaaggtgccagacgcttgcactgcttgcgacctggtcaatgtggatttggatgactgcatctctgaacaataaatgatttaaatcaggtatggctgccgatggttatcttccagattggctcgaggacactctctctgaaggaataagacagtggtggaagctcaaacctggcccaccaccaccaaagcccgcagagcggcataaggacgacagcaggggtcttgtgcttcctggatacaagtacctcggacccttcaacggactcgacaagggagagccggtcaacgaggcagacgccgcggccctcgagcacgacaaggcctacgaccggcagctcgacagcggagacaacccgtacctcaagtacaaccacgccgacgcggagtttcaggagcgccttaaagaagatacgtcttttgggggcaacctcggacgagcagtcttccaggcgaaaaagagggttcttgaacctctgggcctggttgaggaacctgttaagacggctccgggaaaaaagaggccggtagagcactctcctgtggagccagactcctcctcgggaaccggaaaagcgggcaaccagcctgcaagaaaaagattgaatttcggtcagactggagacgcagactccgtacctgacccccagcctctcggacagccaccagcatccccctctggtctgggaactaatacgatggctacaggcagtggcgcaccaatggcagacaataacgagggcgccgacggagtgggtaattcctcgggaaattggcattgcgattccacatggatgggcgacagagtcgtcaccaccagcacccgcacctgggccctgcccacctacaacaaccacctctacaagcagatttccagccaatcaggagccagcaacgacaaccactactttggctacagcaccccttgggggtattttgacttcaacagattccactgccacttttcgccacgcgactggcagagactcatcaacaacaactggggattccggcccaaaagactcaacttcaagctgtttaacattcaagtcaaggaggtcacgcagaatgacggtacgacgacgattgccaataaccttaccagcacggttcaggtgtttactgacttggagtaccagctcccgtacgtcctcggctcggcgcatcaaggatgcctcccgccgttcccagcagacgtcttcatggtgccacagtatggatacctcaccctgaacaacgggagtcaggcggtaggacgctcttccttttactgcctggagtactttccttctcagatgcttcgcaccggaaacaactttaccttcagctacacttttgaagacgttcctttccacagcagctacgctcacagtcaaagtctggaccgtctcatgaatcctctcatcgaccagtacctgtattacttgagcagaacaaacactccaagcggaaccactacgcagtccaggcttcagttttctcaggccggagcgagtgacattcgggaccagtctaggaactggcttcctggaccctgttaccgccagcagcgagtatcaaagacagctgcggataacaacaacagtgaatactcgtggactggagctaccaagtaccacctcaatggcagagactctctggtgaatccgggcccggccatggccagccacaaggacgatgaagaaaagttttttcctcaaagcggggttctcatctttgggaagcaaggctcagagaaaacaaatgtggacattgaaaaggtcatgattacagacgaagaggaaatcaggaccaccaatcccgtggctacggagcagtatggttctgtatctaccaacctccagagcggcaacacacaagcagctacctcagatgtcaacacacaaggcgttcttccaggcatggtctggcaggacagagacgtgtacctgcaggggcccatctgggcaaaaattccacacacggacggacattttcacccctctcccctcatgggcggatttggacttaaacaccctcctccacagattctcattaagaataccccggtacctgcgaatccttcgaccaccttcagcgcggcaaagtttgcttccttcatcacacagtattccacggggcaggtcagcgtggagatcgagtgggagctgcagaaggagaacagcaaacgctggaatcccgaaattcagtacacttccaactacaacaaatctgttaatgtggactttactgtggacactaatggggtgtattcagagcctcgccctattggcaccagatacctgactcgtaatctgtaattgcttgttaatcaataaaccgtttaattcgtttcagttgaactttggtctctgcgaagggcgaattcgtttaaacctgcaggactagtccctttagtgagg

SEQ ID NO: 298 - protein, 735 aa, Adeno-associated virus
MAADGYLPDWLEDTLSEGIRQWWKLKPGPPPPKPAERHKDDSRGLVLPGYKYLGPFNGLDKGEPVNEADAAALEHDKAYDRQLDSGDNPYLKYNHADAEFQERLKEDTSFGGNLGRAVFQAKKRVLEPLGLVEEPVKTAPGKKRPVEHSPVEPDSSSGTGKAGNQPARKRLNFGQTGDADSVPDPQPLGQPPASPSGLGTNTMATGSGAPMADNNEGADGVGNSSGNWHCDSTWMGDRVVTTSTRTWALPTYNNHLYKQISSQSGASNDNHYFGYSTPWGYFDFNRFHCHFSPRDWQRLINNNWGFRPKRLNFKLFNIQVKEVTQNDGTTTIANNLTSTVQVFTDLEYQLPYVLGSAHQGCLPPFPADVFMVPQYGYLTLNNGSQAVGRSSFYCLEYFPSQMLRTGNNFTFSYTFEDVPFHSSYAHSQSLDRLMNPLIDQYLYYLSRTNTPSGTTTQSRLQFSQAGASDIRDQSRNWLPGPCYRQQRVSKTAADNNNSEYSWTGATKYHLNGRDSLVNPGPAMASHKDDEEKFFPQSGVLIFGKQGSEKTNVDIEKVMITDEEEIRTTNPVATEQYGSVSTNLQSGNTQAATSDVNTQGVLPGMVWQDRDVYLQGPIWAKIPHTDGHFHPSPLMGGFGLKHPPPQILIKNTPVPANPSTTFSAAKFASFITQYSTGQVSVEIEWELQKENSKRWNPEIQYTSNYNKSVNVDFTVDTNGVYSEPRPIGTRYLTRNL

SEQ ID NO: 299 - DNA, 2205 bp, Adeno-associated virus
atggctgccgatggttatcttccagattggctcgaggacactctctctgaaggaataagacagtggtggaagctcaaacctggcccaccaccaaagcccgcagagcggcataaggacgacagcaggggtcttgtgcttcctggatacaagtacctcggacccttcaacggactcgacaagggagagccggtcaacgaggcagacgccgcggccctcgagcacgacaaggcctacgaccggcagctcgacagcggagacaacccgtacctcaagtacaaccacgccgacgcggagtttcaggagcgccttaaagaagatacgtcttttgggggcaacctcggacgagcagtcttccaggcgaaaaagagggttcttgaacctctgggcctggttgaggaacctgttaagacggctccgggaaaaaagaggcccgtagagcactctcctgtggagccagactcctcctcgggaaccggaaaagcgggcaaccagcctgcaagaaaaagattgaatttcggtcagactggagacgcagactccgtacctgacccccagcctctcggacagccaccagcagccccctctggtctgggaactaatacgatggctacaggcagtggcgcaccaatggcagacaataacgagggcgccgacggagtgggtaattcctcgggagattggcattgcgattccacatggatgggcgacagagtcatcaccaccagcacccgcacctgggccctgcccacctacaacaaccacctctacaagcagatttccagccaatcaggagccagcaatgacaaccactactttggctacagcaccccttgggggtattttgacttcaacagattccactgccacttttcgccacgcgactggcagagactcatcaacaacaactggggattccggcccaaaagactcaacctcaagctgtttaacattcaagtcaaggaggtcacgcagaatgacggtacgacgacgattgccaataaccttaccagcacggttcaggtgtttactgacttggagtaccagctcccgtacgtcctcggctcggcgcatcaaggatgcctcccgccgttcccagcagacgtcttcatggtgccacagtatggatacctcaccctgaacaacgggagtcaggcggtaggacgctcttccttttactgcctggagtactttccttctcagatgcttcgtaccggaaacaactttaccttcagctacacttttgaagacgttcctttccacagcagctacgctcacagtcaaagtctggaccgtctcatgaatcctctcatcgaccagtacctgtattacttgagcagaacaaacactccaagcggaaccactacgcagtccaggcttcagttttctcaggccggagcgagtgacattcgggaccagtctaggaactggcttcctggaccctgttaccgccagcagcgagtatcaaagacagctgcggataacaacaacggtgaatactcgtggactggagctaccaagtaccacctcaatggcagagactctctggtgaatccgggcccggccatggccagccacaaggacgatgaagaaaagttttttcctcaaagcggggttctcatctttgggaagcaaggctcagagaaaacaaatgtggacattgaaaaggtcatgattacagacgaagaggaaatcaggaccaccaatcccgtggctacggagcagtatggttctgtatctaccaacctccagagcggcaacacacgagcagctacctcagatgtcaacacacaaggcgttcttccaggcatggtctggcaggacagagacgtgtacctgcaggggcccatctgggcaaaaattccacacacggacggacattttcacccctctcccctcatgggcggatttggacttaaacaccctcctccacagattctcattaagaataccccggtacctgcgaatccttcgaccaccttcagcgcggcaaagtttgcttccttcatcacacagtattccacggggcaggtcagcgtggagatcgagtgggagctgcagaaggagaacagcaaacgctggaatcccgaaattcagtacacttccaactacaacaaatctgttaatgtggactttactgtggacactaatggggtgtattcagagcctcgccctattggcaccagatacctgactcgtaatctgtaa

SEQ ID NO: 300 - DNA, 3156 bp, Adeno-associated virus
cgattgaatttagcggccgcgaattcgcccttgctgcgtcaacggaccaatgagaactttcccttcaacgattgcgtcgacaagatggtgatctggtgggaggagggaaagatgaccgccaaggtcgtggagtcggccaaagccattctcggaggaagcaaggtgcgtgtggaccaaaagtgcaagtcttcggcccagatcgacccgactcccgtgatcgtcacctccaacaccaacatgtgcgccgtgattgatggaaactcaacgaccttcgagcaccagcagccgttgcaagaccggatgttcaaatttgaacttacccgccgtctggatcatgactttggaaaggtcaccaagcaggaagtgaaagactttttccggtgggcaaaggatcacgtggttgaggtggagcatgagttctacgtcaaaaagggtggagccaaaaaaagacccgcccccagtgacgcagatataagtgagcccaaacgggcgcgcgagtcagttgcgcagccatcgacgtcagacgcggaagcttcgatcaactacgcggacaggtaccaaaacaaatgttctcgtcacgtgggcatgaatctgatgctgtttccctgcagacaatgcgagcgaatgaatcagaattcaaatatctgcttcactcacggacagaaagactgtttagagtgctttcccgtgtcagaatctcaacccgtttctgtcgtcaaaaaggcgtatcagaaactgtgctacattcatcacatcatgggaaaggtgccagacgcttgcactgcttgcgacctggtcaatgtggatttggatgactgcatctctgaacaataaatgatttaaatcaggtatggctgccgatggttatcttccagattggctcgaggacactctctctgaaggaataagacagtggtggaagctcaaacctggcccaccaccaaagcccgcagagcggcataaggacgacagcaggggtcttgtgcttcctggatacaagtacctcggacccttcaacggactcgacaagggagagccggtcaacgaggcagacgccgcggccctcgagcacgacaaggcctacgaccggcagctcgacagcggagacaacccgtacctcaagtacaaccacgccgacgcggagtttcaggagcgccttaaagaagatacgtcttttgggggcaacctcggacgagcagtcttccaggcgaaaaagagggttcttgaacctctgggcctggttgaggaacctgttaagacggctccgggaaaaaagaggcccgtagagcactctcctgtggagccagactcctcctcgggaaccggaaaagcgggcaaccagcctgcaagaaaaagattgaatttcggtcagactggagacgcagactccgtacctgacccccagcctctcggacagccaccagcagccccctctggtctgggaactaatacgatggctacaggcagtggcgcaccaatggcagacaataacgagggcgccgacggagtgggtaattcctcgggagattggcattgcgattccacatggatgggcgacagagtcatcaccaccagcacccgcacctgggccctgcccacctacaacaaccacctctacaagcagatttccagccaatcaggagccagcaatgacaaccactactttggctacagcaccccttgggggtattttgacttcaacagattccactgccacttttcgccacgcgactggcagagactcatcaacaacaactggggattccggcccaaaagactcaacctcaagctgtttaacattcaagtcaaggaggtcacgcagaatgacggtacgacgacgattgccaataaccttaccagcacggttcaggtgtttactgacttggagtaccagctcccgtacgtcctcggctcggcgcatcaaggatgcctcccgccgttcccagcagacgtcttcatggtgccacagtatggatacctcaccctgaacaacgggagtcaggcggtaggacgctcttccttttactgcctggagtactttccttctcagatgcttcgtaccggaaacaactttaccttcagctacacttttgaagacgttcctttccacagcagctacgctcacagtcaaagtctggaccgtctcatgaatcctctcatcgaccagtacctgtattacttgagcagaacaaacactccaagcggaaccactacgcagtccaggcttcagttttctcaggccggagcgagtgacattcgggaccagtctaggaactggcttcctggaccctgttaccgccagcagcgagtatcaaagacagctgcggataacaacaacggtgaatactcgtggactggagctaccaagtaccacctcaatggcagagactctctggtgaatccgggcccggccatggccagccacaaggacgatgaagaaaagttttttcctcaaagcggggttctcatctttgggaagcaaggctcagagaaaacaaatgtggacattgaaaaggtcatgattacagacgaagaggaaatcaggaccaccaatcccgtggctacggagcagtatggttctgtatctaccaacctccagagcggcaacacacgagcagctacctcagatgtcaacacacaaggcgttcttccaggcatggtctggcaggacagagacgtgtacctgcaggggcccatctgggcaaaaattccacacacggacggacattttcacccctctcccctcatgggcggatttggacttaaacaccctcctccacagattctcattaagaataccccggtacctgcgaatccttcgaccaccttcagcgcggcaaagtttgcttccttcatcacacagtattccacggggcaggtcagcgtggagatcgagtgggagctgcagaaggagaacagcaaacgctggaatcccgaaattcagtacacttccaactacaacaaatctgttaatgtggactttactgtggacactaatggggtgtattcagagcctcgccctattggcaccagatacctgactcgtaatctgtaattgcttgttaatcaataaaccgtttaattcgtttcagttgaactttggtctctgcgaagggcgaattcgtttaaacctgcaggactagtccctttagtgag

SEQ ID NO: 301 - protein, 734 aa, Adeno-associated virus
MAADGYLPDWLEDTLSEGIRQWWKLKPGPPPKPAERHKDDSRGLVLPGYKYLGPFNGLDKGEPVNEADAAALEHDKAYDRQLDSGDNPYLKYNHADAEFQERLKEDTSFGGNLGRAVFQAKKRVLEPLGLVEEPVKTAPGKKRPVEHSPVEPDSSSGTGKAGNQPARKRLNFGQTGDADSVPDPQPLGQPPAAPSGLGTNTMATGSGAPMADNNEGADGVGNSSGDWHCDSTWMGDRVITTSTRTWALPTYNNHLYKQISSQSGASNDNHYFGYSTPWGYFDFNRFHCHFSPRDWQRLINNNWGFRPKRLNLKLFNIQVKEVTQNDGTTTIANNLTSTVQVFTDLEYQLPYVLGSAHQGCLPPFPADVFMVPQYGYLTLNNGSQAVGRSSFYCLEYFPSQMLRTGNNFTFSYTFEDVPFHSSYAHSQSLDRLMNPLIDQYLYYLSRTNTPSGTTTQSRLQFSQAGASDIRDQSRNWLPGPCYRQQRVSKTAADNNNGEYSWTGATKYHLNGRDSLVNPGPAMASHKDDEEKFFPQSGVLIFGKQGSEKTNVDIEKVMITDEEEIRTTNPVATEQYGSVSTNLQSGNTRAATSDVNTQGVLPGMVWQDRDVYLQGPIWAKIPHTDGHFHPSPLMGGFGLKHPPPQILIKNTPVPANPSTTFSAAKFASFITQYSTGQVSVEIEWELQKENSKRWNPEIQYTSNYNKSVNVDFTVDTNGVYSEPRPIGTRYLTRNL

SEQ ID NO: 302 - DNA, 2208 bp, Adeno-associated virus
atggctgccgatggttatcttccagattggctcgaggacactctctctgaaggaataagacagtggtggaagctcaaacctggcccaccaccaccaaagcccgcagagcggcataaggacgacagcaggggtcttgtgcttcctgggtacaagtacctcggacccttcaacggactcgacaagggagagccggtcaacgaggcagacgccgcggccctcgagcacgacaaggcctacgaccggcagctcgacagcggagacaacccgtacctcaagtacgaccacgccgacgcggagtttcaggagcgccttaaagaagatacgtcttttgggggcaacctcggacgagcagtcttccaggcaaaaaagagggttcttgaacctctgggcctggttgaggagcctgttaagacggctccgggaaaaaagaggccggtagagcactctcctgtggagccagactcctcctcgggaaccggaaaagcgggcaaccagcctgcaagaaagagattgaatttcggtcagactggagacgcagactccgtacctgacccccagcctctcggacagccaccagcagccccctctggtctgggaactaatacgatggctacaggcagtggcgcaccaatggcagacaataacgatggcgccgacggagtgggtaattcctcgggaaattggcattgcgattccacatggatgggcgacagagtcatcaccaccagcacccgaacctgggctctgcccacctacaacaaccatctgtacaagcagatttccagccaatcaggagccagcaacgacaaccactactttggctacagcaccccttgggggtattttgacttcaacagattccactgccacttttcaccacgtgactggcaaagactcatcaacaacaactggggattccggcccaagagactcaacttcaagctctttaacattcaagtcagagaggtcacgcagaatgatggtacgacgacgattgccaataaccttaccagcacggttcaggtgtttactgactcggagtaccagctcccgtacgtcctcggctcggcgcatcaaggatgcctcccgccgttcccagcagacgtcttcatggtgccacagtatggatacctcaccctgaacaacgggagtcaggcagtaggacgctcttcattttactgcctggagtacttcccttctcagatgctgcgtaccggaaacaactttaccttcagctacacctttgaggatgttcctttccacagcagctacgctcacagccagagtttggaccgtctcatgaatcctctcatcgaccagtacctgtattacttgagcagaacaaacactccaagcggaaccaccacgcagtccaggcttcagttttctcaggccggagcgagtgacattcgggatcagtctaggaactggcttcctggaccctgttaccgccagcagcgagtatcaaagacatctgcggacaacaacaacagtgaatactcgtggattggagctaccaagtaccacctcaatggcagagactctctggtgaatccgggcccggcaatggccagccacaaggacgatgaagaaaagttttttcctcagagcggggttctcatctttggaaaacaaggatcagagaaaacaaatgtggacattgaaaaggtcatgattacagacgaagaggaaatcagaaccaccaatcccgtggccacggagcagtatggttctgtatctaccaacctccagagcggcaacacacaagcatctactgcagatgtcaacacacaaggcgttcttccaggcatggtctggcaggacagagacgtgtacctgcaggggcctatctgggcaaagattccgcacacggacggacattttcacccctctcccctcatgggcggattcggacttaaacaccctcctccacagattctcatcaaaaacaccccggtacctgcgaatccttcgaccaccttcagtgcggcaaagtttgcttccttcatcacacagtattccacggggcgggtcagcgtggagatcgagtgggagctacagaaggagaacagcaaacgctggaatcccgagatccagtacacttccaactacaacaaatctgttaatgtggactttactgtggacactaatggtgtgtattcagagcctcgccccattggcaccagatacctgactcgtaatctgtaa

SEQ ID NO: 303 - protein, 735 aa, Adeno-associated virus
MAADGYLPDWLEDTLSEGIRQWWKLKPGPPPPKPAERHKDDSRGLVLPGYKYLGPFNGLDKGEPVNEADAAALEHDKAYDRQLDSGDNPYLKYDHADAEFQERLKEDTSFGGNLGRAVFQAKKRVLEPLGLVEEPVKTAPGKKRPVEHSPVEPDSSSGTGKAGNQPARKRLNFGQTGDADSVPDPQPLGQPPAAPSGLGTNTMATGSGAPMADNNDGADGVGNSSGNWHCDSTWMGDRVITTSTRTWALPTYNNHLYKQISSQSGASNDNHYFGYSTPWGYFDFNRFHCHFSPRDWQRLINNNWGFRPKRLNFKLFNIQVREVTQNDGTTTIANNLTSTVQVFTDSEYQLPYVLGSAHQGCLPPFPADVFMVPQYGYLTLNNGSQAVGRSSFYCLEYFPSQMLRTGNNFTFSYTFEDVPFHSSYAHSQSLDRLMNPLIDQYLYYLSRTNTPSGTTTQSRLQFSQAGASDIRDQSRNWLPGPCYRQQRVSKTSADNNNSEYSWIGATKYHLNGRDSLVNPGPAMASHKDDEEKFFPQSGVLIFGKQGSEKTNVDIEKVMITDEEEIRTTNPVATEQYGSVSTNLQSGNTQASTADVNTQGVLPGMVWQDRDVYLQGPIWAKIPHTDGHFHPSPLMGGFGLKHPPPQILIKNTPVPANPSTTFSAAKFASFITQYSTGRVSVEIEWELQKENSKRWNPEIQYTSNYNKSVNVDFTVDTNGVYSEPRPIGTRYLTRNL

SEQ ID NO: 304 - DNA, 2217 bp, Adeno-associated virus
atggctgccgatggttatcttccagattggctcgaggacaacctctctgagggcattcgcgagtggtgggacttgaaacctggagccccgaaacccaaagccaaccagcaaaagcaggacgacggccggggtctggtgcttcctggctacaagtacctcggacccttcaacggactcgacaagggggagcccgtcaacgcggcggacgcagcggccctcgagcacgacaaggcctacgaccagcagctcaaagcgggtgacaatccgtacctgcggtataaccacgccgacgccgagtttcaggagcgtctgcaagaagatacgtcttttgggggcaacctcgggcgagcagtcttccaggccaagaagcgggttctcgaacctctcggtctggttgaggaaggcgctaagacggctcctggaaagaagagaccggtagagccatcaccccagcgttctccagactcctctacgggcatcggcaagacaggccagcagcccgcgaaaaagagactcaactttgggcagactggcgactcagagtcagtgcccgaccctcaaccaatcggagaaccccccgcaggcccctctggtctgggatctggtacaatggctgcaggcggtggcgctccaatggcagacaataacgaaggcgccgacggagtgggtagttcctcaggaaattggcattgcgattccgcatggctgggcgacagagtcatcaccaccagcacccgaccctgggccctccccacctacaacaaccacctctacaagcaaatctccaacgggacatcgggaggaagcaccaacgacaacacctacttcggctacagcaccccctgggggtattttgactttaacagattccactgccacttctcaccacgtgactggcagcgactcatcaacaacaactggggattccggcccaagagactcaacttcaagctcttcaacatccaggtcaaggaggtcacgcagaatgaaggcaccaagaccatcgccaataaccttaccagcacgattcaggtctttacggactcggaataccagctcccgtacgtcctcggctctgcgcaccagggctgcccgcctccgttcccggcggacgtcttcatgattcctcagtacgggtacctgactctgaacaacggcagtcaggccgtgggccgttcctccttctactgcctggagtactttccttctcaaatgcggagaacgggcaacaactttgagttcagctaccagtttgaggacgtgccttttcacagcagctacgcgcatagccaaagcctggaccggctgatgaaccccctcatcgaccagtacctgtactacctgtctcggactcagtccacgggaggtaccgcaggaactcagcagttgctattttctcaggccgggcctaataacatgtcggctcaggccaaaaactggctacccgggccctgctaccggcagcaacgcgtctccacgacactgtcgcaaaataacaacagcaactttgcttggaccggtgccaccaagtatcatctgaatggcagagactctctggtaaatcccggtgtcgctatggcaacgcacaaggacgacgaagagcgattttttccatccagcggagtcttgatgtttgggaaacagggagctggaaaagacaacgtggactatagcagcgttatgctaaccagtgaggaagaaatcaaaaccaccaacccagtggccacagaacagtacggcgtggtggccgataacctgcaacagcaaaacgccgctcctattgtaggggccgtcaacagtcaaggagccttacctggcatggtctggcagaaccgggacgtgtacctgcagggtcctatctgggccaagattcctcacacggacggcaactttcatccttcgccgctgatgggaggctttggactgaaacacccgcctcctcagatcctgattaagaatacacctgttcccgcggatcctccaactaccttcagtcaagccaagctggcgtcgttcatcacgcagtacagcaccggacaggtcagcgtggaaattgaatgggagctgcagaaagagaacagcaagcgctggaacccagagattcagtatacttccaactactacaaatctacaaatgtggactttgctgtcaatactgagggtacttattcagagcctcgccccattggcacccgttacctcacccgtaacctgtaa

SEQ ID NO: 305 - protein, 738 aa, Adeno-associated virus
MAADGYLPDWLEDNLSEGIREWWDLKPGAPKPKANQQKQDDGRGLVLPGYKYLGPFNGLDKGEPVNAADAAALEHDKAYDQQLKAGDNPYLRYNHADAEFQERLQEDTSFGGNLGRAVFQAKKRVLEPLGLVEEGAKTAPGKKRPVEPSPQRSPDSSTGIGKTGQQPAKKRLNFGQTGDSESVPDPQPIGEPPAGPSGLGSGTMAAGGGAPMADNNEGADGVGSSSGNWHCDSAWLGDRVITTSTRPWALPTYNNHLYKQISNGTSGGSTNDNTYFGYSTPWGYFDFNRFHCHFSPRDWQRLINNNWGFRPKRLNFKLFNIQVKEVTQNEGTKTIANNLTSTIQVFTDSEYQLPYVLGSAHQGCPPPFPADVFMIPQYGYLTLNNGSQAVGRSSFYCLEYFPSQMRRTGNNFEFSYQFEDVPFHSSYAHSQSLDRLMNPLIDQYLYYLSRTQSTGGTAGTQQLLFSQAGPNNMSAQAKNWLPGPCYRQQRVSTTLSQNNNSNFAWTGATKYHLNGRDSLVNPGVAMATHKDDEERFFPSSGVLMFGKQGAGKDNVDYSSVMLTSEEEIKTTNPVATEQYGVVADNLQQQNAAPIVGAVNSQGALPGMVWQNRDVYLQGPIWAKIPHTDGNFHPSPLMGGFGLKHPPPQILIKNTPVPADPPTTFSQAKLASFITQYSTGQVSVEIEWELQKENSKRWNPEIQYTSNYYKSTNVDFAVNTEGTYSEPRPIGTRYLTRNL

SEQ ID NO: 306 - protein, 735 aa, Adeno-associated virus
MAADGYLPDWLEDTLSEGIRQWWKLKPGPPPPKPAERHKDDSRGLVLPGYKYLGPFNGLDKGEPVNEADAAALEHDKAYDRQLDSGDNPYLKYNHADAEFQERLKEDTSFGGNLGRAVFQAKKRVLEPLGLVEEPVKTAPGKKRPVEHSPVEPDSSSGTGKAGQQPARKRLNFGQTGDADSVPDPQPLGQPPAAPSGLGSTTMATGSGAPMADNNEGADGVGNSSGNWHCDSQWLGDRVITTSTRTWALPTYNNHLYKQISSQSGASNDNHYFGYSTPWGYFDFNRFHCHFSPRDWQRLINNNWGFRPKRLNFKLFNIQVKEVTQNDGTTTIANNLTSTVQVFTDSEYQLPYVLGSAHQGCLPPFPADVFMVPQYGYLTLNNGSQAVGRSSFYCLEYFPSQMLRTGNNFQFSYTFEDVPFHSSYAHSQSLDRLMNPLVDQYLYYLNKTQTNSGTLQQSRLLFSQAGPTNMSLQAKNWLPGPCYRQQRLSKQANDNNNSNFPWTAATKYHLNGRDSLVNPGPAMASHKDDEEKFFPMHGTLIFGKQGTNANDADLENVMITDEEEIRTTNPVATEQYGTVSNNLQNSNTGPTTGTVNHQGALPGMVWQDRDVYLQGPIWAKIPHTDGHFHPSPLMGGFGLKHPPPQIMIKNTPVPANPPTNFSSAKFASFITQYSTGQVSVEIEWELQKENSKRWNPEIQYTSNYNKSVNVDFTVDTNGVYSEPRPIGTRYLTRNL

SEQ ID NO: 307 - DNA, 3158 bp, Adeno-associated virus
gattgaatttagcggccgcgaattcgcccttgctgcgtcaactggaccaatgagaactttcctttcaatgattgcgtcgacaagatggtgatctggtgggaggagggaaagatgaccgccaaggtcgtggagtcggccaaagccattctcggaggaagcaaggtgcgcgcggaccagaaatgcaagtcctcggcccagatagacccgactcccgtgattgtcacctccaacaccaacatgtgcgccgtgattgacgggaactcaacgaccttcgaacaccagcagccgttgcaagaccggatgttcaaatttgaactcacccgccgtctggatcatgactttgggaaggtcaccaagcaggaagtcaaagactttttccggtgggcaaaggatcacgtggttgaggtggagcatgaattctacgtcaaaaagggtggagctaagaaaagacccgcccccagtgacgcagatataagtgagcccaaacgggcgcgcgagtcagttgcgcagccatcgacgtcagacgcggaagcttcgatcaactacgcgggcaggtaccaaaacaaatgttctcgtcacgtgggcatgaatctgatgctgtttccctgcagacaatgcgagagaatgaatcagaattcaaatatctgcttcactcacggacagaaagactgtttagagtgctttcccgtgtcagaatctcaacccgtttctgtcgtcaaaaaggcgtatcagaaactttgctacattcatcatatcatgggaaaggtgccagacgcttgcactgcctgcgatctggtcaatgtggatttggatgactgcatctctgaacaataaatgatttaaatcaggtatggctgccgatggttatcttccagattggctcgaggacactctctctgaaggaataagacagtggtggaagctcaaacctggcccaccaccaccaaagcccgcagagcggcataaggacgacagcaggggtcttgtgcttcctgggtacaagtacctcggacccttcaacggactcgacaagggggagccggtcaacgaggcagacgccgcggccctcgagcacgacaaggcctacgaccggcagctcgacagcggagacaacccgtacctcaagtacaaccacgccgacgcggagtttcaggagcgccttaaagaagatacgtcttttgggggcaacctcggacgagcagtcttccaggcaaaaaagagggttcttgaacctctgggcctggttgaggaacctgttaaaacggctccgggaaaaaagaggccggtagagcactctcctgtggagccagactcctcctcgggaaccggaaaagcgggccagcagcctgcaagaaaaagattgaatttcggtcagactggagacgcagactccgtacctgacccccagcctctcggacagccaccagcagccccctctggtctgggatctactacaatggctacaggcagtggcgcaccaatggcagacaataacgagggtgccgatggagtgggtaattcctcgggaaattggcattgcgattcccaatggctgggcgacagagtcatcaccaccagcacccgcacctgggccctgcccacctacaacaaccacctctacaagcaaatctccagccaatcaggagcctcaaacgacaaccactactttggctacagcaccccctgggggtattttgacttcaacagattccactgccacttttcaccacgtgactggcaaagactcatcaacaacaactggggattccgacccaagagactcaacttcaagctctttaacattcaagtcaaagaggtcacgcagaatgacggtacgacgacgattgccaataaccttaccagcacggttcaggtgtttactgactcggagtaccagctcccgtacgtcctcggctcggcgcatcaaggatgcctcccgccgtttccagcggacgtcttcatggtcccacagtatggatacctcaccctgaacaacgggagtcaggcagtaggacgctcttcattttactgcctggagtactttccttctcagatgctgcgtaccggaaacaactttcaattcagctacacttttgaagacgtgcctttccacagcagctacgctcacagccagagtctggatcggctgatgaatcctctggtcgaccagtacctgtattatctgaacaagacacaaacaaatagtggaactcttcagcagtctcggctactgtttagccaagctggacccaccaacatgtctcttcaagctaaaaactggctgcctggaccttgctacagacagcagcgtctgtcaaagcaggcaaacgacaacaacaacagcaactttccctggactgcagctacaaagtatcatctaaatggccgggactcgttggttaatccaggaccagctatggccagtcacaaggatgacgaagaaaagtttttccccatgcatggaacccttatatttggtaaacaaggaacaaatgccaacgacgcggatttggaaaatgtcatgattacagatgaagaagaaatcaggaccaccaatcccgtggctacggagcagtacggaactgtatcaaataatttgcaaaactcaaacactggtccaactactggaactgtcaatcaccaaggagcgttacctggtatggtgtggcaggatcgagacgtgtacctgcagggacccatttgggccaagattcctcacaccgatggacactttcatccttctccactgatgggaggttttggactcaaacacccacctcctcaaatcatgatcaaaaacactcccgttccagccaatcctcccacaaacttcagttctgccaagtttgcttctttcatcacacagtattccacggggcaggtcagcgtggagatcgagtgggagctgcagaaggagaacagcaaacgctggaatcccgaaattcagtacacttccaactacaacaaatctgttaatgtggactttactgtggacactaatggtgtgtattcagagcctcgccccattggcaccagatacctgactcgtaatctgtaattgcttgttaatcaataaaccgtttaattcgtttcagttgaactttggtctctgcgaagggcgaattcgtttaaacctgcaggactagtccctttagtga

SEQ ID NO: 308 - protein, 735 aa, Adeno-associated virus
MAADGYLPDWLEDTLSEGIRQWWKLKPGPPPPKPAERHKDDSRGLVLPGYKYLGPFNGLDKGEPVNEADAAALEHDKAYDRQLDSGDNPYLKYNHADAEFQERLKEDTSFGGNLGRAVFQAKKRVLEPLGLVEEPVKTAPGKKRPVEHPPVEPDSSSGTGKAGQQPARKRLNFGQTGDADSVPDPQPLGQPPAAPSGLGSTTMATGSGAPMADNNEGADGVGNSSGNWHCDSQWLGDRVITTSTRTWALPTYNNHLYKQISSQSGASNDNHYFGYSTPWGYFDFNRFHCHFSPRDWQRLINNNWGFRPKRLNFKLFNIQVKEVTQNDGTTTIANNLTSTVQVFTDSEYQLPYVLGSAHQGCLPPFPADVFMVPQYGYLTLNNGSQAVGRSSFYCLEYFPSQMLRTGNNFQFSYTFEDVPFHSSYAHSQSLDRLMNPLIDQYLYYLNKTQTNSGTLQQSRLLFSQAGPTNMSLQAKNRLPGPCYRQQRLSKQANDNNNSNFPWTAATKYHLNGRDSLVNPGPAMASHKDDEEKFFPMHGTLIFGKQGTNANDADLENVMITDEEEIRTTNPVATEQYGTVSNNLQNSNTGPTTGTVNHQGALPGMVWQDRDVYLQGPIWAKIPHTDGHFHPSPLVGGFGLKHPPPQIMIKNTPVPANPPTNFSSAKFASFITQYSTGQVSVEIEWELQKENSKRWNPEIQYTSNYNKSVNVDFTVDTNGVYSEPRPIGTRYLTRNL

SEQ ID NO: 309 - DNA, 3159 bp, Adeno-associated virus
gattgaatttagcggccgcgaattcgcccttgctgcgtcaactggaccaatgagaactttcctttcaatgattgcgtcgacaagatggtgatctggtgggaggagggaaagatgaccgccaaggtcgtggagtcggccaaagccattctcggaggaagcaaggtgcgcgtggaccagaaatgcaagtcctcggcccagatagacccgactcccgtgattgtcacctccaacaccgacatgtgcgccgtgattgacgggaactcaacgaccttcgaacaccagcagccgttgcaagaccggatgttcaaatttgaactcacccgccgtctggatcatgactttgggaaggtcaccaagcaggaagtcaaagactttttccggtgggcaaaggatcacgtggttgaggtggagcatgaattctacgtcaaaaagggtggagctaagaaaagacccgcccccagtgacgcagatataagtgagcccaaacgggcgcgcgagtcagttgcgcagccatcgacgtcagacgcggaagcttcgatcaactacgcggacaggtaccaaaacaaatgttctcgtcacgtgggcatgaatctgatgctgtttccctgcagacaatgcgagagaatgaatcagaattcaaatatctgcttcactcacggacagaaagactgtttagagtgctttcccgtgtcagaatctcaacccgtttctgtcgtcaaaaaggcgtatcagaaactttgctacattcatcatatcatgggaaaggtgccagacgcttgcactgcctgcgatctggtcaatgtggatttggatgactgcatctctgaacaataaatgatttaaatcaggtatggctgccgatggttatcttccagattggctcgaggacactctctctgaaggaataagacagtggtggaagctcaaacctggcccaccaccaccaaagcccgcagagcggcataaggacgacagcaggggtcttgtgcttcctgggtacaagtacctcggacccttcaacggactcgacaagggggagccggtcaacgaggcagacgccgcggccctcgagcacgacaaggcctacgaccggcagctcgacagcggagacaacccgtacctcaagtacaaccacgccgacgcggagtttcaggagcgccttaaagaagatacgtcttttgggggcaacctcggacgagcagtcttccaggcaaaaaagagggttcttgaacctctgggcctggttgaggaacctgttaaaacggctccgggaaaaaagaggccggtagagcaccctcctgtggagccagactcctcctcgggaaccggaaaagcgggccagcagcctgcaagaaaaagattgaatttcggtcagactggagacgcagactccgtacctgacccccagcctctcggacagccaccagcagccccctctggtctgggatctactacaatggctacaggcagtggcgcaccaatggcagacaataacgagggtgccgatggagtgggtaattcctcgggaaattggcattgcgattcccaatggctgggcgacagagtcatcaccaccagcacccgcacctgggccctgcccacctacaacaaccacctctacaagcaaatctccagccaatcaggagcctcaaacgacaaccactactttggctacagcaccccctgggggtattttgacttcaacagattccactgccacttttcaccacgtgactggcaaagactcatcaacaacaactggggattccgacccaagagactcaacttcaagctctttaacattcaagtcaaagaggtcacgcagaatgacggtacgacgacgattgccaataaccttaccagcacggttcaggtgtttactgactcggagtaccagctcccgtacgtcctcggctcggcgcatcaaggatgcctcccgccgtttccagcggacgtcttcatggtcccacagtatggatacctcaccctgaacaacgggagtcaggcagtaggacgctcttcattttactgcctggagtactttccttctcagatgctgcgtaccggaaacaactttcagttcagctacacttttgaagacgtgcctttccacagcagctacgctcacagccagagtctggatcggctgatgaatcctctgatcgaccagtacctgtattatctgaacaagacacaaacaaatagtggaactcttcagcagtctcggctactgtttagccaagctggacccaccaacatgtctcttcaagctaaaaaccggctgcctggaccttgctacagacagcagcgtctgtcaaagcaggcaaacgacaacaacaacagcaactttccctggaccgcagctacaaagtatcatctaaatggccgggactcgttggttaatccaggaccagctatggccagtcacaaggatgacgaagaaaagtttttccccatgcatggaacccttatatttggtaaacaaggaacaaatgccaacgacgcggatttggaaaatgtcatgattacagatgaagaagaaatcaggaccaccaatcccgtggctacggagcagtacggaactgtatcaaataatttgcaaaactcaaacactggtccaactactggaactgtcaatcaccaaggagcgttacctggtatggtgtggcaggatcgagacgtgtacctgcagggacccatttgggccaagattcctcacaccgatggacactttcatccttctccactggtgggaggttttggactcaaacacccacctcctcaaatcatgatcaaaaacactcccgttccagccaatcctcccacaaacttcagttctgccaagtttgcttctttcatcacacagtattccacggggcaggtcagcgtggagatcgagtgggagctgcagaaggagaacagcaaacgctggaatcccgaaattcagtacacttccaactacaacaaatctgttaatgtggactttactgtggacactaatggtgtgtattcagagcctcgccccattggcaccagatacctgactcgtaatctgtaattgcttgttaatcaataaaccgtttaattcgtttcagttgaactttggtctctgcgaagggcgaattcgtttaaacctgcaggactagtccctttagtgag

SEQ ID NO: 310 - DNA, 2208 bp, Adeno-associated virus
atggctgccgatggttatcttccagattggctcgaggacactctctctgaaggaataagacagtggtggaagctcaaacctggcccaccaccaccaaagcccgcagagcggcataaggacgacagcaggggtcttgtgcttcctgggtacaagtaccttggacccttcaacggactcgacaagggagagccggtcaacgaggcagacgccgcggccctcgagcacgacaaggcctacgaccggcagctcgacagcggagacaacccgtaccccaagtacaaccacgccgacgcggagttccaggagcgtcttaaagaagatacgtcttttgggggcaacctcggacgagcagtcttccaggcgaaaaagagggttcttgaacctctgggcctggttgaggaacctgttaagacggctccgggaaaaaagaggccggtagagcactctcctgcggagccagactcctcctcgggaaccggaaaagcgggccagcagcctgcaagaaagagattgaatttcggtcagactggagacgcagactccgtacctgacccccagcctctcggacagccaccagcagccccctctggtctgggaactaatacgatggctacaggcagtggcgcaccaatggcagacaataacgagggcgccgacggagtgggtaattcctcgggaaattggcattgcgattccacatggatgggcgacagagtcatcaccaccagcacccgcacctgggctctgcccacctacaacaaccacctctacaagcagatttccagccaatcaggagcctcaaacgacaaccactactttggctacagcaccccttgggggtattttgacttcaacagattccactgccacttttcgccacgtgactggcaaagactcatcaacaacaattggggattccggcccaaaagactcaacttcaagctctttaacattcaagtcaaggaggtcacgcagaatgacggtacgacgacgattgccaataaccttaccagcacggttcaggtgtttactgactcggagtaccagctcccgtacgtcctcggctcggcgcatcaaggatgcctcccgccgttcccagcagacgtcttcatggtgccacagtatggatacctcaccctgaacaacgggagtcaggcagtaggacgctcttcattttactgcctggagtactttccttctcagatgctgcgtaccggaaacaactttaccttcagctacacctttgaggacgttcctttccacagcagctacgcccacagccagagtttggaccgtctcatgaatcctctcatcgaccagtacctgtattacttgagcagaacaaacactccaagcggaaccaccacgcagtcaaggcttcagttttctcaggccggagcaagtgacattcgggaccagtctaggaactggcttcctggaccctgttaccgccagcagcgagtatcaaagacatctgcggataacaacaacagtgaatactcgtggactggagctaccaagtaccaccttaatggaagagactctctggtgaatccgggcccggccatggccagccacaaggacgatgaagaaaagttttttcctcagagcggggttctcatctttggaaaacaagactcgggaaaaactaatgtggacattgaaaaggtcatgattacagacgaagaggaaatcaggaccaccaatcccgtggctacggagcagtatggttctgtatctaccaacctccagagcggcaacacacaagcagctacctcagatgtcaacacacaaggcgttcttccaggcatggtgtggcaggacagagacgtgtacctgcaggggcccatctgggcaaagattccacacacggacggacattttcacccctctcccctcatgggcggattcggacttaaacaccctcccccgcagattctcatcaagaacaccccggtacctgcgaatccttcgactaccttcagtgcggcaaagtttgcttccttcattacacagtactccacggggcaggtcagcgtggagatcgagtgggagctgcagaaggagaacagcaaacgctggaatcccgagattcagtacacttccaactacaacaaatctgttaatgtggactttactgtggacactaatggtgtgtattcagagcctcgccccattggcaccaggtacctgactcgtaatctgtaa

SEQ ID NO: 311 - protein, 735 aa, Adeno-associated virus
MAADGYLPDWLEDTLSEGIRQWWKLKPGPPPPKPAERHKDDSRGLVLPGYKYLGPFNGLDKGEPVNEADAAALEHDKAYDRQLDSGDNPYPKYNHADAEFQERLKEDTSFGGNLGRAVFQAKKRVLEPLGLVEEPVKTAPGKKRPVEHSPAEPDSSSGTGKAGQQPARKRLNFGQTGDADSVPDPQPLGQPPAAPSGLGTNTMATGSGAPMADNNEGADGVGNSSGNWHCDSTWMGDRVITTSTRTWALPTYNNHLYKQISSQSGASNDNHYFGYSTPWGYFDFNRFHCHFSPRDWQRLINNNWGFRPKRLNFKLFNIQVKEVTQNDGTTTIANNLTSTVQVFTDSEYQLPYVLGSAHQGCLPPFPADVFMVPQYGYLTLNNGSQAVGRSSFYCLEYFPSQMLRTGNNFTFSYTFEDVPFHSSYAHSQSLDRLMNPLIDQYLYYLSRTNTPSGTTTQSRLQFSQAGASDIRDQSRNWLPGPCYRQQRVSKTSADNNNSEYSWTGATKYHLNGRDSLVNPGPAMASHKDDEEKFFPQSGVLIFGKQDSGKTNVDIEKVMITDEEEIRTTNPVATEQYGSVSTNLQSGNTQAATSDVNTQGVLPGMVWQDRDVYLQGPIWAKIPHTDGHFHPSPLMGGFGLKHPPPQILIKNTPVPANPSTTFSAAKFASFITQYSTGQVSVEIEWELQKENSKRWNPEIQYTSNYNKSVNVDFTVDTNGVYSEPRPIGTRYLTRNL

SEQ ID NO: 312 - DNA, 2208 bp, Adeno-associated virus
atggctgccgatggttatcttccagattggctcgaggacactctctctgaaggaataagacagtggtggaagctcaaacctggcccaccaccaccaaagcccgcagagcggcataaggacgacagcaggggtcttgtgcttcctgggtacaagtaccttggacccttcaacggactcgacaagggagagccggtcaacgaggcagacgccgcggccctcgagcacgacaaggcctacgaccggcagctcgacggcggagacaacccgtacctcaagtacaaccacgccgacgcggagttccaggagcgtcttaaagaagatacgtcttttgggggcaacctcggacgagcagtcttccaggcgaaaaagagggttcttgaacctctgggcctggttgaggaacctgttaagacggctccgggaaaaaagaggccggtagagcactctcttgcggagccagactcctcctcgggaaccggaaaagcgggccagcagcctgcaagaaggagattgaatttcggtcagactggagacgcagactccgtacctgacccccagcctctcggacagccaccagcagccccctctggtctgggaactaatacgatggctacaggcagtggcgcaccaatggcagacaataacgagggcgccgacggagtgggtaattcctcgggaaattggcattgcgattccacatggatgggcgacagagtcatcaccaccagcacccgcacctgggctctgcccacctacaacaaccacctctacaggcagatttccagccaatcaggagcctcaaacgacaaccactactttggctacagcaccccttgggggtattttgacttcaacagattccactgccacttttcgccacgtgactggcaaagactcatcaacaacaattggggatcccggcccaaaagactcaacttcaagctctttaacattcaagtcaaggaggtcacgcagaatgacggtacgacgacgattgccaataaccttaccagcacggttcaggtgtttactgactcggagtaccagctcccgtacgtcctcggctcggcgcatcaaggatgcctcccgccgttcccagcagacgtcttcatggtgccacagtatggatacctcaccctgaacaacgggagtcaggcagtaggacgctcttcattttactgcctggagtactttccttctcagatgctgcgtaccggaaacaactttaccttcagctacacctttgaggacgttcctttccacagcagctacgcccacagccagagtttggaccgtctcatgaatcctctcgtcgaccagtacctgtattacttgagcagaacaaacactccaagcggaaccaccacgcagtcaaggcttcagttttctcaggccggagcaagtgacattcgggaccagtctaggaactggcttcctggaccctgttaccgccagcagcgagtatcaaagacatctgcggataacaacaacagtgaatactcgtggactggagctaccaagtaccaccttaatggaagagactctctggtgaatccgggcccggccatggccagccacaaggacgatgaagaaaagttttttcctcagagcggggttctcatctttggaaaacaagactcgggaaaaactaatgtggacattgaaaaggtcatgattacagacgaagaggaaatcaggaccaccaatcccgtggctacggagcagtatggttctgtatctaccaacctccagagcggcaacacacaagcagctacctcagatgtcaacacacaaggcgttcttccaggcatggtgtggcaggacagagacgtgtacctgcaggggcccatctgggcaaagattccacacacggacggacattttcacccctctcccctcatgggcggattcggacttaaacaccctcccccgcagattctcatcaagaacaccccggtacctgcgaatccttcgactaccttcagtgcggcaaagtttgcttccttcattacacagtactccacggggcaggtcagcgtggagatcgagtgggagctgcagaaggagaacagcaaacgctggaatcccgagattcagtacacttccaactacaacaaatctgttaatgtggactttactgtggacactaatggtgtgtattcagagcctcgccccattggcaccagatacctgactcgtaatctgtaa

SEQ ID NO: 313 - protein, 735 aa, Adeno-associated virus
MAADGYLPDWLEDTLSEGIRQWWKLKPGPPPPKPAERHKDDSRGLVLPGYKYLGPFNGLDKGEPVNEADAAALEHDKAYDRQLDGGDNPYLKYNHADAEFQERLKEDTSFGGNLGRAVFQAKKRVLEPLGLVEEPVKTAPGKKRPVEHSLAEPDSSSGTGKAGQQPARRRLNFGQTGDADSVPDPQPLGQPPAAPSGLGTNTMATGSGAPMADNNEGADGVGNSSGNWHCDSTWMGDRVITTSTRTWALPTYNNHLYRQISSQSGASNDNHYFGYSTPWGYFDFNRFHCHFSPRDWQRLINNNWGSRPKRLNFKLFNIQVKEVTQNDGTTTIANNLTSTVQVFTDSEYQLPYVLGSAHQGCLPPFPADVFMVPQYGYLTLNNGSQAVGRSSFYCLEYFPSQMLRTGNNFTFSYTFEDVPFHSSYAHSQSLDRLMNPLVDQYLYYLSRTNTPSGTTTQSRLQFSQAGASDIRDQSRNWLPGPCYRQQRVSKTSADNNNSEYSWTGATKYHLNGRDSLVNPGPAMASHKDDEEKFFPQSGVLIFGKQDSGKTNVDIEKVMITDEEEIRTTNPVATEQYGSVSTNLQSGNTQAATSDVNTQGVLPGMVWQDRDVYLQGPIWAKIPHTDGHFHPSPLMGGFGLKHPPPQILIKNTPVPANPSTTFSAAKFASFITQYSTGQVSVEIEWELQKENSKRWNPEIQYTSNYNKSVNVDFTVDTNGVYSEPRPIGTRYLTRNL

SEQ ID NO: 314 - protein, 738 aa, Adeno-associated virus
MAADGYLPDWLEDNLSEGIREWWDLKPGAPKPKANQQKQDDGRGLVLPGYKYLGPFNGLDKGEPVNAADAAALEHDKAYDQQLKAGDNPYLRYNHADAEFQERLQEDTSFGGNLGRAVFQAKKRVLEPLGLVEEAAKTAPGKKRPVEPSPQRSPDSSAGIGKKGQQPAKKRLNFGQTGDSESVPDPQPIGEPPAGPSGLGSGTMAAGGGAPMADNNEGADGVGSSSGNWHCDSTWLGDRVITTSTRTWALPTYNNHLYKQISNGTSGGSTNDNTYFGYSTPWGYFDFNRFHCHFSPRDWQRLINNNWGFRPKRLSFKLFNIQVKEVTQNEGTETIANNLTSTIQVFTDSEYQLPYVLGSAHQGCLPPFPADVFMIPQYGYLTLNNGSQAVGRSSFYCLEYFPSQMLRTGNNFEFSYTFEDVPFHSSCAHSQSSDRLMNPLIDQYLYYLSRTRSTGGTQGTQQLLFSQAGPANMSAQAKNWLPGPCYRQQRVSTTLSQNNNSNFAWTGATKYHLNGRDSLVNPGVAMATHKDDEERFFPSSGVLMFGKQGAGRDNVDYSSVMLTSEEEIKTTNPVATEQYGVVADNLQQTNTGPIVGNVNSQGALPGMVWQNRDVYLQGPIWAKIPHTDGNFHPSPLMGGFGLKHPPPQILIKNTPVPADPPTTFSQAKLASFITQYSTGQVSVEIEWELQKENSKRWNPEIQYTSNYYKSTNVDFAVNTEGTYSEPRPIGTRYLTRNL

SEQ ID NO: 315 - DNA, 2217 bp, Adeno-associated virus
atggctgctgacggttatcttccagattggctcgaggacaacctctctgagggcattcgcgagtggtgggacctgaaacctggagcccccaagcccaaggccaaccagcagaagcaggacgacggccggggtctggtgcttcttggctacaagtacctcggacccttcaacggactcgacaagggggagcccgtcaatgcggcggacgcagcggccctcgagcacgacaaggcctacgaccagcagctcaaagcgggtgacaatccgtacctgcggtataaccacgccgacgccgagtttcaggagcgtctgcaagaagatacgtcttttgggggcaacctcgggcgagcagtcttccaggccaagaagcgggttctcgaacctctcggtctggttgaggaagctgctaagacggctcctggaaagaagagaccggtagaaccgtcacctcagcgttcccccgactcctccacgggcatcggcaagaaaggccagcagcccgctaaaaagagactgaactttggtcagactggcgactcagagtcagtccccgaccctcaaccaatcggagaaccaccagcaggcccctctggtctgggatctggtacaatggctgcaggcggtggcgctccaatggcagacaataacgaaggcgccgacggagtgggtagttcctcaggaaattggcattgcgattccacatggctgggcgacagagtcatcaccaccagcacccgaacctgggccctgcccacctacaacaaccacctctacaagcaaatatccaatgggacatcgggaggaagcaccaacgacaacacctacttcggctacagcaccccctgggggtattttgacttcaacagattccactgccacttctcaccacgtgactggcagcgactcatcaacaacaactggggattccggccaaaaagactcagcttcaagctcttcaacatccaggtcaaggaggtcacgcagaatgaaggcaccaagaccatcgccaataaccttaccagcacgattcaggtatttacggactcggaataccagctgccgtacgtcctcggctccgcgcaccagggctgcctgcctccgttcccggcggacgtcttcatgattccccagtacggctaccttacactgaacaatggaagtcaagccgtaggccgttcctccttctactgcctggaatattttccatctcaaatgctgcgaactggaaacaattttgaattcagctacaccttcgaggacgtgcctttccacagcggctacgcacacagccagagcttggaccgactgatgaatcctctcatcgaccagtacctgtactacttatccagaactcagtccacaggaggaactcaaggtacccagcaattgttattttctcaagctgggcctgcaaacatgtcggctcaggctaagaactggctacctggaccttgctaccggcagcagcgagtctctacgacactgtcgcaaaacaacaacagcaactttgcttggactggtgccaccaaatatcacctgaacggaagagactctttggtaaatcccggtgtcgccatggcaacccacaaggacgacgaggaacgcttcttcccgtcgagtggagtcctgatgtttggaaaacagggtgctggaagagacaatgtggactacagcagcgttatgctaaccagcgaagaagaaattaaaaccactaaccctgtagccacagaacaatacggtgtggtggctgacaacttgcagcaaaccaatacagggcctattgtgggaaatgtcaacagccaaggagccttacctggcatggtctggcagaaccgagacgtgtacctgcagggtcccatctgggccaagattcctcacacggacggcaacttccacccttcaccgctaatgggaggatttggactgaagcacccacctcctcagatcctgatcaagaacacgccggtacctgcggatcctccaacgacgttcagccaggcgaaattggcttccttcattacgcagtacagcaccggacaggtcagcgtggaaatcgagtgggagctgcagaaggagaacagcaaacgctggaacccagagattcagtacacttcaaactactacaaatctacaaatgtggactttgctgtcaatacagagggaacttattctgagcctcgccccattggtactcgttacctcacccgtaatctgtaa

SEQ ID NO: 316 - protein, 738 aa, Adeno-associated virus
MAADGYLPDWLEDNLSEGIREWWDLKPGAPKPKANQQKQDDGRGLVLLGYKYLGPFNGLDKGEPVNAADAAALEHDKAYDQQLKAGDNPYLRYNHADAEFQERLQEDTSFGGNLGRAVFQAKKRVLEPLGLVEEAAKTAPGKKRPVEPSPQRSPDSSTGIGKKGQQPAKKRLNFGQTGDSESVPDPQPIGEPPAGPSGLGSGTMAAGGGAPMADNNEGADGVGSSSGNWHCDSTWLGDRVITTSTRTWALPTYNNHLYKQISNGTSGGSTNDNTYFGYSTPWGYFDFNRFHCHFSPRDWQRLINNNWGFRPKRLSFKLFNIQVKEVTQNEGTKTIANNLTSTIQVFTDSEYQLPYVLGSAHQGCLPPFPADVFMIPQYGYLTLNNGSQAVGRSSFYCLEYFPSQMLRTGNNFEFSYTFEDVPFHSGYAHSQSLDRLMNPLIDQYLYYLSRTQSTGGTQGTQQLLFSQAGPANMSAQAKNWLPGPCYRQQRVSTTLSQNNNSNFAWTGATKYHLNGRDSLVNPGVAMATHKDDEERFFPSSGVLMFGKQGAGRDNVDYSSVMLTSEEEIKTTNPVATEQYGVVADNLQQTNTGPIVGNVNSQGALPGMVWQNRDVYLQGPIWAKIPHTDGNFHPSPLMGGFGLKHPPPQILIKNTPVPADPPTTFSQAKLASFITQYSTGQVSVEIEWELQKENSKRWNPEIQYTSNYYKSTNVDFAVNTEGTYSEPRPIGTRYLTRNL

SEQ ID NO: 317 - protein, 735 aa, Adeno-associated virus
MAADGYLPDWLEDTLSEGIRQWWKLKPGPPPPKPAERHKDDSRGLVLPGYKYLGPFNGLDKGEPVNEADAAALEHDKAYDRQLDSGDNPYLKYNHADAEFQERLKEDTSFGGNLGRAVFQAKKRVLEPLGLVEPPVKTAPGKKRPVEHSPAEPDSSSGTGKAGQQPARKRLNFGQTGDADSVPDPQPLGQPPAAPSGLGSTTMATGSGAPMADNNEGADGVGNSSGNWHCDSQWLGDRVITTSTRTWALPTYNNHLYKQISSQSGASNDNHYFGYSTPWGYFDFNRFHCHFSPRDWQRLINNNWGFRPKRLNFKLFNIQVKEVTQNDGTTTIANNLTSTVQVFTDSEYQLPYVLGSAHQGCLPPFPADVFMVPQYGYLTLNNGSQAVGRSSFYCLEYFPSQMLRTGNNFQFSYTFEDVPFHSSYAHSQSLDRLMNPLIDQYLYYLNKTQSNSGTLQQSRLLFSQAGPTSMSLQAKNWLPGPCYRQQRLSKQANDNNNSNFPWTAATKYHLNGRDSLVNPGPAMASHKDDEEKFFPMHGTLIFGKQGTNANDADLDNVMITDEEEIRTTNPVATEQYGYVSNNLQNSNTGPTTGTVNHQGALPGMVWQDRDVYLQGPIWAKIPHTDGHFHPSPLMGGFGLKHPPPQIMIKNTPVPANPPTNFSSAKFASFITQYSTGQVSVEIEWELQKENSKRWNPEIQYTSNYNKSVNVDFTVDTNGVYSEPRPIGTRYLTRNL

SEQ ID NO: 318 - protein, 735 aa, Adeno-associated virus
MAADGYLPDWLEDTLSEGIRQWWKLKPGPPPPKPAERHKDDSRGLVLPGYKYLGPFNGLDKGEPVNEADAAALEHDKAYDRQLDSGDNPYLKYNHADAEFQERLKEDTSFGGNLGRAVFQAKKRVLEPLGLVEGPVKTAPGKKRPVEHSPAEPDSSSGTGKAGQQPARKRLNFGQTGDADSVPDPQPLGQPPAAPSGLGSTTMATGSGAPMADNNEGADGVGNSSGNWHCDSQWLGDRVITTSTRTWALPTYNNHLYKQISSQSGASNDNHYFGYSTPWGYFDFNRFHCHFSPRDWQRLINNNWGFRPKRLNFKLFNIQVKEVTQNDGTTTIANNLTSTVQVFTDSEYQLPYVLGSAHQGCLPPFPADVFMVPQYGYLTLNNGSQAVGRSSFYCLEYFPSQMLRTGNNFQFSYTFEDVPFHSSYAHSQSLDRLMNPLIDQYLYYLNKTQSNSGTLQQSRLLFSQAGPTSMSLQAKNWLPGPCYRQQRLSKQANDNNNSNFPWTAATKYHLNGRDSLVNPGPAMASHKDDEEKFFPMHGTLIFGKQGTNANDADLDNVMITDEEEIRTTNPVATEQYGYVSNNLQNSNTGPTTGTVNHQGALPGMVWQDRDVYLQGPIWAKIPHTDGHFHPSPLMGGFGLKHPPPQIMIKNTPVPANPPTNFSSAKFASFITQYSTGQVSVEIEWELQKENSKRWNPEIQYTSNYNKSVNVDFTVDTNGVYSEPRPIGTRYLTRNL

SEQ ID NO: 319 - DNA, 2208 bp, Adeno-associated virus
atggctgccgatggttatcttccagattggctcgaggacactctctctgaaggaataagacagtggtggaagctcaaacctggcccaccaccaccaaagcccgcagagcggcataaggacgacagcaggggtcttgtgcttcctgggtacaagtacctcggacccttcaacggactcgacaagggggagccggtcaacgaggcagacgccgcggccctcgagcacgacaaggcctacgaccggcagctcgacagcggagacaacccgtacctcaagtacaaccacgccgacgcggagtttcaggagcgtcttaaagaagatacgtcttttgggggcaacctcggacgagcagtcttccaggcgaaaaagagggttcttgaacctctgggcctggttgagggacctgttaagacggctccgggaaaaaagaggccggtagagcactctcctgcggagccagactcctcctcgggaaccggaaaagcgggccagcagcctgcaagaaaaagattgaattttggtcagactggagacgcagactccgtacctgacccccagcctctcggacagccaccagcagccccctctggtttgggatctactacaatggctacaggcagtggcgcaccaatggcagacaataacgagggtgccgatggagtgggtaattcctcaggaaattggcattgcgattcccaatggctgggcgacagagtcatcaccaccagcacccgaacctgggccctgcccacctacaacaaccacctctacaagcaaatctcaagccaatcaggagcctcaaacgacaaccactactttggctacagcaccccttgggggtattttgacttcaacagattccactgccacttttcaccacgtgactggcaaagactcatcaacaacaactggggattccgacccaagagactcaacttcaagctctttaacattcaagtcaaagaggtcacgcagaatgacggtacgacgacgattgccaataaccttaccagcacggttcaggtgtttactgactcggagtaccagctcccgtacgtcctcgggtcggcgcatcaaggatgcctcccgccgtttccagcggacgtcttcatggtcccacagtatggatacctcaccctgaacaacgggagtcaggcggtaggacgctcttccttttactgcctggagtactttccttctcagatgcttcgtactggaaacaactttcagttcagctacacctttgaagacgttcctttccacagcagctacgctcacagccagagtctggatcggctgatgaatcctctgatcgaccagtacctgtattatctgaacaaaacacaatcaaatagtggaactcttcagcagtctcggctactgtttagtcaagctggacccaccagcatgtctcttcaagctaaaaactggctacctggaccttgctacagacagcagcgtctgtcaaagcaggcaaacgacaacaacaacagcaactttccctggactgcggctacaaagtatcacctaaatggccgggactcgttggttaatccaggaccagctatggccagtcacaaagacgatgaagaaaagtttttccccatgcatggaaccctgatatttggtaaacaaggaacaaatgctaacgacgcggatttggacaatgtcatgattacagatgaagaagaaatccgcaccaccaatcccgtggctacggagcagtacggatatgtgtcaaataatttgcaaaactcaaatactggtccaactactggaactgtcaatcaccaaggagcgttacctggcatggtgtggcaggatcgagacgtgtacctgcagggacccatttgggccaagattcctcacaccgatggacactttcatccttctccactgatgggaggttttgggctcaaacacccgcctcctcagatcatgatcaaaaacactcccgttccagccaatcctcccacaaacttcagttctgccaagtttgcttctttcatcacacagtattccacggggcaggtcagcgtggagatcgagtgggagctgcagaaagagaacagcaaacgctggaatcccgaaattcagtacacttccaactacaacaaatctgttaatgtggactttactgtggacactaatggcgtgtattcagagcctcgccccattggcaccagatacctgactcgtaatctgtaa

SEQ ID NO: 320 - DNA, 2211 bp, Adeno-associated virus; identical to SEQ ID NO: 1

SEQ ID NO: 321 - DNA, 2208 bp, Adeno-associated virus
atggctgccgatggttatcttccagattggctcgaggacactctctctgaaggaacaagacagtggtggaagctcaaacctggcccaccaccaccaaagcccgcagagcggcataaggacgacagcaggggtcttgtgcttcctgggtacaagtacctcggacccttcaacggactcgacaagggggagccggtcaacgaggcagacgccgcggccctcgagcacgacaaggcctacgaccggcagctcgacagcggagacaacccgtacctcaagtacaaccacgccgacgcggagtttcaggagcgtcttaaagaagatacgtcttttgggggcaacctcggacgagcagtcttccaggcgaaaaagagggttcttgaacctctgggcctggttgaggaacctgttaagacggctccgggaaaaaagaggccggtagagcactctcctgcggagccagactcctcctcgggaaccggaaaagcgggccagcagcctgcaagaaaaagattgaattttggtcagactggagacgcagactccgtacctgacccccagcctctcggacagccaccagcagccccctctggtttgggatctactacaatggctacaggcagtggcgcaccaatggcagacaataacgagggtgccgatggagtgggtaattcctcaggaaattggcattgcgattcccaatggctgggcgacagagtcatcaccaccagcacccgaacctgggccctgcccacctacaacaaccacctctacaagcaaatctcaagccaatcaggagcctcaaacgacaaccactactttggctacagcaccccttgggggtattttgacttcaacagattccactgccacttttcaccacgtgactggcaaagactcatcaacaacaactggggattccgacccaagagactcaacttcaagctctttaacattcaagtcaaagaggtcacgcagaatgacggtacgacgacgattgccaataaccttaccagcacggttcaggtgtttactgactcggagtaccagctcccgtacgtcctcgggtcggcgcatcaaggatgcctcccgccgtttccagcggacgtcttcatggtcccacagtatggatacctcaccctgaacaacgggagtcaggcggtaggacgctcttccttttactgcctggagtactttccttctcagatgcttcgtactggaaacaactttcagttcagctacacctttgaagacgttcctttccacagcagctacgctcacagccagagtctggatcggctgatgaatcctctgatcgaccagtacctgtattatctgaacaaaacacaatcaaatagtggaactcttcagcagtctcggctactgtttagtcaagctggacccaccagcatgtctcttcaagctaaaaactggctacctggaccttgctacagacagcagcgtctgtcaaagcaggcaaacgacaacaacaacagcaactttccctggactgcggctacaaagtaccacctaaatggccgggactcgttggttaatccaggaccagctatggccagtcacaaagacgatgaagaaaagtttttccccatgcatggaaccctgatatttggtaaacaaggaacaaatgctaacgacgcggatttggacaatgtcatgattacagatgaagaagaaatccgcaccaccaatcccgtggctacggagcagtacggatatgtgtcaaataatttgcaaaactcaaatactggtccaactactggaactgtcaatcaccaaggagcgttacctggcatggtgtggcaggatcgagacgtgtacctgcagggacccatttgggccaagattcctcacaccgatggacactttcatccttctccactgatgggaggttttgggctcaaacacccgcctcctcagatcatgatcaaaaacactcccgttccagccaatcctcccacaaacttcagttctgccaagtttgcttctttcatcacacagtattccacggggcaggtcagcgtggagatcgagtgggagctgcagaaagagaacagcaaacgctggaatcccgaaattcagtacacttccaactacaacaaatctgttaatgtggactttactgtggacactaatggcgtgtattcagagcctcgccccattggcaccagatacctgactcgtaatctgtaa

SEQ ID NO: 322 - DNA, 2217 bp, Adeno-associated virus
atggctgctgacggttatcttccagattggctcgaggacaacctctctgagggcattcgcgagtggtgggacctgaaacctggagcccccaagcccaaggccaaccagcagaagcaggacgacggccggggtctggtgcttcctggctacaagtacctcggacccttcaacggactcgacaagggggagcccgtcaacgcggcggacgcagcggccctcgagcacgacaaggcctacgaccagcagctcaaagcgggtgacaatccgtacctgcggtataaccacgccgacgccgagtttcaggagcgtctgcaagaagatacgtcttttgggggcaacctcgggcgagcagtcttccaggccaagaagcgggttctcgaacctctcggtctggttgaggaagctgctaagacggctcctggaaagaagagaccggtagaaccgtcacctcagcgttcccccgactcctccacgggcatcggcaagaaaggccagcagcccgctaaaaagagactgaactttggtcagactggcgactcagagtcagtccccgaccctcaaccaatcggagaaccacctgcaggcccctctggtctgggatctggtacaatggctgcaggcggtggcgctccaatggcagacaataacgaaggcgccgacggagtgggtagttcctcaggaaattggcattgcgattccacatggctgggcgacagagtcatcaccaccagcacccgaacctgggccctgcccacctacaacaaccacctctacaagcaaatatccaatgggacatcgggagggagcaccaacgacaacacctacttcggctacagcaccccctgggggtattttgacttcaacagattccactgccacttctcaccacgtgactggcagcgactcatcaacaacaactggggattccggccaaaaagactcagcttcaagctcttcaacatccaggtcaaggaggtcacgcagaatgaaggcaccaagaccatcgccaataaccttaccagcacgattcaggtatttacggactcggaataccagctgccgtacgtcctcggctccgcgcaccagggctgcctgcctccgttcccggcggacgtcttcatgattccccagtacggctaccttacactgaacaatggaagtcaagccgtaggccgttcctccttctactgcctggaatattttccatctcaaatgctgcgaactggaaacaattttgaattcagctacaccttcgaggacgtgcctttccacagcagctacgcacacagccagagcttggaccgactgatgaatcctctcatcgaccagtacctgtactacttatccagaactcagtccacaggaggaactcaaggtacccagcaattgttattttctcaagctgggcctgcaaacatgtcggctcaggctaagaactggctacctggaccttgctaccggcagcagcgagtctctacgacactgtcgcaaaacaacaacagcaactttgcttggactggtgccaccaaatatcacctgaacggaagagactctttggtaaatcccggtgtcgccatggcaacccacaaggacgacgaggaacgcttcttcccgtcgagtggagtcctgatgtttggaaaacagggtgctggaagagacaatgtggactacagcagcgttatgctaaccagcgaagaagaaattaaaaccactaaccctgtagccacagaacaatacggtgtggtggctgacaacttgcagcaaaccaatacagggcctattgtgggaaatgtcaacagccaaggagccttacctggcatggtctggcagaaccgagacgtgtacctgcagggtcccatctgggccaagattcctcacacggacggcaactgccacccttcaccgctaatgggaggatttggactgaagcacccacctcctcagatcctgatcaagaacacgccggtacctgcggatcctccaacaacgttcagccaggcgaaattggcttccttcattacgcagtacagcaccggacaggtcagcgtggaaatcgagtgggagctgcagaaggagaacagcaaacgctggaacccagagattcagtacacttcaaactactacaaatctacaaatgtggactttgctgtcaatacagagggaacttattctgagcctcgccccattggtactcgttacctcacccgtaatctgtaa

SEQ ID NO: 323 - protein, 735 aa, Adeno-associated virus
MAADGYLPDWLEDTLSEGTRQWWKLKPGPPPPKPAERHKDDSRGLVLPGYKYLGPFNGLDKGEPVNEADAAALEHDKAYDRQLDSGDNPYLKYNHADAEFQERLKEDTSFGGNLGRAVFQAKKRVLEPLGLVEEPVKTAPGKKRPVEHSPAEPDSSSGTGKAGQQPARKRLNFGQTGDADSVPDPQPLGQPPAAPSGLGSTTMATGSGAPMADNNEGADGVGNSSGNWHCDSQWLGDRVITTSTRTWALPTYNNHLYKQISSQSGASNDNHYFGYSTPWGYFDFNRFHCHFSPRDWQRLINNNWGFRPKRLNFKLFNIQVKEVTQNDGTTTIANNLTSTVQVFTDSEYQLPYVLGSAHQGCLPPFPADVFMVPQYGYLTLNNGSQAVGRSSFYCLEYFPSQMLRTGNNFQFSYTFEDVPFHSSYAHSQSLDRLMNPLIDQYLYYLNKTQSNSGTLQQSRLLFSQAGPTSMSLQAKNWLPGPCYRQQRLSKQANDNNNSNFPWTAATKYHLNGRDSLVNPGPAMASHKDDEEKFFPMHGTLIFGKQGTNANDADLDNVMITDEEEIRTTNPVATEQYGYVSNNLQNSNTGPTTGTVNHQGALPGMVWQDRDVYLQGPIWAKIPHTDGHFHPSPLMGGFGLKHPPPQIMIKNTPVPANPPTNFSSAKFASFITQYSTGQVSVEIEWELQKENSKRWNPEIQYTSNYNKSVNVDFTVDTNGVYSEPRPIGTRYLTRNL

SEQ ID NO: 324 - DNA, 2208 bp, Adeno-associated virus
atggctgccgatggttatcttccagattggctcgaggacactctctctgaaggaataagacagtggtggaagctcaaacctggcccaccaccaccaaagcccgcagagcggcatcaggacaacagcaggggtcttgtgcttcctgggtacaagtacctcggaccctccaacggactcgacaaaggagagccggtcaacgaggcagacgccgcggccctcgagcacgacaaggcctacgaccggcagctcgacagcggagacaacccgtacctcaagtacaaccacgccgacgcggagtttcaggagcgtcttaaagaagatacgtcttttgggggcaacctcggacgagcagtcttccaggcgaaaaagagggttcttgaacctctgggcctggttgaggaacctgttaagacggctccgggaaaaaagaggccggtagagcactctcctgtggagccagactcctcctcgggaaccggaaaagcgggccatcagcctgcgagaaagagattgaattttggtcagactggagacgcagactccgtacctgacccccagcctctcggacagccaccagcagcccccacaagtttgggatctactacaatggctacaggcagtggcgcaccaatggcagacaataacgagggtgccgatggagtgggtaattcctcaggaaattggcattgcgattcccaatggctgggcgacagagtcatcaccaccagcacccgaacctgggccctgcccacctacaacaaccacctctacaagcaaatctccagccaatcaggagcctcgaacgacaaccactactttggctgcagcaccccctgggggtattttgacttcaacagattccactgtcacttctccccacgtgattggcaaagactcatcaacaacaactggggattccgacccaagagactcaacttcaagctctttaacattcaagtcaaagaggtcacgcagaatgacggtacgacgacgattgccaataaccttaccagcacggttcaggtgtttactgactcggagtacccgctcccgtacgtcctcggctcggcgcatcaaggatgcctcccgccgtttccagcggacgtcttcatggtcccacagtatggatacctcaccctgaacaacgggagtcaggcggtaggacgctcttccttttactgcctggagtactttccttctcagatgctgcgtaccggaaacaactttaccttcagctacacctttgaggacgttcctttccacagcagctacgctcacagccagagtttggaccggctgatgaatcctctgatcgaccagtatctatattatctgaacaggacacaatcaaatagtggaactcttcagcagtctaggctactgtttagccaagctggacccaccagcatgtctcttcaagctaaaaactggctgcctggaccttgctacagacagcagcgtctttcaaagcaggcaaacgacaacaacaacagcaactttccctggactgcggctacaaagtatcatctaaatggccgggactcgttggttaatccaggaccagctatggccagccacaaagacgatgaagaaaagtttttccccatgcatggaaccctgatatttggtaaacaaggaacaaatgctaacgacgcggatttggagcatgttatgattacagatgaagaagaaatcaggaccaccaatcctgtggctacagagcagtacggaaacgtgtcaaataatttgcaaaactcaaatactggtccaactacagaaaatgtcaatcaccagggagcgttacctggtatggtgtggcaggatcgagacgtgtacctgcagggacccatttgggccaagattcctcacaccgacggacactttcacccttctccactgatgggaggttttggactcaaacacccgcctcctcaaatcatgatcaaaaacactcccgttccagccaatcctcccacaaacttcagttctgccaagtttgcttctttcatcacacagtattccacgggccaggtcagcgtggagattgagtgggagctgcagaaggagaacagcaaacgctggaaccccgagatccagtatacttccaactacaacaaatctgttaatgtggactttactgtggacactaatggtgtgtattcagagccttgccccattggcaccagatacctgactcgtaatctgtaa

SEQ ID NO: 325 - protein, 735 aa, Adeno-associated virus
MAADGYLPDWLEDTLSEGIRQWWKLKPGPPPPKPAERHQDNSRGLVLPGYKYLGPSNGLDKGEPVNEADAAALEHDKAYDRQLDSGDNPYLKYNHADAEFQERLKEDTSFGGNLGRAVFQAKKRVLEPLGLVEEPVKTAPGKKRPVEHSPVEPDSSSGTGKAGHQPARKRLNFGQTGDADSVPDPQPLGQPPAAPTSLGSTTMATGSGAPMADNNEGADGVGNSSGNWHCDSQWLGDRVITTSTRTWALPTYNNHLYKQISSQSGASNDNHYFGCSTPWGYFDFNRFHCHFSPRDWQRLINNNWGFRPKRLNFKLFNIQVKEVTQNDGTTTIANNLTSTVQVFTDSEYPLPYVLGSAHQGCLPPFPADVFMVPQYGYLTLNNGSQAVGRSSFYCLEYFPSQMLRTGNNFTFSYTFEDVPFHSSYAHSQSLDRLMNPLIDQYLYYLNRTQSNSGTLQQSRLLFSQAGPTSMSLQAKNWLPGPCYRQQRLSKQANDNNNSNFPWTAATKYHLNGRDSLVNPGPAMASHKDDEEKFFPMHGTLIFGKQGTNANDADLEHVMITDEEEIRTTNPVATEQYGNVSNNLQNSNTGPTTENVNHQGALPGMVWQDRDVYLQGPIWAKIPHTDGHFHPSPLMGGFGLKHPPPQIMIKNTPVPANPPTNFSSAKFASFITQYSTGQVSVEIEWELQKENSKRWNPEIQYTSNYNKSVNVDFTVDTNGVYSEPCPIGTRYLTRNL

SEQ ID NO: 326 - DNA, 2214 bp, Artificial Sequence
  Description of Artificial Sequence: Synthetic polynucleotide
atggctgccgatggttatcttccagattggctcgaggacaaccttagtgaaggaattcgcgagtggtgggctttgaaacctggagcccctcaacccaaggcaaatcaacaacatcaagacaacgctcgaggtcttgtgcttccgggttacaaataccttggacccggcaacggactcgacaagggggagccggtcaacgcagcagacgcggcggccctcgagcacgacaaggcctacgaccagcagctgcaggcgggtgacaatccgtacctgcggtataaccacgccgacgccgagtttcaggagcgtctgcaagaagatacgtcttttgggggcaaccttggcagagcagtcttccaggccaaaaagaggatccttgagcctcttggtctggttgaggaagcagctaaaacggctcctggaaagaagaggcctgtagatcagtctcctcaggaaccggactcatcatctggtgttggcaaatcgggcaaacagcctgccagaaaaagactaaatttcggtcagactggcgactcagagtcagtcccagaccctcaacctctcggagaaccaccagcagcccccacaagtttgggatctaatacaatggcttcaggcggtggcgcaccaatggcagacaataacgagggtgccgatggggtgggtagttcctcgggaaattggcattgcgattcccaatggctgggggacagagtcatcaccaccagcacccgaacctgggccctgcccacctacaacaatcacctctacaagcaaatctccaacgggacatcgggaggagccaccaacgacaacacctacttcggctacagcaccccctgggggtattttgactttaacagattccactgccacttttcaccacgtgactggcagcgactcatcaacaacaactggggattccggcccaagagactcagcttcaagctcttcaacatccaggtcaaggaggtcacgcagaatgaaggcaccaagaccatcgccaataacctcaccagcaccatccaggtgtttacggactcggagtaccagctgccgtacgttctcggctctgcgcaccagggctgcctccctccgttcccggcggacgtgttcatgattccgcaatacggctacctgacgctcaacaatggcagccaagccgtgggacgttcatccttttactgcctggaatatttcccttctcagatgctgagaacgggcaacaactttaccttcagctacacctttgaggaagtgcctttccacagcagctacgcgcacagccagagcttggaccggctgatgaatcctctgattgaccagtacctgtactacttgtctcggactcaaacaacaggaggcacggcaaatacgcagactctgggcttcagccaaggtgggcctaatacaatggccaatcaggcaaagaactggctgccaggaccctgttaccgccaacaacgcgtctcaacgacaaccgggcaaaacaacaatagcaactttgcctggactgctgggaccaaataccatctgaatggaagaaattcattggctaatcctggcatcgctatggcaacacacaaagacgacgaggagcgtttttttcccagtaacgggatcctgatttttggcaaacaaaatgctgccagagacaatgcggattacagcgatgtcatgctcaccagcgaggaagaaatcaaaaccactaaccctgtggctacagaggaatacggtatcgtggcagataacttgcagcagcaaaacacggctcctcaaattggaactgtcaacagccagggggccttacccggtatggtctggcagaaccgggacgtgtacctgcagggtcccatctgggccaagattcctcacacggacggcaacttccacccgtctccgctgatgggcggctttggcctgaaacatcctccgcctcagatcctgatcaagaacacgcctgtacctgcggatcctccgaccaccttcaaccagtcaaagctgaactctttcatcacgcaatacagcaccggacaggtcagcgtggagatcgagtgggagctgcagaaggaaaacagcaagcgctggaacccggagatccagtacacttccaactattacaagtctaataatgttgaatttgctgttaatactgaaggtgtatatagtgaaccccgccccattggcaccagatacctgactcgtaatctgtaa

SEQ ID NO: 327 - protein, 737 aa, Artificial Sequence
  Description of Artificial Sequence: Synthetic polypeptide
MAADGYLPDWLEDNLSEGIREWWALKPGAPQPKANQQHQDNARGLVLPGYKYLGPGNGLDKGEPVNAADAAALEHDKAYDQQLQAGDNPYLRYNHADAEFQERLQEDTSFGGNLGRAVFQAKKRILEPLGLVEEAAKTAPGKKRPVDQSPQEPDSSSGVGKSGKQPARKRLNFGQTGDSESVPDPQPLGEPPAAPTSLGSNTMASGGGAPMADNNEGADGVGSSSGNWHCDSQWLGDRVITTSTRTWALPTYNNHLYKQISNGTSGGATNDNTYFGYSTPWGYFDFNRFHCHFSPRDWQRLINNNWGFRPKRLSFKLFNIQVKEVTQNEGTKTIANNLTSTIQVFTDSEYQLPYVLGSAHQGCLPPFPADVFMIPQYGYLTLNNGSQAVGRSSFYCLEYFPSQMLRTGNNFTFSYTFEEVPFHSSYAHSQSLDRLMNPLIDQYLYYLSRTQTTGGTANTQTLGFSQGGPNTMANQAKNWLPGPCYRQQRVSTTTGQNNNSNFAWTAGTKYHLNGRNSLANPGIAMATHKDDEERFFPSNGILIFGKQNAARDNADYSDVMLTSEEEIKTTNPVATEEYGIVADNLQQQNTAPQIGTVNSQGALPGMVWQNRDVYLQGPIWAKIPHTDGNFHPSPLMGGFGLKHPPPQILIKNTPVPADPPTTFNQSKLNSFITQYSTGQVSVEIEWELQKENSKRWNPEIQYTSNYYKSNNVEFAVNTEGVYSEPRPIGTRYLTRNL

SEQ ID NO: 328 - DNA, 2211 bp, Artificial Sequence
  Description of Artificial Sequence: Synthetic polynucleotide
atggctgccgatggttatcttccagattggctcgaggacaacctctctgagggcattcgcgagtggtgggacttgaaacctggagccccgaagcccaaagccaaccagcaaaagcaggacgacggccggggtctggtgcttcctggctacaagtacctcggacccttcaacggactcgacaagggggagcccgtcaacgcggcggacgcagcggccctcgagcacgacaaggcctacgaccagcagctcaaagcgggtgacaatccgtacctgcggtataaccacgccgacgccgagtttcaggagcgtctgcaagaagatacgtcttttgggggcaacctcgggcgagcagtcttccaggccaagaagcgggttctcgaacctctcggtctggttgaggaaggcgctaagacggctcctggaaagaaacgtccggtagagcagtcgccacaagagccagactcctcctcgggcatcggcaagacaggccagcagcccgctaaaaagagactcaattttggtcagactggcgactcagagtcagtccccgacccacaacctctcggagaacctccagcaacccccgctgctgtgggacctactacaatggcttcaggcggtggcgcaccaatggcagacaataacgaaggcgccgacggagtgggtaatgcctcaggaaattggcattgcgattccacatggctgggcgacagagtcatcaccaccagcacccgaacatgggccttgcccacctataacaaccacctctacaagcaaatctccagtgcttcaacgggggccagcaacgacaaccactacttcggctacagcaccccctgggggtattttgatttcaacagattccactgccatttctcaccacgtgactggcagcgactcatcaacaacaattggggattccggcccaagagactcaacttcaagctcttcaacatccaagtcaaggaggtcacgacgaatgatggcgtcacgaccatcgctaataaccttaccagcacggttcaagtcttctcggactcggagtaccagctgccgtacgttctcggctctgcccaccagggctgcctgcctccgttcccggcggacgtgttcatgattccccagtacggctacctaacactcaacaacggtagtcaggccgtgggacgctcctccttctactgcctggaatactttccttcgcagatgctgagaaccggcaacaacttccagtttacttacaccttcgaggacgtgcctttccacagcagctacgcccacagccagagcttggaccggctgatgaatcctctgattgaccagtacctgtactacttgtctcggactcaaacaacaggaggcacggcaaatacgcagactctgggcttcagccaaggtgggcctaatacaatggccaatcaggcaaagaactggctgccaggaccctgttaccgccaacaacgcgtctcaacgacaaccgggcaaaacaacaatagcaattttacctggactggtgcttcaaaatataacctcaatgggcgtgaatccatcatcaaccctggcactgctatggcctcacacaaagacgacgaagacaagttctttcccatgagcggtgtcatgatttttggaaaagagagcgccggagcttcaaacactgcattggacaatgtcatgattacagacgaagaggaaattaaagccactaaccctgtggccaccgaaagatttgggaccgtggcagtcaatttccagagcagcagcacagaccctgcgaccggagatgtgcatgctatgggagcattacctggcatggtgtggcaagatagagacgtgtacctgcagggtcccatttgggccaaaattcctcacacagatggacactttcacccgtctcctcttatgggcggctttggactcaagaacccgcctcctcagatcctcatcaaaaacacgcctgttcctgcgaatcctccggcggagttttcagctacaaagtttgcttcattcatcacccaatactccacaggacaagtgagtgtggaaattgaatgggagctgcagaaagaaaacagcaagcgctggaatcccgaagtgcagtacacatccaattatgcaaaatctgccaacgttgattttactgtggacaacaatggactttatactgagcctcgccccattggcacccgttacctcacccgtcccctgtaa

SEQ ID NO: 329 - protein, 736 aa, Artificial Sequence
  Description of Artificial Sequence: Synthetic polypeptide
MAADGYLPDWLEDNLSEGIREWWDLKPGAPKPKANQQKQDDGRGLVLPGYKYLGPFNGLDKGEPVNAADAAALEHDKAYDQQLKAGDNPYLRYNHADAEFQERLQEDTSFGGNLGRAVFQAKKRVLEPLGLVEEGAKTAPGKKRPVEQSPQEPDSSSGIGKTGQQPAKKRLNFGQTGDSESVPDPQPLGEPPATPAAVGPTTMASGGGAPMADNNEGADGVGNASGNWHCDSTWLGDRVITTSTRTWALPTYNNHLYKQISSASTGASNDNHYFGYSTPWGYFDFNRFHCHFSPRDWQRLINNNWGFRPKRLNFKLFNIQVKEVTTNDGVTTIANNLTSTVQVFSDSEYQLPYVLGSAHQGCLPPFPADVFMIPQYGYLTLNNGSQAVGRSSFYCLEYFPSQMLRTGNNFQFTYTFEDVPFHSSYAHSQSLDRLMNPLIDQYLYYLSRTQTTGGTANTQTLGFSQGGPNTMANQAKNWLPGPCYRQQRVSTTTGQNNNSNFTWTGASKYNLNGRESIINPGTAMASHKDDEDKFFPMSGVMIFGKESAGASNTALDNVMITDEEEIKATNPVATERFGTVAVNFQSSSTDPATGDVHAMGALPGMVWQDRDVYLQGPIWAKIPHTDGHFHPSPLMGGFGLKNPPPQILIKNTPVPANPPAEFSATKFASFITQYSTGQVSVEIEWELQKENSKRWNPEVQYTSNYAKSANVDFTVDNNGLYTEPRPIGTRYLTRPL

SEQ ID NO: 330 - DNA, 2211 bp, Artificial Sequence
  Description of Artificial Sequence: Synthetic polynucleotide
atggctgctgacggttatcttccagattggctcgaggacaacctttctgaaggcattcgagagtggtgggcgctgcaacctggagcccctaaacccaaggcaaatcaacaacatcaggacaacgctcggggtcttgtgcttccgggttacaaatacctcggacccggcaacggactcgacaagggggaacccgtcaacgcagcggacgcggcagccctcgagcacgacaaggcctacgaccagcagctcaaggccggtgacaacccctacctcaagtacaaccacgccgacgccgagttccaggagcggctcaaagaagatacgtcttttgggggcaacctcgggcgagcagtcttccaggccaaaaagaggcttcttgaacctcttggtctggttgaggaagcggctaagacggctcctggaaagaagaggcctgtagatcagtctcctcaggaaccggactcatcatctggtgttggcaaatcgggcaaacagcctgccagaaaaagactaaatttcggtcagactggcgactcagagtcagtcccagaccctcaacctctcggagaaccaccagcagcccccacaagtttgggatctaatacaatggcttcaggcggtggcgcaccaatggcagacaataacgagggtgccgatggagtgggtaattcctcaggaaattggcattgcgattcccaatggctgggcgacagagtcatcaccaccagcaccagaacctgggccctgcccacttacaacaaccatctctacaagcaaatctccagccaatcaggagcttcaaacgacaaccactactttggctacagcaccccttgggggtattttgactttaacagattccactgccacttctcaccacgtgactggcagcgactcattaacaacaactggggattccggcccaagaaactcagcttcaagctcttcaacatccaagttaaagaggtcacgcagaacgatggcacgacgactattgccaataaccttaccagcacggttcaagtgtttacggactcggagtatcagctcccgtacgtgctcgggtcggcgcaccaaggctgtctcccgccgtttccagcggacgtcttcatggtccctcagtatggatacctcaccctgaacaacggaagtcaagcggtgggacgctcatccttttactgcctggagtacttcccttcgcagatgctaaggactggaaataacttccaattcagctataccttcgaggatgtaccttttcacagcagctacgctcacagccagagtttggatcgcttgatgaatcctcttattgatcagtatctgtactacctgaacagaacgcaaggaacaacctctggaacaaccaaccaatcacggctgctttttagccaggctgggcctcagtctatgtctttgcaggccagaaattggctacctgggccctgctaccggcaacagagactttcaaagactgctaacgacaacaacaacagtaactttccttggacagcggccagcaaatatcatctcaatggccgcgactcgctggtgaatccaggaccagctatggccagtcacaaggacgatgaagaaaaatttttccctatgcacggcaatctaatatttggcaaagaagggacaacggcaagtaacgcagaattagataatgtaatgattacggatgaagaagagattcgtaccaccaatcctgtggcaacagagcagtatggaactgtggcaaataacttgcagagctcaaatacagctcccacgactagaactgtcaatgatcagggggccttacctggcatggtgtggcaagatcgtgacgtgtaccttcaaggacctatctgggcaaagattcctcacacggatggacactttcatccttctcctctgatgggaggctttggactgaaacatccgcctcctcaaatcatgatcaaaaatactccggtaccggcaaatcctccgacgactttcagcccggccaagtttgcttcatttatcactcagtactccactggacaggtcagcgtggaaattgagtgggagctacagaaagaaaacagcaaacgttggaatccagagattcagtacacttccaactacaacaagtctgttaatgtggactttactgtagacactaatggtgtttatagtgaacctcgccccattggcacccgttaccttacccgtcccctgtaa

SEQ ID NO: 331 - protein, 736 aa, Artificial Sequence
  Description of Artificial Sequence: Synthetic polypeptide
MAADGYLPDWLEDNLSEGIREWWALQPGAPKPKANQQHQDNARGLVLPGYKYLGPGNGLDKGEPVNAADAAALEHDKAYDQQLKAGDNPYLKYNHADAEFQERLKEDTSFGGNLGRAVFQAKKRLLEPLGLVEEAAKTAPGKKRPVDQSPQEPDSSSGVGKSGKQPARKRLNFGQTGDSESVPDPQPLGEPPAAPTSLGSNTMASGGGAPMADNNEGADGVGNSSGNWHCDSQWLGDRVITTSTRTWALPTYNNHLYKQISSQSGASNDNHYFGYSTPWGYFDFNRFHCHFSPRDWQRLINNNWGFRPKKLSFKLFNIQVKEVTQNDGTTTIANNLTSTVQVFTDSEYQLPYVLGSAHQGCLPPFPADVFMVPQYGYLTLNNGSQAVGRSSFYCLEYFPSQMLRTGNNFQFSYTFEDVPFHSSYAHSQSLDRLMNPLIDQYLYYLNRTQGTTSGTTNQSRLLFSQAGPQSMSLQARNWLPGPCYRQQRLSKTANDNNNSNFPWTAASKYHLNGRDSLVNPGPAMASHKDDEEKFFPMHGNLIFGKEGTTASNAELDNVMITDEEEIRTTNPVATEQYGTVANNLQSSNTAPTTRTVNDQGALPGMVWQDRDVYLQGPIWAKIPHTDGHFHPSPLMGGFGLKHPPPQIMIKNTPVPANPPTTFSPAKFASFITQYSTGQVSVEIEWELQKENSKRWNPEIQYTSNYNKSVNVDFTVDTNGVYSEPRPIGTRYLTRPL

SEQ ID NO: 332 - DNA, 2211 bp, Artificial Sequence
  Description of Artificial Sequence: Synthetic polynucleotide
atggctgccgatggttatcttccagattggctcgaggacaaccttagtgaaggaattcgcgagtggtgggctttgaaacctggagcccctcaacccaaggcaaatcaacaacatcaagacaacgctcgaggtcttgtgcttccgggttacaaataccttggacccggcaacggactcgacaagggggagccggtcaacgcagcagacgcggcggccctcgagcacgacaaggcctacgaccagcagctcaaggccggagacaacccgtacctcaagtacaaccacgccgacgccgagttccaggagcggctcaaagaagatacgtcttttgggggcaacctcgggcgagcagtcttccaggccaaaaagaggcttcttgaacctcttggtctggttgaggaagcggctaagacggctcctggaaagaagagaccggtagagccatcaccccagcgttctccagactcctctacgggcatcggcaagaaaggccaacagcccgctaaaaagagactcaattttggtcagactggcgactcagagtcagtccccgacccacaacctctcggagaacctccagcaacccccgctgctgtgggacctactacaatggcttcaggcggtggcgcaccaatggcagacaataacgagggtgccgatggagtgggtaattcctcaggaaattggcattgcgattcccaatggctgggcgacagagtcatcaccaccagcaccagaacctgggccctgcccacttacaacaaccatctctacaagcaaatctccagccaatcaggagcttcaaacgacaaccactactttggctacagcaccccttgggggtattttgactttaacagattccactgccacttttcaccacgtgactggcaaagactcatcaacaacaactggggattccgacccaagagactcaacttcaagctcttcaacatccaagtcaaggaggtcacgacgaatgatggcgtcacgaccatcgctaataaccttaccagcacggttcaagtcttctcggactcggagtaccagttgccgtacgtcctcggctctgcgcaccagggctgcctccctccgttcccggcggacgtgttcatgattccgcagtacggctacctaacgctcaacaatggcagccaagccgtgggacgttcatccttttactgcctggaatatttcccttctcagatgctgagaacgggcaacaactttaccttcagctacacttttgaggacgttcctttccacagcagctacgctcacagccagagtctggaccgtctcatgaatcctctcatcgaccagtacctgtattacttgagcagaacaaacactccaagtggaaccaccacgcagtcaaggcttcagttttctcaggccggagcgagtgacattcgggaccagtctaggaactggcttcctggaccctgttaccgccagcagcgcgtttctaaaacaaaaacagacaacaacaacagcaattttacctggactggtgcttcaaaatataaccttaatgggcgtgaatctataatcaaccctggcactgctatggcctcacacaaagacgacgaagacaagttctttcccatgagcggtgtcatgatttttggaaaagagagcgccggagcttcaaacactgcattggacaatgtcatgattacagacgaagaggaaattaaagccactaaccctgtggccaccgaaagatttgggaccgtggcagtcaatttccagagcagcagcacagaccctgcgaccggagatgtgcatgttatgggagccttacctggaatggtgtggcaagacagagacgtatacctgcagggtcctatttgggccaaaattcctcacacggatggacactttcacccgtctcctcttatgggcggctttggactcaagaacccgcctcctcagatcctcatcaaaaacacgcctgttcctgcgaatcctccggcggagttttcagctacaaagtttgcttcattcatcacccaatactccacaggacaagtgagtgtggaaattgaatgggagctgcagaaagaaaacagcaagcgctggaatcccgaagtgcagtacacatccaattatgcaaaatctgccaacgttgattttactgtggacaacaatggactttatactgagcctcgccccattggcacccgttaccttacccgtcccctgtaa

SEQ ID NO: 333 - protein, 736 aa, Artificial Sequence
  Description of Artificial Sequence: Synthetic polypeptide
MAADGYLPDWLEDNLSEGIREWWALKPGAPQPKANQQHQDNARGLVLPGYKYLGPGNGLDKGEPVNAADAAALEHDKAYDQQLKAGDNPYLKYNHADAEFQERLKEDTSFGGNLGRAVFQAKKRLLEPLGLVEEAAKTAPGKKRPVEPSPQRSPDSSTGIGKKGQQPAKKRLNFGQTGDSESVPDPQPLGEPPATPAAVGPTTMASGGGAPMADNNEGADGVGNSSGNWHCDSQWLGDRVITTSTRTWALPTYNNHLYKQISSQSGASNDNHYFGYSTPWGYFDFNRFHCHFSPRDWQRLINNNWGFRPKRLNFKLFNIQVKEVTTNDGVTTIANNLTSTVQVFSDSEYQLPYVLGSAHQGCLPPFPADVFMIPQYGYLTLNNGSQAVGRSSFYCLEYFPSQMLRTGNNFTFSYTFEDVPFHSSYAHSQSLDRLMNPLIDQYLYYLSRTNTPSGTTTQSRLQFSQAGASDIRDQSRNWLPGPCYRQQRVSKTKTDNNNSNFTWTGASKYNLNGRESIINPGTAMASHKDDEDKFFPMSGVMIFGKESAGASNTALDNVMITDEEEIKATNPVATERFGTVAVNFQSSSTDPATGDVHVMGALPGMVWQDRDVYLQGPIWAKIPHTDGHFHPSPLMGGFGLKNPPPQILIKNTPVPANPPAEFSATKFASFITQYSTGQVSVEIEWELQKENSKRWNPEVQYTSNYAKSANVDFTVDNNGLYTEPRPIGTRYLTRPL

SEQ ID NO: 334 - DNA, 2211 bp, Artificial Sequence
  Description of Artificial Sequence: Synthetic polynucleotide
atggctgccgatggttatcttccagattggctcgaggacaacctctctgagggcattcgcgagtggtgggacttgaaacctggagcccctaaacccaaggcaaatcaacaacatcaggacaacgctcgaggtcttgtgcttccgggttacaaataccttggacccggcaacggactcgacaagggggagccggtcaacgcagcagacgcggcggccctcgagcacgacaaggcctacgaccagcagctcaaggccggagacaacccgtacctcaagtacaaccacgccgacgccgagttccaggagcggctcaaagaagatacgtcttttgggggcaacctcgggcgagcagtcttccaggccaaaaagaggcttcttgaacctcttggtctggttgaggaagcggctaagacggctcctggaaagaagagaccggtagagccatcaccccagcgttctccagactcctctacgggcatcggcaagaaaggccaacagcccgctaaaaagagactcaattttggtcagactggcgactcagagtcagtccccgacccacaacctctcggagaacctccagcaacccccgctgctgtgggacctactacaatggcttcaggcggtggcgcaccaatggcagacaataacgagggtgccgatggagtgggtaattcctcaggaaattggcattgcgattcccaatggctgggcgacagagtcatcaccaccagcaccagaacctgggccctgcccacttacaacaaccatctctacaagcaaatctccagccaatcaggagcttcaaacgacaaccactactttggctacagcaccccttgggggtattttgactttaacagattccactgccacttttcaccacgtgactggcaaagactcatcaacaacaactggggattccgacccaagagactcaacttcaagctcttcaacatccaagtcaaggaggtcacgacgaatgatggcgtcacgaccatcgctaataaccttaccagcacggttcaagtcttctcggactcggagtaccagttgccgtacgtcctcggctctgcgcaccagggctgcctccctccgttcccggcggacgtgttcatgattccgcagtacggctacctaacgctcaacaatggcagccaagccgtgggacgttcatccttttactgcctggaatatttcccttctcagatgctgagaacgggcaacaactttaccttcagctacacttttgaggacgttcctttccacagcagctacgctcacagccagagtctggaccgtctcatgaatcccctcatcgaccagtacctgtattacttgagcagaacaaacactccaagtggaaccaccacgcagtcaaggcttcagttttctcaggccggagcgagtgacattcgggaccagtctaggaactggcttcctggaccctgttaccggcagcagcgcgtttctaaaacaaaaacagacaacaacaacagcaactttacctggactggtgcttcaaaatataaccttaatgggcgtgaatctataatcaaccctggcactgctatggcctcacacaaagacgacgaagacaagttctttcccatgagcggtgtcatgatttttggaaaggagagcgccggagcttcaaacactgcattggacaatgtcatgatcacagacgaagaggaaatcaaagccactaaccccgtggccaccgaaagatttgggactgtggcagtcaatctccagagcagcagcacagaccctgcgaccggagatgtgcatgttatgggagccttacctggaatggtgtggcaagacagagacgtgtacctgcagggtcctatttgggccaaaattcctcacacggatggacactttcacccgtctcctctcatgggcggctttggacttaagcacccgcctcctcagatcctcatcaaaaacacgcctgttcctgcgaatcctccggcagagttttcggctacaaagtttgcttcattcatcacccagtattccacaggacaagtgagtgtggaaattgaatgggagctgcagaaagaaaacagcaagcgctggaatcccgaagtgcagtacacatccaattatgcaaaatctgccaacgttgattttactgtggacaacaatggactttatactgagcctcgccccattggcacccgttacctcacccgtcccctgtaa

SEQ ID NO: 335 - protein, 736 aa, Artificial Sequence
  Description of Artificial Sequence: Synthetic polypeptide
MAADGYLPDWLEDNLSEGIREWWDLKPGAPKPKANQQHQDNARGLVLPGYKYLGPGNGLDKGEPVNAADAAALEHDKAYDQQLKAGDNPYLKYNHADAEFQERLKEDTSFGGNLGRAVFQAKKRLLEPLGLVEEAAKTAPGKKRPVEPSPQRSPDSSTGIGKKGQQPAKKRLNFGQTGDSESVPDPQPLGEPPATPAAVGPTTMASGGGAPMADNNEGADGVGNSSGNWHCDSQWLGDRVITTSTRTWALPTYNNHLYKQISSQSGASNDNHYFGYSTPWGYFDFNRFHCHFSPRDWQRLINNNWGFRPKRLNFKLFNIQVKEVTTNDGVTTIANNLTSTVQVFSDSEYQLPYVLGSAHQGCLPPFPADVFMIPQYGYLTLNNGSQAVGRSSFYCLEYFPSQMLRTGNNFTFSYTFEDVPFHSSYAHSQSLDRLMNPLIDQYLYYLSRTNTPSGTTTQSRLQFSQAGASDIRDQSRNWLPGPCYRQQRVSKTKTDNNNSNFTWTGASKYNLNGRESIINPGTAMASHKDDEDKFFPMSGVMIFGKESAGASNTALDNVMITDEEEIKATNPVATERFGTVAVNLQSSSTDPATGDVHVMGALPGMVWQDRDVYLQGPIWAKIPHTDGHFHPSPLMGGFGLKHPPPQILIKNTPVPANPPAEFSATKFASFITQYSTGQVSVEIEWELQKENSKRWNPEVQYTSNYAKSANVDFTVDNNGLYTEPRPIGTRYLTRPL

SEQ ID NO: 336 - DNA, 2214 bp, Artificial Sequence
  Description of Artificial Sequence: Synthetic polynucleotide
atggctgccgatggttatcttccagattggctcgaggacaaccttagtgaaggaattcgcgagtggtgggctttgaaacctggagcccctcaacccaaggcaaatcaacaacatcaagacaacgctcgaggtcttgtgcttccgggttacaaataccttggacccggcaacggactcgacaagggggagccggtcaacgcagcagacgcggcggccctcgagcacgacaaggcctacgaccagcagctgcaggcgggtgacaatccgtacctgcggtataaccacgccgacgccgagtttcaggagcgtctgcaagaagatacgtcttttgggggcaaccttggcagagcagtcttccaggccaaaaagaggatccttgagcctcttggtctggttgaggaagcagctaaaacggctcctggaaagaagaggcctgtagatcagtctcctcaggaaccggactcatcatctggtgttggcaaatcgggcaaacagcctgccagaaaaagactaaatttcggtcagactggcgactcagagtcagtcccagaccctcaacctctcggagaaccaccagcagcccccacaagtttgggatctaatacaatggcttcaggcggtggcgcaccaatggcagacaataacgagggtgccgatggggtgggtagttcctcgggaaattggcattgcgattcccaatgactgggggacagagtcatcaccaccagcacccgaacctgggccctgcccacctacaacaatcacctctacaagcaaatctccaacgggacatcgggaggagccaccaacgacaacacctacttcggctacagcaccccctgggggtattttgactttaacagattccactgccacttttcaccacgtgactggcagcgactcatcaacaacaactggggattccggcccaagagactcagcttcaagctcttcaacatccaggtcaaggaggtcacgcagaatgaaggcaccaagaccatcgccaataacctcaccagcaccatccaggtgtttacggactcggagtaccagctgccgtacgttctcggctctgcgcaccagggctgcctccctccgttcccggcggacgtgttcatgattccgcaatacggctacctgacgctcaacaatggcagccaagccgtgggacgttcatccttttactgcctggaatatttcccttctcagatgctgagaacgggcaacaactttaccttcagctacacctttgaggaagtgcctttccacagcagctacgcgcacagccagagcttggaccggctgatgaatcctctgattgaccagtacctgtactacttgtctcggactcaaacaacaggaggcacggcaaatacgcagactctgggcttcagccaaggtgggcctaatacaatggccaatcaggcaaagaactggctgccaggaccctgttaccgccaacaacgcgtctcaacgacaaccgggcaaaacaacaatagcaactttgcctggactgctgggaccaaataccatctgaatggaagaaattcattggctaatcctggcatcgctatggcaacacacaaagacgacgaggagcgtttttttcccagtaacgggatcctgatttttggcaaacaaaatgctgccagagacaatgcggattacagcgatgtcatgctcaccagcgaggaagaaatcaaaaccactaaccctgtggctacagaggaatacggtatcgtggcagataacttgcagcagcaaaacacggctcctcaaattggaactgtcaacagccagggggccttacccggtatggtctggcagaaccgggacgtgtacctgcagggtcccatctgggccaagattcctcacacggacggcaacttccacccgtctccgctgatgggcggctttggcctgaaacatcctccgcctcagatcctgatcaagaacacgcctgtacctgcggatcctccgaccaccttcaaccagtcaaagctgaactctttcatcacgcaatacagcaccggacaggtcagcgtggagatcgagtgggagctgcagaaggaaaacagcaagcgctggaacccggagatccagtacacttccaactattacaagtctaataatgttgaatttgctgttaatactgaaggtgtatatagtgaaccccgccccattggcaccagatacctgactcgtaatctgtaa

SEQ ID NO: 337 - protein, 736 aa, Artificial Sequence
  Description of Artificial Sequence: Synthetic polypeptide
MAADGYLPDWLEDNLSEGIREWWALKPGAPQPKANQQHQDNARGLVLPGYKYLGPGNGLDKGEPVNAADAAALEHDKAYDQQLQAGDNPYLRYNHADAEFQERLQEDTSFGGNLGRAVFQAKKRILEPLGLVEEAAKTAPGKKRPVDQSPQEPDSSSGVGKSGKQPARKRLNFGQTGDSESVPDPQPLGEPPAAPTSLGSNTMASGGGAPMADNNEGADGVGSSSGNWHCDSQLGDRVITTSTRTWALPTYNNHLYKQISNGTSGGATNDNTYFGYSTPWGYFDFNRFHCHFSPRDWQRLINNNWGFRPKRLSFKLFNIQVKEVTQNEGTKTIANNLTSTIQVFTDSEYQLPYVLGSAHQGCLPPFPADVFMIPQYGYLTLNNGSQAVGRSSFYCLEYFPSQMLRTGNNFTFSYTFEEVPFHSSYAHSQSLDRLMNPLIDQYLYYLSRTQTTGGTANTQTLGFSQGGPNTMANQAKNWLPGPCYRQQRVSTTTGQNNNSNFAWTAGTKYHLNGRNSLANPGIAMATHKDDEERFFPSNGILIFGKQNAARDNADYSDVMLTSEEEIKTTNPVATEEYGIVADNLQQQNTAPQIGTVNSQGALPGMVWQNRDVYLQGPIWAKIPHTDGNFHPSPLMGGFGLKHPPPQILIKNTPVPADPPTTFNQSKLNSFITQYSTGQVSVEIEWELQKENSKRWNPEIQYTSNYYKSNNVEFAVNTEGVYSEPRPIGTRYLTRNL

SEQ ID NO: 338 - DNA, 2214 bp, Artificial Sequence
  Description of Artificial Sequence: Synthetic polynucleotide
atggctgccgatggttatcttccagattggctcgaggacaaccttagtgaaggaattcgcgagtggtgggctttgaaacctggagcccctcaacccaaggcaaatcaacaacatcaagacaacgctcgaggtcttgtgcttccgggttacaaataccttggacccggcaacggactcgacaagggggagccggtcaacgcagcagacgcggcggccctcgagcacgacaaggcctacgaccagcagctgcaggcgggtgacaatccgtacctgcggtataaccacgccgacgccgagtttcaggagcgtctgcaagaagatacgtcttttgggggcaaccttggcagagcagtcttccaggccaaaaagaggatccttgagcctcttggtctggttgaggaagcagctaaaacggctcctggaaagaagaggcctgtagatcagtctcctcaggaaccggactcatcatctggtgttggcaaatcgggcaaacagcctgccagaaaaagactaaatttcggtcagactggcgactcagagtcagtcccagaccctcaacctctcggagaaccaccagcagcccccacaagtttgggatctaatacaatggcttcaggcggtggcgcaccaatggcagacaataacgagggtgccgatggggtgggtagttcctcgggaaattggcattgcgattcccaatggctgggggacagagtcatcaccaccagcacccgaacctgggccctgcccacctacaacaatcacctctacaagcaaatctccaacgggacatcgggaggagccaccaacgacaacacctacttcggctacagcaccccctgggggtattttgactttaacagattccactgccacttttcaccacgtgactggcagcgactcatcaacaacaactggggattccggcccaagagactcagcttcaagctcttcaacatccaggtcaaggaggtcacgcagaatgaaggcaccaagaccatcgccaataacctcaccagcaccatccaggtgtttacggactcggagtaccagctgccgtacgttctcggctctgcgcaccagggctgcctccctccgttcccggcggacgtgttcatgattccgcaatacggctacctgacgctcaacaatggcagccaagccgtgggacgttcatccttttactgcctggaatatttcccttctcagatgctgagaacgggcaacaactttaccttcagctacacctttgaggaagtgccttttcacagcagctacgcgcacagccagagcttggaccggctgatgaatcctctgattgaccagtacctgtactacttgtctcggactcaaacaacaggaggcacggcaaatacgcagactctgggcttcagccaaggtgggcctaatacaatggccaatcaggcaaagaactggctgccaggaccctgttaccgccaacaacgcgtctcaacgacaaccgggcaaaacaacaatagcaactttgcctggactgctgggaccaaataccatctgaatggaagaaattcattggctaatcctggcatcgctatggcaacacacaaagacgacgaggagcgtttttttcccagtaacgggatcctgatttttggcaaacaaaatgctgccagagacaatgcggattacagcgatgtcatgctcaccagcgaggaagaaatcaaaaccactaaccctgtggctacagaggaatacggtatcgtggcagataacttgcagcagcaaaacacggctcctcaaattggaactgtcaacagccagggggccttacccggtatggtctggcagaaccgggacgtgtacctgcagggtcccatctgggccaagattcctcacacggacggcaacttccacccgtctccgctgatgggcggctttggcctgaaacatcctccgcctcagatcctgatcaagaacacgcctgtacctgcggatcctccgaccaccttcaaccagtcaaagctgaactctttcatcacgcaatacagcaccggacaggtcagcgtggagatcgagtgggagctgcagaaggaaaacagcaagcgctggaacccggagatccagtacacttccaactattacaagtctaataatgttgaatttgctgttaatactgaaggtgtatatagtgaaccccgccccattggcaccagatacctgactcgtaatctgtaa

SEQ ID NO: 339 - protein, 737 aa, Artificial Sequence; identical to SEQ ID NO: 327
  Description of Artificial Sequence: Synthetic polypeptide

SEQ ID NO: 340 - DNA, 2211 bp, Artificial Sequence
  Description of Artificial Sequence: Synthetic polynucleotide
atggctgccgatggttatcttccagattggctcgaggacaacctctctgagggcattcgcgagtggtgggacttgaaacctggagcccctaaacccaaggcaaatcaacaacatcaggacaacgctcgaggtcttgtgcttccgggttacaaataccttggacccggcaacggactcgacaagggggagccggtcaacgcagcagacgcggcggccctcgagcacgacaaggcctacgaccagcagctcaaggccggagacaacccgtacctcaagtacaaccacgccgacgccgagttccaggagcggctcaaagaagatacgtcttttgggggcaacctcgggcgagcagtcttccaggccaaaaagaggcttcttgaacctcttggtctggttgaggaagcggctaagacggctcctggaaagaagagaccggtagagccatcaccccagcgttctccagactcctctacgggcatcggcaagaaaggccaacagcccgctaaaaagagactcaattttggtcagactggcgactcagagtcagtccccgacccacaacctctcggagaacctccagcaacccccgctgctgtgggacctactacaatggcttcaggcggtggcgcaccaatggcagacaataacgagggtgccgatggagtgggtaattcctcaggaaattggcattgcgattcccaatggctgggcgacagagtcatcaccaccagcaccagaacctgggccctgcccacttacaacaaccatctctacaagcaaatctccagccaatcaggagcttcaaacgacaaccactactttggctacagcaccccttgggggtattttgactttaacagattccactgccacttttcaccacgtgactggcaaagactcatcaacaacaactggggattccgacccaagagactcaacttcaagctcttcaacatccaagtcaaggaggtcacgacgaatgatggcgtcacgaccatcgctaataaccttaccagcacggttcaagtcttctcggactcggagtaccagttgccgtacgtcctcggctctgcgcaccagggctgcctccctccgttcccggcggacgtgttcatgattccgcagtacggctacctaacgctcaacaatggcagccaagccgtgggacgttcatccttttactgcctggaatatttcccttctcagatgctgagaacgggcaacaactttaccttcagctacacttttgaggacgttcctttccacagcagctacgctcacagccagagtctggaccgtctcatgaatcctctcatcgaccagtacctgtattacttgagcagaacaaacactccaagtggaaccaccacgcagtcaaggcttcagttttctcaggccggagcgagtgacattcgggaccagtctaggaactggcttcctggaccctgttaccgccagcagcgcgtttctaaaacaaaaacagacaacaacaacagcaattttacctggactggtgcttcaaaatataaccttaatgggcgtgaatctataatcaaccctggcactgctatggcctcacacaaagacgacgaagacaagttctttcccatgagcggtgtcatgatttttggaaaagagagcgccggagcttcaaacactgcattggacaatgtcatgattacagacgaagaggaaattaaagccactaaccctgtggccaccgaaagatttgggaccgtggcagtcaatttccagagcagcagcacagaccctgcgaccggagatgtgcatgctatgggagcattacctggcatggtgtggcaagatagagacgtgtacctgcagggtcccatttgggccaaaattcctcacacagatggacactttcacccgtctcctcttatgggcggctttggactcaagaacccgcctcctcagatcctcatcaaaaacacgcctgttcctgcgaatcctccggcggagttttcagctacaaagtttgcttcattcatcacccaatactccacaggacaagtgagtgtggaaattgaatgggagctgcagaaagaaaacagcaagcgctggaatcccgaagtgcagtacacatccaattatgcaaaatctgccaacgttgattttactgtggacaacaatggactttatactgagcctcgccccattggcacccgttaccttacccgtcccctgtaa

SEQ ID NO: 341 - protein, 736 aa, Artificial Sequence
  Description of Artificial Sequence: Synthetic polypeptide
MAADGYLPDWLEDNLSEGIREWWDLKPGAPKPKANQQHQDNARGLVLPGYKYLGPGNGLDKGEPVNAADAAALEHDKAYDQQLKAGDNPYLKYNHADAEFQERLKEDTSFGGNLGRAVFQAKKRLLEPLGLVEEAAKTAPGKKRPVEPSPQRSPDSSTGIGKKGQQPAKKRLNFGQTGDSESVPDPQPLGEPPATPAAVGPTTMASGGGAPMADNNEGADGVGNSSGNWHCDSQWLGDRVITTSTRTWALPTYNNHLYKQISSQSGASNDNHYFGYSTPWGYFDFNRFHCHFSPRDWQRLINNNWGFRPKRLNFKLFNIQVKEVTTNDGVTTIANNLTSTVQVFSDSEYQLPYVLGSAHQGCLPPFPADVFMIPQYGYLTLNNGSQAVGRSSFYCLEYFPSQMLRTGNNFTFSYTFEDVPFHSSYAHSQSLDRLMNPLIDQYLYYLSRTNTPSGTTTQSRLQFSQAGASDIRDQSRNWLPGPCYRQQRVSKTKTDNNNSNFTWTGASKYNLNGRESIINPGTAMASHKDDEDKFFPMSGVMIFGKESAGASNTALDNVMITDEEEIKATNPVATERFGTVAVNFQSSSTDPATGDVHAMGALPGMVWQDRDVYLQGPIWAKIPHTDGHFHPSPLMGGFGLKNPPPQILIKNTPVPANPPAEFSATKFASFITQYSTGQVSVEIEWELQKENSKRWNPEVQYTSNYAKSANVDFTVDNNGLYTEPRPIGTRYLTRPL

SEQ ID NO: 342 - DNA, 2211 bp, Artificial Sequence
  Description of Artificial Sequence: Synthetic polynucleotide
atggctgccgatggttatcttccagattggctcgaggacaaccttagtgaaggaattcgcgagtggtgggcgctgaaacctggagccccgaagcccaaagccaaccagcaaaagcaggacgacggccggggtctggtgcttccgggttacaaatacctcggacccggtaacggactcgacaaaggagagccggtcaacgaggcggacgcggcagccctcgagcacgacaaggcctacgaccagcagctcaaagcgggtgacaatccgtacctgcggtataaccacgccgacgccgagtttcaggagcgtctgcaagaagatacgtcttttgggggcaacctcgggcgagcagtcttccaggccaagaagcgggttctcgaacctctcggtctggttgaggaaggcgctaagacggctcccggaaagaaacgtccggtagagcagtcgccacaagagccagactcctctacgggcatcggcaagaaaggccaacagcccgccagaaaaagactcaatttcggtcagactggcgactcagagtcagttccagaccctcaacctctcggagaacctccagcagcgccctctggtgtgggacctactacaatggcttcaggcggtggcgcaccaatggcagacaataacgaaggcgccgacggagtgggtaatgcctcaggaaattggcattgcgattccacatggctgggcgacagagtcatcaccaccagcacccgaacatgggccttgcccacctataacaaccacctctacaagcaaatctccagtgcttcaacgggggccagcaacgacaacacctacttcggctacagcaccccctgggggtattttgatttcaacagattccactgccatttctcaccacgtgactggcagcgactcatcaacaacaattggggattccggcccaagagactcaacttcaaactcttcaacatccaagtcaaggaggtcacgacgaatgatggcgtcacgaccatcgctaataaccttaccagcacggttcaagtcttctcggactcggagtaccagttgccgtacgtcctcggctctgcgcaccagggctgcctccctccgttcccggcggacgtgttcatgattccgcagtacggctacctaacgctcaacaatggcagccaggcagtgggacggtcatccttttactgcctggaatatttcccatcgcagatgctgagaacgggcaataactttaccttcagctacaccttcgaggacgtgcctttccacagcagctacgcgcacagccagagcctggaccggctgatgaatcctctcatcgaccagtacctgtattacctgaacagaactcagaatcagtccggaagtgcccaaaacaaggacttgctgtttagccgggggtctccagctggcatgtctgttcagcccaaaaactggctacctggaccctgttatcggcagcagcgcgtttctaaaacaaaaacagacaacaacaacagcaattttacctggactggtgcttcaaaatataacctcaatgggcgtgaatccatcatcaaccctggcactgctatggcctcacacaaagacgacgaagacaagttctttcccatgagcggtgtcatgatttttggaaaagagagcgccggagcttcaaacactgcattggacaatgtcatgattacagacgaagaggaaattaaagccactaaccctgtggccaccgaaagatttgggaccgtggcagtcaatttccagagcagcagcacagaccctgcgaccggagatgtgcatgttatgggagccttacctggaatggtgtggcaagacagagacgtatacctgcagggtcctatttgggccaaaattcctcacacagatggacactttcacccgtctcctcttatgggcggctttggactcaagaacccgcctcctcagatcctcatcaaaaacacgcctgttcctgcgaatcctccggcagagttttcggctacaaagtttgcttcattcatcacccagtattccacaggacaagtgagcgtggagattgaatgggagctgcagaaagaaaacagcaaacgctggaatcccgaagtgcagtatacatctaactatgcaaaatctgccaacgttgatttcactgtggacaacaatggactttatactgagcctcgccccattggcacccgttacctcacccgtcccctgtaa

SEQ ID NO: 343 - protein, 736 aa, Artificial Sequence
  Description of Artificial Sequence: Synthetic polypeptide
MAADGYLPDWLEDNLSEGIREWWALKPGAPKPKANQQKQDDGRGLVLPGYKYLGPGNGLDKGEPVNEADAAALEHDKAYDQQLKAGDNPYLRYNHADAEFQERLQEDTSFGGNLGRAVFQAKKRVLEPLGLVEEGAKTAPGKKRPVEQSPQEPDSSTGIGKKGQQPARKRLNFGQTGDSESVPDPQPLGEPPAAPSGVGPTTMASGGGAPMADNNEGADGVGNASGNWHCDSTWLGDRVITTSTRTWALPTYNNHLYKQISSASTGASNDNTYFGYSTPWGYFDFNRFHCHFSPRDWQRLINNNWGFRPKRLNFKLFNIQVKEVTTNDGVTTIANNLTSTVQVFSDSEYQLPYVLGSAHQGCLPPFPADVFMIPQYGYLTLNNGSQAVGRSSFYCLEYFPSQMLRTGNNFTFSYTFEDVPFHSSYAHSQSLDRLMNPLIDQYLYYLNRTQNQSGSAQNKDLLFSRGSPAGMSVQPKNWLPGPCYRQQRVSKTKTDNNNSNFTWTGASKYNLNGRESIINPGTAMASHKDDEDKFFPMSGVMIFGKESAGASNTALDNVMITDEEEIKATNPVATERFGTVAVNFQSSSTDPATGDVHVMGALPGMVWQDRDVYLQGPIWAKIPHTDGHFHPSPLMGGFGLKNPPPQILIKNTPVPANPPAEFSATKFASFITQYSTGQVSVEIEWELQKENSKRWNPEVQYTSNYAKSANVDFTVDNNGLYTEPRPIGTRYLTRPL

SEQ ID NO: 344 - DNA, 2205 bp, Artificial Sequence
  Description of Artificial Sequence: Synthetic polynucleotide
atggctgctgacggttatcttccagattggctcgaggacaacctttctgaaggcattcgtgagtggtgggctctgaaacctggagtccctcaacccaaagcgaaccaacaacaccaggacaaccgtcggggtcttgtgcttccgggttacaaatacctcggacccggtaacggactcgacaaaggagagccggtcaacgaggcggacgcggcagccctcgaacacgacaaggcctacgaccagcagctcaaggccggagacaacccgtacctcaagtacaaccacgccgacgccgagttccaggagcggctcaaagaagatacgtcttttgggggcaacctcgggcgagcagtcttccaggccaaaaagaggcttcttgaacctcttggtctggttgaggaagcggctaagacggctcctggaaagaagaggcctgtagagcagtctcctcaggaaccggactcctccgcgggtattggcaaatcgggtgcacagcccgctaaaaagagactcaatttcggtcagactggcgacacagagtcagtcccagaccctcaaccaatcggagaacctcccgcagccccctcaggtgtgggatctcttacaatggcttcaggtggtggcgcaccagtggcagacaataacgaaggtgccgatggagtgggtagttcctcgggaaattggcattgcgattcccaatggctgggggacagagtcatcaccaccagcacccgaacctgggccctgcccacctacaacaaccacctctacaaacaaatttccagccaatcaggagcctcgaacgacaatcactactttggctacagcaccccttgggggtattttgacttcaacagattccactgccacttttcaccacgtgactggcagcgactcatcaacaacaactggggattccggcccaagagactcagcttcaagctcttcaacatccaggtcaaagaggttacggacaacaatggagtcaagaccatcgccaataaccttaccagcacggtccaggtcttcacggactcagactatcagctcccgtacgtgctcgggtcggctcacgagggctgcctcccgccgttcccagcggacgttttcatgattcctcagtacgggtatctgacgcttaatgatggaagccaggccgtgggtcgttcgtccttttactgcctggaatatttcccgtcgcaaatgctaagaacgggtaacaacttccagttcagctacgagtttgagaacgtacctttccatagcagctacgctcacagccaaagcctggaccgactaatgaatccactcatcgaccaatacttgtactatctctcaaagactattaacggttctggacagaatcaacaaacgctaaaattcagtgtggccggacccagcaacatggctgtccagggaagaaactacatacctggacccagctaccgacaacaacgtgtctcaaccactgtgactcaaaacaacaacagcgaatttgcttggcctggagcttcttcttgggctctcaatggacgtaatagcttgatgaatcctggacctgctatggccagccacaaagaaggagaggaccgtttctttcctttgtctggatctttaatttttggcaaacaaggaactggaagagacaacgtggatgcggacaaagtcatgataaccaacgaagaagaaattaaaactactaacccggtagcaacggagtcctatggacaagtggccacaaaccaccagagtgcccaagcacaggcgcagaccggctgggttcaaaaccaaggaatacttccgggtatggtttggcaggacagagatgtgtacctgcaaggacccatctgggccaagattcctcacacggacggcaacttccacccgtctccgctgatgggcggctttggcctgaaacatcctccgcctcagatcctgatcaagaacacgcctgtacctgcggatcctccgaccaccttcaaccagtcaaagctgaactctttcatcacgcaatacagcaccggacaggtcagcgtggaaattgaatgggagctgcagaaggaaaacagcaagcgctggaatcccgaagtgcagtatacatctaactatgcaaaatctgccaacgttgatttcactgtggacaacaatggactttatactgagcctcgccccattggcacccgttacctcacccgtcccctgtaa

SEQ ID NO: 345 - protein, 734 aa, Artificial Sequence
  Description of Artificial Sequence: Synthetic polypeptide
MAADGYLPDWLEDNLSEGIREWWALKPGVPQPKANQQHQDNRRGLVLPGYKYLGPGNGLDKGEPVNEADAAALEHDKAYDQQLKAGDNPYLKYNHADAEFQERLKEDTSFGGNLGRAVFQAKKRLLEPLGLVEEAAKTAPGKKRPVEQSPQEPDSSAGIGKSGAQPAKKRLNFGQTGDTESVPDPQPIGEPPAAPSGVGSLTMASGGGAPVADNNEGADGVGSSSGNWHCDSQWLGDRVITTSTRTWALPTYNNHLYKQISSQSGASNDNHYFGYSTPWGYFDFNRFHCHFSPRDWQRLINNNWGFRPKRLSFKLFNIQVKEVTDNNGVKTIANNLTSTVQVFTDSDYQLPYVLGSAHEGCLPPFPADVFMIPQYGYLTLNDGSQAVGRSSFYCLEYFPSQMLRTGNNFQFSYEFENVPFHSSYAHSQSLDRLMNPLIDQYLYYLSKTINGSGQNQQTLKFSVAGPSNMAVQGRNYIPGPSYRQQRVSTTVTQNNNSEFAWPGASSWALNGRNSLMNPGPAMASHKEGEDRFFPLSGSLIFGKQGTGRDNVDADKVMITNEEEIKTTNPVATESYGQVATNHQSAQAQAQTGWVQNQGILPGMVWQDRDVYLQGPIWAKIPHTDGNFHPSPLMGGFGLKHPPPQILIKNTPVPADPPTTFNQSKLNSFITQYSTGQVSVEIEWELQKENSKRWNPEVQYTSNYAKSANVDFTVDNNGLYTEPRPIGTRYLTRPL

SEQ ID NO: 346 - DNA, 2211 bp, Artificial Sequence
  Description of Artificial Sequence: Synthetic polynucleotide
atggctgccgatggttatcttccagattggctcgaggacaacctctctgagggcattcgcgagtggtgggcgctgaaacctggagccccgaagcccaaagccaaccagcaaaagcaggacgacggccggggtctggtgcttcctggctacaagtacctcggacccttcaacggactcgacaagggggagcccgtcaacgcggcggacgcagcggccctcgagcacgacaaggcctacgaccagcagctgcaggcgggtgacaatccgtacctgcggtataaccacgccgacgccgagtttcaggagcgtctgcaagaagatacgtcttttgggggcaacctcgggcgagcagtcttccaggccaagaagtgggttctcgaacctctcggtctggttgaggaaggcgctaagacggctcctggaaagaaacgtccggtagagcagtcgccacaagagccagactcctcctcgggcatcggcaagacaggccagcagcccgctaaaaagagactcaattttggtcagactggcgactcagagtcagtccccgacccacaacctctcggagaacctccagcaacccccgctgctgtgggacctactacaatggcttcaggcggtggcgcaccaatggcagacaataacgaaggcgccgacggagtgggtaatgcctcaggaaattggcattgcgattccacatggctgggcgacagagtcatcaccaccagcacccgcacctgggccttgcccacctacaataaccacctctacaagcaaatctccagtgcttcaacgggggccagcaacgacaaccactacttcggctacagcaccccctgggggtattttgatttcaacagattccactgccatttctcaccacgtgactggcagcgactcatcaacaacaattggggattccggcccaagagactcaacttcaagctcttcaacatccaagtcaaggaggtcacgacgaatgatggcgtcacaaccatcgctaataaccttaccagcacggttcaagtcttctcggactcggagtaccagcttccgtacgtcctcggctctgcgcaccagggctgcctccctccgttcccggcggacgtgttcatgattccgcaatacggctacctgacgctcaacaatggcagccaagccgtgggacgttcatccttttactgcctggaatatttcccttctcagatgctgagaacgggcaacaactttaccttcagctacacctttgaggaagtgcctttccacagcagctacgcgcacagccagagcctggaccggctgatgaatcctctcatcgaccaatacctgtattacctgaacagaactcaaaatcagtccggaagtgcccaaaacaaggacttgctgtttagccgtgggtctccagctggcatgtctgttcagcccaaaaactggctacctggaccctgttatcggcagcagcgcgtttctaaaacaaaaacagacaacaacaacagcaattttacctggactggtgcttcaaaatataacctcaatgggcgtgaatccatcatcaaccctggcactgctatggcctcacacaaagacgacgaagacaagttctttcccatgagcggtgtcatgatttttggaaaggagagcgccggagcttcaaacactgcattggacaatgtcatgatcaccgacgaagaggaaatcaaagccactaaccccgtggccaccgaaagatttgggactgtggcagtcaatctccagagcagcagcacagaccctgcgaccggagatgtgcatgttatgggagccttacctggcatggtgtggcaagatagagacgtgtacctgcagggtcccatttgggccaaaattcctcacacagatggacactttcacccgtctcctcttatgggcggctttggactcaagaacccgcctcctcagatcctcatcaaaaacacgcctgttcctgcgaatcctccggcggagttttcagctacaaagtttgcttcattcatcacccaatactccacaggacaagtgagtgtggaaattgaatgggagctgcagaaagaaaacagcaagcgctggaatcccgaagtgcagtacacatccaattatgcaaaatctgccaacgttgattttactgtggacaacaatggactttatactgagcctcgccccattggcacccgttacctcacccgtcccctgtaa

SEQ ID NO: 347 - protein, 736 aa, Artificial Sequence
  Description of Artificial Sequence: Synthetic polypeptide
MAADGYLPDWLEDNLSEGIREWWALKPGAPKPKANQQKQDDGRGLVLPGYKYLGPFNGLDKGEPVNAADAAALEHDKAYDQQLQAGDNPYLRYNHADAEFQERLQEDTSFGGNLGRAVFQAKKWVLEPLGLVEEGAKTAPGKKRPVEQSPQEPDSSSGIGKTGQQPAKKRLNFGQTGDSESVPDPQPLGEPPATPAAVGPTTMASGGGAPMADNNEGADGVGNASGNWHCDSTWLGDRVITTSTRTWALPTYNNHLYKQISSASTGASNDNHYFGYSTPWGYFDFNRFHCHFSPRDWQRLINNNWGFRPKRLNFKLFNIQVKEVTTNDGVTTIANNLTSTVQVFSDSEYQLPYVLGSAHQGCLPPFPADVFMIPQYGYLTLNNGSQAVGRSSFYCLEYFPSQMLRTGNNFTFSYTFEEVPFHSSYAHSQSLDRLMNPLIDQYLYYLNRTQNQSGSAQNKDLLFSRGSPAGMSVQPKNWLPGPCYRQQRVSKTKTDNNNSNFTWTGASKYNLNGRESIINPGTAMASHKDDEDKFFPMSGVMIFGKESAGASNTALDNVMITDEEEIKATNPVATERFGTVAVNLQSSSTDPATGDVHVMGALPGMVWQDRDVYLQGPIWAKIPHTDGHFHPSPLMGGFGLKNPPPQILIKNTPVPANPPAEFSATKFASFITQYSTGQVSVEIEWELQKENSKRWNPEVQYTSNYAKSANVDFTVDNNGLYTEPRPIGTRYLTRPL

SEQ ID NO: 348 - DNA, 2214 bp, Artificial Sequence
  Description of Artificial Sequence: Synthetic polynucleotide
atggctgccgatggttatcttccagattggctcgaggacaaccttagtgaaggaattcgcgagtggtgggctttgaaacctggagcccctcaacccaaggcaaatcaacaacatcaagacaacgctcgaggtcttgtgcttccgggttacaaataccttggacccggcaacggactcgacaagggggagccggtcaacgcagcagacgcggcggccctcgagcacgacaaggcctacgaccagcagctgcaggcgggtgacaatccgtacctgcggtataaccacgccgacgccgagtttcaggagcgtctgcaagaagatacgtcttttgggggcaaccttggcagagcagtcttccaggccaaaaagaggatccttgagcctcttggtctggttgaggaagcagctaaaacggctcctggaaagaagaggcctgtagatcagtctcctcaggaaccggactcatcatctggtgttggcaaatcgggcaaacagcctgccagaaaaagactaaatttcggtcagactggcgactcagagtcagtcccagaccctcaacctctcggagaaccaccagcagcccccacaagtttgggatctaatacaatggcttcaggcggtggcgcaccaatggcagacaataacgagggtgccgatggggtgggtagttcctcgggaaattggcattgcgattcccaatggctgggggacagagtcatcaccaccagcacccgaacctgggccctgcccacctacaacaatcacctctacaagcaaatctccaacgggacatcgggaggagccaccaacgacaacacctacttcggctacagcaccccctgggggtattttgactttaacagattccactgccacttttcaccacgtgactggcagcgactcatcaacaacaactggggattccggcccaagagactcagcttcaagctcttcaacatccaggtcaaggaggtcacgcagaatgaaggcaccaagaccatcgccaataacctcaccagcaccatccaggtgtttacggactcggagtaccagctgccgtacgttctcggctcggcgcaccagggctgcctccctccgttcccggcggacgtcttcatggtgccacagtatggatacctgacgctcaacaatggcagccaagccgtgggacgttcatccttttactgcctggaatatttcccttctcagatgctgagaacgggcaacaactttaccttcagctacacctttgaggaagtgcctttccacagcagctacgcgcacagccagagcttggaccggctgatgaatcctctgattgaccagtacctgtactacttgtctcggactcaaacaacaggaggcacggcaaatacgcagactctgggcttcagccaaggtgggcctaatacaatggccaatcaggcaaagaactggctgccaggaccctgttaccgccaacaacgcgtctcaacgacaaccgggcaaaacaacaatagcaactttgcctggactgctgggaccaaataccatctgaatggaagaaattcattggctaatcctggcatcgctatggcaacacacaaagacgacgaggagcgtttttttcccagtaacgggatcctgatttttggcaaacaaaatgctgccagagacaatgcggattacagcgatgtcatgctcaccagcgaggaagaaatcaaaaccactaaccctgtggctacagaggaatacggtatcgtggcagataacttgcagcagcaaaacacggctcctcaaattggaactgtcaacagccagggggacttacccggtatggtctggcagaaccgggacgtgtacctgcagggtcccatctgggccaagattcctcacacggacggcaacttccacccgtctccgctgatgggcggctttggcctgaaacatcctccgcctcagatcctgatcaagaacacgcctgtacctgcggatcctccgaccaccttcaaccagtcaaagctgaactctttcatcacgcaatacagcaccggacaggtcagcgtggagatcgagtgggagctgcagaaggaaaacagcaagcgctggaacccggagatccagtacacttccaactattacaagtctaataatgttgaatttgctgttaatactgaaggtgtatatagtgaaccccgccccattggcaccagatacctgactcgtaatctgtaa

SEQ ID NO: 349 - protein, 737 aa, Artificial Sequence
  Description of Artificial Sequence: Synthetic polypeptide
MAADGYLPDWLEDNLSEGIREWWALKPGAPQPKANQQHQDNARGLVLPGYKYLGPGNGLDKGEPVNAADAAALEHDKAYDQQLQAGDNPYLRYNHADAEFQERLQEDTSFGGNLGRAVFQAKKRILEPLGLVEEAAKTAPGKKRPVDQSPQEPDSSSGVGKSGKQPARKRLNFGQTGDSESVPDPQPLGEPPAAPTSLGSNTMASGGGAPMADNNEGADGVGSSSGNWHCDSQWLGDRVITTSTRTWALPTYNNHLYKQISNGTSGGATNDNTYFGYSTPWGYFDFNRFHCHFSPRDWQRLINNNWGFRPKRLSFKLFNIQVKEVTQNEGTKTIANNLTSTIQVFTDSEYQLPYVLGSAHQGCLPPFPADVFMVPQYGYLTLNNGSQAVGRSSFYCLEYFPSQMLRTGNNFTFSYTFEEVPFHSSYAHSQSLDRLMNPLIDQYLYYLSRTQTTGGTANTQTLGFSQGGPNTMANQAKNWLPGPCYRQQRVSTTTGQNNNSNFAWTAGTKYHLNGRNSLANPGIAMATHKDDEERFFPSNGILIFGKQNAARDNADYSDVMLTSEEEIKTTNPVATEEYGIVADNLQQQNTAPQIGTVNSQGDLPGMVWQNRDVYLQGPIWAKIPHTDGNFHPSPLMGGFGLKHPPPQILIKNTPVPADPPTTFNQSKLNSFITQYSTGQVSVEIEWELQKENSKRWNPEIQYTSNYYKSNNVEFAVNTEGVYSEPRPIGTRYLTRNL

SEQ ID NO: 350 - DNA, 2205 bp, Artificial Sequence
  Description of Artificial Sequence: Synthetic polynucleotide
atggctgctgacggttatcttccagattggctcgaggacaacctttctgaaggcattcgtgagtggtgggctctgaaacctggagtccctcaacccaaagcgaaccaacaacaccaggacaactgtcggggtcttgtgcttccgggttacaaatacctcggacccggtaacggactcgacaaaggagagccggtcaacgaggcggacgcggcagccctcgaacacgacaaggcctacgaccagcagctcaaggccggagacaacccgtacctcaagtacaaccacgccgacgccgagttccaggagcggctcaaagaagatacgtcttttgggggcaacctcgggcgagcagtcttccagaccaaaaagaggcttcttgaacctcttggtctggttgaggaagcggctaagacggctcctggaaagaagaggcctgtagagcagtctcctcaggaaccggactcctccgcgggtattggcaaatcgggtgcacagcccgctaaaaagagactcaatttcggtcagactggcgacacagagtcagtcccagaccctcaaccaatcggagaacctcccgcagccccctcaggtgtgggatctcttacaatggcttcaggtggtggcgcaccagtggcagacaataacgaaggtgccgatggagtgggtagttcctcgggaaattggcattgcgattcccaatggctgggggacagagtcatcaccaccagcacccgaacctgggccctgcccacctacaacaaccacctctacaaacaaatttccagccaatcaggagcctcgaacgacaatcactactttggctacagcaccccttgggggtattttgacttcaacagattccactgccacttttcaccacgtgactggcagcgactcatcaacaacaactggggattccggcccaagagactcagcttcaagctcttcaacatccaggtcaaagaggttacggacaacaatggagtcaagaccatcgccaataaccttaccagcacggtccaggtcttcacggactcagactatcagctcccgtacgtgctcgggtcggctcacgagggctgcctcccgccgttcccagcggacgttttcatgattcctcagtacgggtatctgacgcttaatgatggaagccaggccgtgggtcgttcgtccttttactgcctggaatatttcccgtcgcaaatgctaagaacgggtaacaacttccagttcagctacgagtttgagaacgtacctttccatagcagctacgctcacagccaaagcctggaccgactaatgaatccactcatcgaccaatacttgtactatctctcaaagactattaacggttctggacagaatcaacaaacgctaaaattcagtgtggccggacccagcaacatggctgtccagggaagaaactacatacctggacccagctaccgacaacaacgtgtctcaaccactgtgactcaaaacaacaacagcgaatttgcttggcctggagcttcttcttgggctctcaatggacgtaatagcttgatgaatcctggacctgctatggccagccacaaagaaggagaggaccgtttctttcctttgtctggatctttaatttttggcaaacaaggaactggaagagacaacgtggatgcggacaaagtcatgataaccaacgaagaagaaattaaaactactaacccggtagcaacggagtcctatggacaagtggccacaaaccaccagagtgcccaagcacaggcgcagaccggctgggttcaaaaccaaggaatacttccgggtatggtttggcaggacagagatgtgtacctgcaaggacccatctgggccaagattcctcacacggacggcaacttccacccgtctccgctgatgggcggctttggcctgaaacatcctccgcctcagatcctgatcaagaacacgcctgttcctgcgaatcctccggcggagttttcagctacaaagtttgcttcattcatcacccagtactccacaggacaagtgagtgtggaaattgaatgggagctgcagaaagaaaacagcaagcgctggaatcccgaagtgcagtacacatccaattatgcaaaatctgccaacgttgattttactgtggacaacaatggactttatactgagcctcgccccattggcacccgttaccttaccaaacctctgtaa

SEQ ID NO: 351 - protein, 734 aa, Artificial Sequence
  Description of Artificial Sequence: Synthetic polypeptide
MAADGYLPDWLEDNLSEGIREWWALKPGVPQPKANQQHQDNCRGLVLPGYKYLGPGNGLDKGEPVNEADAAALEHDKAYDQQLKAGDNPYLKYNHADAEFQERLKEDTSFGGNLGRAVFQTKKRLLEPLGLVEEAAKTAPGKKRPVEQSPQEPDSSAGIGKSGAQPAKKRLNFGQTGDTESVPDPQPIGEPPAAPSGVGSLTMASGGGAPVADNNEGADGVGSSSGNWHCDSQWLGDRVITTSTRTWALPTYNNHLYKQISSQSGASNDNHYFGYSTPWGYFDFNRFHCHFSPRDWQRLINNNWGFRPKRLSFKLFNIQVKEVTDNNGVKTIANNLTSTVQVFTDSDYQLPYVLGSAHEGCLPPFPADVFMIPQYGYLTLNDGSQAVGRSSFYCLEYFPSQMLRTGNNFQFSYEFENVPFHSSYAHSQSLDRLMNPLIDQYLYYLSKTINGSGQNQQTLKFSVAGPSNMAVQGRNYIPGPSYRQQRVSTTVTQNNNSEFAWPGASSWALNGRNSLMNPGPAMASHKEGEDRFFPLSGSLIFGKQGTGRDNVDADKVMITNEEEIKTTNPVATESYGQVATNHQSAQAQAQTGWVQNQGILPGMVWQDRDVYLQGPIWAKIPHTDGNFHPSPLMGGFGLKHPPPQILIKNTPVPANPPAEFSATKFASFITQYSTGQVSVEIEWELQKENSKRWNPEVQYTSNYAKSANVDFTVDNNGLYTEPRPIGTRYLTKPL

SEQ ID NO: 352 - DNA, 2211 bp, Artificial Sequence
  Description of Artificial Sequence: Synthetic polynucleotide
atggctgccgatggttatcttccagattggctcgaggacaacctctctgagggcattcgcgagtggtgggacttgaaacctggagcccctaaacccaaggcaaatcaacaacatcaggacaacgctcgaggtcttgtgcttccgggttacaaataccttggacccggcaacggactcgacaagggggagccggtcaacgcagcagacgcggcggccctcgagcacgacaaggcctacgaccagcagctcaaggccggagacaacccgtacctcaagtacaaccacgccgacgccgagttccaggagcggctcaaagaagatacgtcttttgggggcaacctcgggcgagcagtcttccaggccaaaaagaggcttcttgaacctcttggtctggttgaggaagcggctaagacggctcctggaaagaagagaccggtagagccatcaccccagcgttctccagactcctctacgggcatcggcaagaaaggccaacagcccgctaaaaagagactcaattttggtcagactggcgactcagagtcagtccccgacccacaacctctcggagaacctccagcaacccccgctgctgtgggacctactacaatggcttcaggcggtggcgcaccaatggcagacaataacgagggtgccgatggagtgggtaattcctcaggaaattggcattgcgattcccaatggctgggcgacagagtcatcaccaccagcaccagaacctgggccctgcccacttacaacaaccatctctacaagcaaatctccagccaatcaggagcttcaaacgacaaccactactttggctacagcaccccttgggggtattttgactttaacagattccactgccacttttcaccacgtgactggcaaagactcatcaacaacaactggggattccgacccaagagactcaacttcaagctcttcaacatccaagtcaaggaggtcacgacgaatgatggcgtcacgaccatcgctaataaccttaccagcacggttcaagtcttctcggactcggagtaccagttgccgtacgtcctcggctctgcgcaccagggctgcctccctccgttcccggcggacgtgttcatgattccgcagtacggctacctaacgctcaacaatggcagccaagccgtgggacgttcatccttttactgcctggaatatttcccttctcagatgctgagaacgggcaacaactttaccttcagctacacttttgaggacgttcctttccacagcagctacgctcacagccagagtctggaccgtctcatgaatcctctcatcgaccagtacctgtattacttgagcagaacaaacactccaagtggaaccaccacgcagtcaaggcttcagttttctcaggccggagcgagtgacattcgggaccagtctaggaactggcttcctggaccctgttaccgccagcagcgcgtttctaaaacaaaaacagacaacaacaacagcaattttacctggactggtgcttcaaaatataaccttaatgggcgtgaatctataatcaaccctggcactgctatggcctcacacaaagacgacgaagacaagttctttcccatgagcggtgtcatgatttttggaaaagagagcgccggagcttcaaacactgcattggacaatgtcatgatcacagacgaagaggaaatcaaagccactaaccccgtggccaccgaaagatttgggactgtggcagtcaatctccagagcagcagcacagaccctgcgaccggagatgtgcatgttatgggagcattacctggcatggtgtggcaagatagagacgtgtacctgcagggtcccatttgggccaaaattcctcacacagatggacactttcacccgtctcctcttatgggcggctttggactcaagaacccgcctcctcagatcctcatcaaaaacacgcctgttcctgcgaatcctccggcggagttttcagctacaaagtttgcttcattcatcacccaatactccacaggacaagtgagtgtggaaattgaatgggagctgcagaaagaaaacagcaagcgctggaatcccgaagtgcagtacacatccaattatgcaaaatctgccaacgttgattttactgtggacaacaatggactttatactgagcctcgccccattggcacccgttaccttacccgtcccctgtaa

SEQ ID NO: 353 - protein, 736 aa, Artificial Sequence
  Description of Artificial Sequence: Synthetic polypeptide
MAADGYLPDWLEDNLSEGIREWWDLKPGAPKPKANQQHQDNARGLVLPGYKYLGPGNGLDKGEPVNAADAAALEHDKAYDQQLKAGDNPYLKYNHADAEFQERLKEDTSFGGNLGRAVFQAKKRLLEPLGLVEEAAKTAPGKKRPVEPSPQRSPDSSTGIGKKGQQPAKKRLNFGQTGDSESVPDPQPLGEPPATPAAVGPTTMASGGGAPMADNNEGADGVGNSSGNWHCDSQWLGDRVITTSTRTWALPTYNNHLYKQISSQSGASNDNHYFGYSTPWGYFDFNRFHCHFSPRDWQRLINNNWGFRPKRLNFKLFNIQVKEVTTNDGVTTIANNLTSTVQVFSDSEYQLPYVLGSAHQGCLPPFPADVFMIPQYGYLTLNNGSQAVGRSSFYCLEYFPSQMLRTGNNFTFSYTFEDVPFHSSYAHSQSLDRLMNPLIDQYLYYLSRTNTPSGTTTQSRLQFSQAGASDIRDQSRNWLPGPCYRQQRVSKTKTDNNNSNFTWTGASKYNLNGRESIINPGTAMASHKDDEDKFFPMSGVMIFGKESAGASNTALDNVMITDEEEIKATNPVATERFGTVAVNLQSSSTDPATGDVHVMGALPGMVWQDRDVYLQGPIWAKIPHTDGHFHPSPLMGGFGLKNPPPQILIKNTPVPANPPAEFSATKFASFITQYSTGQVSVEIEWELQKENSKRWNPEVQYTSNYAKSANVDFTVDNNGLYTEPRPIGTRYLTRPL

SEQ ID NO: 354 - DNA, 2214 bp, Artificial Sequence; identical to SEQ ID NO: 326
  Description of Artificial Sequence: Synthetic polynucleotide

SEQ ID NO: 355 - protein, 737 aa, Artificial Sequence; identical to SEQ ID NO: 327
  Description of Artificial Sequence: Synthetic polypeptide

SEQ ID NO: 356 - DNA, 2205 bp, Artificial Sequence
  Description of Artificial Sequence: Synthetic polynucleotide
atggctgctgacggttatcttccagattggctcgaggacaacctttctgaaggcattcgtgagtggtgggctctgaaacctggagtccctcaacccaaagcgaaccaacaacaccaggacaaccgtcggggtcttgtgcttccgggttacaaatacctcggacccggtaacggactcgacaaaggagagccggtcaacgaggcggacgcggcagccctcgaacacgacaaggcctacgaccagcagctcaaggccggagacaacccgtacctcaagtacaaccacgccgacgccgagttccaggagcggctcaaagaagatacgtcttttgggggcaacctcgggcgagcagtcttccaggccaaaaagaggcttcttgaacctcttggtctggttgaggaagcggctaagacggctcctggaaagaagaggcctgtagagcagtctcctcaggaaccggactcctccgcgggtattggcaaatcgggtgcacagcccgctaaaaagagactcaatttcggtcagactggcgacacagagtcagtcccagaccctcaaccaatcggagaacctcccgcagccccctcaggtgtgggatctcttacaatggcttcaggtggtggcgcaccagtggcagacaataacgaaggtgccgatggagtgggtagttcctcgggaaattggcattgcgattcccaatggctgggggacagagtcatcaccaccagcacccgaacctgggccctgcccacctacaacaaccacctctacaaacaaatttccagccaatcaggagcctcgaacgacaatcactactttggctacagcaccccttgggggtattttgacttcaacagattccactgccacttttcaccacgtgactggcagcgactcatcaacaacaactggggattccggcccaagagactcagcttcaagctcttcaacatccaggtcaaagaggttacggacaacaatggagtcaagaccatcgccaataaccttaccagcacggtccaggtcttcacggactcagactatcagctcccgtacgtgctcgggtcggctcacgagggctgcctcccgccgttcccagcggacgttttcatgattcctcagtacgggtatctgacgcttaatgatggaagccaggccgtgggtcgttcgtccttttactgcctggaatatttcccgtcgcaaatgctaagaacgggtaacaacttccagttcagctacgagtttgagaacgtacctttccatagcagctacgctcacagccaaagcctggaccgactaatgaatccactcatcgaccaatacttgtactatctctcaaagactattaacggttctggacagaatcaacaaacgctaaaattcagtgtggccggacccagcaacatggctgtccagggaagaaactacatacctggacccagctaccgacaacaacgtgtctcaaccactgtgactcaaaacaacaacagcgaatttgcttggcctggagcttcttcttgggctctcaatggacgtaatagcttgatgaatcctggacctgctatggccagccacaaagaaggagaggaccgtttctttcctttgtctggatctttaatttttggcaaacaaggaactggaagagacaacgtggatgcggacaaagtcatgataaccaacgaagaagaaattaaaactactaacccggtagcaacggagtcctatggacaagtggccacaaaccaccagagtgcccaagcacaggcgcagaccggctgggttcaaaaccaaggaatacttccgggtatggtttggcaggacagagatgtgtacctgcaaggacccatttgggccaaaattcctcacacggacggcaactttcacccttctccgctgatgggagggtttggaatgaaacacccgcctcctcagatcctcatcaaaaacacacctgtacctgcggatcctccaacggccttcaacaaggacaagctgaactctttcatcacccagtattctactggccaagtcagcgtggagatcgagtgggagctgcagaaggaaaacagcaagcgctggaaccccgagatccagtacacctccaactactacaaatctacaagtgtggactttgctgttaatacagaaggcgtgtactctgaaccccgccccattggcacccgttacctcacccgtaatctgtaa

SEQ ID NO: 357 - protein, 734 aa, Artificial Sequence
  Description of Artificial Sequence: Synthetic polypeptide
MAADGYLPDWLEDNLSEGIREWWALKPGVPQPKANQQHQDNRRGLVLPGYKYLGPGNGLDKGEPVNEADAAALEHDKAYDQQLKAGDNPYLKYNHADAEFQERLKEDTSFGGNLGRAVFQAKKRLLEPLGLVEEAAKTAPGKKRPVEQSPQEPDSSAGIGKSGAQPAKKRLNFGQTGDTESVPDPQPIGEPPAAPSGVGSLTMASGGGAPVADNNEGADGVGSSSGNWHCDSQWLGDRVITTSTRTWALPTYNNHLYKQISSQSGASNDNHYFGYSTPWGYFDFNRFHCHFSPRDWQRLINNNWGFRPKRLSFKLFNIQVKEVTDNNGVKTIANNLTSTVQVFTDSDYQLPYVLGSAHEGCLPPFPADVFMIPQYGYLTLNDGSQAVGRSSFYCLEYFPSQMLRTGNNFQFSYEFENVPFHSSYAHSQSLDRLMNPLIDQYLYYLSKTINGSGQNQQTLKFSVAGPSNMAVQGRNYIPGPSYRQQRVSTTVTQNNNSEFAWPGASSWALNGRNSLMNPGPAMASHKEGEDRFFPLSGSLIFGKQGTGRDNVDADKVMITNEEEIKTTNPVATESYGQVATNHQSAQAQAQTGWVQNQGILPGMVWQDRDVYLQGPIWAKIPHTDGNFHPSPLMGGFGMKHPPPQILIKNTPVPADPPTAFNKDKLNSFITQYSTGQVSVEIEWELQKENSKRWNPEIQYTSNYYKSTSVDFAVNTEGVYSEPRPIGTRYLTRNL

SEQ ID NO: 358 - DNA, 2217 bp, Artificial Sequence
  Description of Artificial Sequence: Synthetic polynucleotide
atggctgccgatggttatcttccagattggctcgaggacaacctctctgagggcattcgcgagtggtgggcgctgaaacctggagccccgaagcccaaagccaaccagcaaaagcaggacgacggccggggtctggtgcttcctggctacaagtacctcggacccttcaacggactcgacaagggggagcccgtcaacgcggcggacgcagcggccctcgagcacgacaaggcctacgaccagcagctgcaggcgggtgacaatccgtacctgcggtataaccacgccgacgccgagtttcaggagcgtctgcaagaagatacgtcttttgggggcaacctcgggcgagcagtcttccaggccaagaagcgggttctcgaacctctcggtctggttgaggaaggcgctaagacggctcctggaaagaagagaccggtagagccatcaccccagcgttctccagactcctctacgggcatcggcaagaaaggccaacagcccgccagaaaaagactcaattttggtcagactggcgactcagagtcagttccagaccctcaacctctcggagaacctccagcagcgccctctggtgtgggacctaatacaatggctgcaggcggtggcgcaccaatggcagacaataacgaaggcgccgacggagtgggtagttcctcgggaaattggcattgcgattccacatggctgggcgacagagtcatcaccaccagcacccgaacctgggccctgcccacctacaacaaccacctctacaagcaaatctccaacgggacatcgggaggagccaccaacgacaacacctacttcggctacagcaccccctgggggtattttgactttaacagattccactgccacttttcaccacgtgactggcagcgactcatcaacaacaactggggattccggcccaagagactcagcttcaagctcttcaacatccaggtcaaggaggtcacgcagaatgaaggcaccaagaccatcgccaataacctcaccagcaccatccaggtgtttacggactcggagtaccagctgccgtacgttctcggctctgcccaccagggctgcctgcctccgttcccggcggacgtgttcatgattccccagtacggctacctaacactcaacaacggtagtcaggccgtgggacgctcctccttctactgcctggaatactttccttcgcagatgctgagaaccggcaacaacttccagtttacttacaccttcgaggacgtgcctttccacagcagctacgcccacagccagagcttggaccggctgatgaatcctctgattgaccagtacctgtactacttgtctcggactcaaacaacaggaggcacggcaaatacgcagactctgggcttcagccaaggtgggcctaatacaatggccaatcaggcaaagaactggctgccaggaccctgttaccgccaacaacgcgtctcaacgacaaccgggcaaaacaacaatagcaactttgcctggactgctgggaccaaataccatctgaatggaagaaattcattggctaatcctggcatcgctatggcaacacacaaagacgacgaggagcgtttttttcccagtaacgggatcctgatttttggcaaacaaaatgctgccagagacaatgcggattacagcgatgtcatgctcaccagcgaggaagaaatcaaaaccactaaccctgtggctacagaggaatacggtatcgtggcagataacttgcagcagcaaaacacggctcctcaaattggaactgtcaacagccagggggccttacccggtatggtctggcagaaccgggacgtgtacctgcagggtcccatctgggccaagattcctcacacggacggcaacttccacccctctcccctcatgggtggattcggacttaaacatcctccgcctcagatcctgatcaagaacacgcctgtacctgcggatcctccgaccaccttcaaccagtcaaagctgaactctttcatcacgcaatacagcaccggacaggtcagcgtggaaattgaatgggagctgcagaaggaaaacagcaagcgctggaaccccgagatccagtacacctccaactactacaaatctacaagtgtggactttgctgttaatacagaaggcgtgtactctgaaccccgccccattggcacccgttacctcacccgtaatctgtaa

SEQ ID NO: 359 - protein, 738 aa, Artificial Sequence; identical to SEQ ID NO: 105
  Description of Artificial Sequence: Synthetic polypeptide

SEQ ID NO: 360 - DNA, 2211 bp, Artificial Sequence
  Description of Artificial Sequence: Synthetic polynucleotide
atggctgctgacggttatcttccagattggctcgaggacaacctttctgaaggcattcgagagtggtgggcgctgcaacctggagcccctaaacccaaggcaaatcaacaacatcaggacaacgctcggggtcttgtgcttccgggttacaaatacctcggacccggcaacggactcgacaagggggaacccgtcaacgcagcggacgcggcagccctcgagcacgacaaggcctacgaccagcagctcaaggccggtgacaacccctacctcaagtacaaccacgccgacgccgagttccaggagcggctcaaagaagatacgtcttttgggggcaacctcgggcgagcagtcttccaggccaaaaagaggcttcttgaacctcttggtctggttgaggaagcggctaagacggctcctggaaagaagaggcctgtagatcagtctcctcaggaaccggactcatcatctggtgttggcaaatcgggcaaacagcctgccagaaaaagactaaatttcggtcagactggcgactcagagtcagtcccagaccctcaacctctcggagaaccaccagcagcccccacaagtttgggatctaatacaatggcttcaggcggtggcgcaccaatggcagacaataacgagggtgccgatggagtgggtaattcctcaggaaattggcattgcgattcccaatggctgggcgacagagtcatcaccaccagcaccagaacctgggccctgcccacttacaacaaccatctctacaagcaaatctccagccaatcaggagcttcaaacgacaaccactactttggctacagcaccccttgggggtattttgactttaacagattccactgccacttctcaccacgtgactggcagcgactcattaacaacaactggggattccggcccaagaaactcagcttcaagctcttcaacatccaagttaaagaggtcacgcagaacgatggcacgacgactattgccaataaccttaccagcacggttcaggtgtttacggactcggagtatcagctcccgtacgtgctcgggtcggcgcaccaaggctgtctcccgccgtttccagcggacgtcttcatggtccctcagtatggatacctcaccctgaacaacggaagtcaagcggtgggacgctcatccttttactgcctggagtacttcccttcgcagatgctaaggactggaaataacttccaattcagctataccttcgaggatgtaccttttcacagcagctacgctcacagccagagtttggatcgcttgatgaatcctcttattgatcagtatctgtactacctgaacagaacgcaaggaacaacctctggaacaaccaaccaatcacggctgctttttagccaggctgggcctcagtctatgtctttgcaggccagaaattggctacctgggccctgctaccggcaacagagactttcaaagactgctaacgacaacaacaacagtaactttccttggacagcggccagcaaatatcatctcaatggccgcgactcgctggtgaatccaggaccagctatggccagtcacaaggacgatgaagaaaaatttttccctatgcacggcaatctaatatttggcaaagaagggacaacggcaagtaacgcagaattagataatgtaatgattacggatgaagaagagattcgtaccaccaatcctgtggcaacagagcagtatggaactgtggcaaataacttgcagagctcaaatacagctcccacgactagaactgtcaatgatcagggggccttacctggcatggtgtggcaagatcgtgacgtgtaccttcaaggacctatctgggcaaagattcctcacacggatggacactttcatccttctcctctgatgggaggctttggactgaaacatccgcctcctcaaatcatgatcaaaaatactccggtaccggcaaatcctccgacgactttcagcccggccaagtttgcttcatttatcactcagtactccactggacaggtcagcgtggaaattgagtgggagctacagaaagaaaacagcaaacgttggaatccagagattcagtacacttccaactacaacaagtctgttaatgtggactttactgtagacactaatggtgtttatagtgaacctcgccccattggcacccgttaccttacccgtcccctgtaa

SEQ ID NO: 361 - protein, 736 aa, Artificial Sequence; identical to SEQ ID NO: 331
  Description of Artificial Sequence: Synthetic polypeptide

SEQ ID NO: 362 - DNA, 2211 bp, Artificial Sequence; identical to SEQ ID NO: 330
  Description of Artificial Sequence: Synthetic polynucleotide

SEQ ID NO: 363 - protein, 736 aa, Artificial Sequence; identical to SEQ ID NO: 331
  Description of Artificial Sequence: Synthetic polypeptide

SEQ ID NO: 364 - DNA, 2211 bp, Artificial Sequence
  Description of Artificial Sequence: Synthetic polynucleotide
atggctgctgacggttatcttccagattggctcgaggacaacctttctgaaggcattcgtgagtggtgggctctgaaacctggagtccctcaacccaaagcgaaccaacaacaccaggacaaccgtcggggtcttgtgcttccgggttacaaatacctcggacccggtaacggactcgacaaaggagagcccgtcaacgcggcggatgcagcggccctcgagcacgacaaggcctacgaccagcagctcaaagcgggtgacaatccgtacctgcggtataaccacgccgacgccgagtttcaggagcgtctgcaagaagatacgtcttttgggggcaacctcgggcgagcagtcttccaggccaagaagagggttctcgaaccttttggtctggttgaggaaggtgctaagacggctcctggaaagaaacgtccggtagagcagtcgccacaagagccagactcctcctcgggcatcggcaagacaggccagcagcccgctaaaaagagactcaattttggtcagactggcgactcagagtcagtccccgacccacaacctctcggagaacctccagcaacccccgctgctgtgggacctactacaatggcttcaggcggtggcgcaccaatggcagacaataacgaaggcgccgacggagtgggtaatgcctcaggaaattggcattgcgattccacatggctgggcgacagagtcatcaccaccagcacccgcacctgggccttgcccacctacaataaccacctctacaagcaaatctccagtgcttcaacgggggccagcaacgacaaccactacttcggctacagcaccccctgggggtattttgatttcaacagattccactgccatttctcaccacgtgactggcagcgactcatcaacaacaattggggattccggcccaagagactcaacttcaagctcttcaacatccaagtcaaggaggtcacgacgaatgatggcgtcacgaccatcgctaataaccttaccagcacggttcaagtcttctcggactcggagtaccagcttccgtacgtcctcggctctgcgcaccagggctgcctccctccgttcccggcggacgtgttcatgattccgcaatacggctacctgacgctcaacaatggcagccaagccgtgggacgttcatccttttactgcctggaatatttcccttctcagatgctgagaacgggcaacaactttaccttcagctacacctttgaggaagtgcctttccacagcagctacgcgcacagccagagcctggaccggctgatgaatcctctcatcgaccaatacctgtattacctgaacagaactcaaaatcagtccggaagtgcccaaaacaaggacttgctgtttagccgtgggtctccagctggcatgtctgttcagcccaaaaactggctacctggaccctgttatcggcagcagcgcgtttctaaaacaaaaacagacaacaacaacagcaattttacctggactggtgcttcaaaatataacctcaatgggcgtgaatccatcatcaaccctggcactgctatggcctcacacaaagacgacgaagacaagttctttcccatgagcggtgtcatgatttttggaaaagagagcgccggagcttcaaacactgcattggacaatgtcatgattacagacgaagaggaaattaaagccactaaccctgtggccaccgaaagatttgggaccgtggcagtcaatttccagagcagcagcacagaccctgcgaccggagatgtgcatgttatgggagccttacctggaatggtgtggcaagacagagacgtatacctgcagggtcctatttgggccaaaattcctcacacggatggacactttcacccgtctcctctcatgggcggctttggacttaagcacccgcctcctcagatcctcatcaaaaacacgcctgttcctgcgaatcctccggcagagttttcggctacaaagtttgcttcattcatcacccagtattccacaggacaagtgagcgtggagattgaatgggagctgcagaaagaaaacagcaaacgctggaatcccgaagtgcagtatacatctaactatgcaaaatctgccaacgttgatttcactgtggacaacaatggactttatactgagcctcgccccattggcacccgttacctcacccgtcccctgtaa

SEQ ID NO: 365 - protein, 736 aa, Artificial Sequence
  Description of Artificial Sequence: Synthetic polypeptide
MAADGYLPDWLEDNLSEGIREWWALKPGVPQPKANQQHQDNRRGLVLPGYKYLGPGNGLDKGEPVNAADAAALEHDKAYDQQLKAGDNPYLRYNHADAEFQERLQEDTSFGGNLGRAVFQAKKRVLEPFGLVEEGAKTAPGKKRPVEQSPQEPDSSSGIGKTGQQPAKKRLNFGQTGDSESVPDPQPLGEPPATPAAVGPTTMASGGGAPMADNNEGADGVGNASGNWHCDSTWLGDRVITTSTRTWALPTYNNHLYKQISSASTGASNDNHYFGYSTPWGYFDFNRFHCHFSPRDWQRLINNNWGFRPKRLNFKLFNIQVKEVTTNDGVTTIANNLTSTVQVFSDSEYQLPYVLGSAHQGCLPPFPADVFMIPQYGYLTLNNGSQAVGRSSFYCLEYFPSQMLRTGNNFTFSYTFEEVPFHSSYAHSQSLDRLMNPLIDQYLYYLNRTQNQSGSAQNKDLLFSRGSPAGMSVQPKNWLPGPCYRQQRVSKTKTDNNNSNFTWTGASKYNLNGRESIINPGTAMASHKDDEDKFFPMSGVMIFGKESAGASNTALDNVMITDEEEIKATNPVATERFGTVAVNFQSSSTDPATGDVHVMGALPGMVWQDRDVYLQGPIWAKIPHTDGHFHPSPLMGGFGLKHPPPQILIKNTPVPANPPAEFSATKFASFITQYSTGQVSVEIEWELQKENSKRWNPEVQYTSNYAKSANVDFTVDNNGLYTEPRPIGTRYLTRPL

SEQ ID NO: 366 - DNA, 2217 bp, Artificial Sequence
  Description of Artificial Sequence: Synthetic polynucleotide
atggctgccgatggttatcttccagattggctcgaggacaacctctctgagggcattcgcgagtggtgggacttgaaacctggagccccgaaacccaaagccaaccagcaaaagcaggacgacggccggggtctggtgcttcctggctacaagtacctcggacccttcaacggactcgacaagggggagcccgtcaacgcggcggatgcaacggccctcgagcacgacaaggcctacgaccagcagctgcaggcgggtgacaatccgtacctgcggtataaccacgccgacgccgagtttcaggagcgtctgcaagaagatacgtcttttgggggcaacctcgggcgagcagtcttccaggccaagaagcgggttctcgaacctctcggtctggttgaggaaggcgctaagacggctcctggaaagaagagaccggtagagccatcaccccagcgttctccagactcctctacgggcatcggcaagaaaggccaacagcccgccagaaaaagactcaattttggtcagactggcgactcagagtcagttccagaccctcaacctctcggagaaccaccagcagcccccacaagtttgggatctaatacaatggcttcaggcggtggcgcaccaatggcagacaataacgagggtgccgatggagtgggtaattcctcaggaaattggcattgcgattcccaatggctgggcgacagagtcatcaccaccagcacccgcacctgggccttgcccacctacaataaccacctctacaagcaaatctccagtgcttcaacgggggccagcaacgacaaccactacttcggctacagcaccccctgggggtattttgactttaaccgcttccactgccacttctcgccaagagactggcaaagactcatcaacaacaattggggattccggcccaagagactcaacttcaaactcttcaacatccaagtcaaggaggtcacgacgaatgatggcgtcacgaccatcgccaataacctcaccagcaccatccaggtgtttacggactcggagtaccagctgccgtacgttctcggctctgcccaccagggctgcctgcctccgttcccggcggacgtgttcatgattccccagtatggatacctcaccctgaacaacggaagtcaagcggtgggacgctcatccttttactgcctggagtacttcccttcgcagatgctaaggactggaaataacttccaattcagctataccttcgaggatgtaccttttcacagcagctacgctcacagccagagtttggatcgcttgatgaatcctcttattgatcagtatctgtactacctgaacagaacgcaaggaacaacctctggaacaaccaaccaatcacggctgctttttagccaggctgggcctcagtctatgtctttgcaggccagaaattggctacctgggccctgctaccggcaacagagactttcaaagactgctaacgacaacaacaacagtaactttccttggacagcagccagcaaatatcatctcaatggccgcgactcgctggtgaatccaggaccagctatggccagtcacaaggacgatgaagaaaaatttttccctatgcacggcaatctaatatttggcaaagaagggacaacggcaagtaacgcagaattagataatgtaatgattacggatgaagaagagattcgtaccaccaatcctgtggcaacagagcagtatggaactgtggcaaataacttgcagagctcaaatacagctcccacgactagaactgtcaatgatcagggggccttacctggcatggtgtggcaagatcgtgacgtgtaccttcaggggcccatctgggcaaagattccacacacggacggacattttcacccctctcccctcatgggtggattcggacttaaacaccctcctccgcagattctcatcaagaacaccccggtacctgcgaatccttcgaccaccttcagtgcggcaaagtttgcttccttcatcacacagtactccacgggacaggtcagcgtggagatcgagtgggagctgcagaaggaaaacagcaagcgctggaacccggagatccagtacacttccaactattacaagtctaataatgttgaatttgctgttaatactgaaggtgtatatagtgaaccccgccccattggcaccagatacctgactcgtaatctgtaa

SEQ ID NO: 367 - protein, 738 aa, Artificial Sequence
  Description of Artificial Sequence: Synthetic polypeptide
MAADGYLPDWLEDNLSEGIREWWDLKPGAPKPKANQQKQDDGRGLVLPGYKYLGPFNGLDKGEPVNAADATALEHDKAYDQQLQAGDNPYLRYNHADAEFQERLQEDTSFGGNLGRAVFQAKKRVLEPLGLVEEGAKTAPGKKRPVEPSPQRSPDSSTGIGKKGQQPARKRLNFGQTGDSESVPDPQPLGEPPAAPTSLGSNTMASGGGAPMADNNEGADGVGNSSGNWHCDSQWLGDRVITTSTRTWALPTYNNHLYKQISSASTGASNDNHYFGYSTPWGYFDFNRFHCHFSPRDWQRLINNNWGFRPKRLNFKLFNIQVKEVTTNDGVTTIANNLTSTIQVFTDSEYQLPYVLGSAHQGCLPPFPADVFMIPQYGYLTLNNGSQAVGRSSFYCLEYFPSQMLRTGNNFQFSYTFEDVPFHSSYAHSQSLDRLMNPLIDQYLYYLNRTQGTTSGTTNQSRLLFSQAGPQSMSLQARNWLPGPCYRQQRLSKTANDNNNSNFPWTAASKYHLNGRDSLVNPGPAMASHKDDEEKFFPMHGNLIFGKEGTTASNAELDNVMITDEEEIRTTNPVATEQYGTVANNLQSSNTAPTTRTVNDQGALPGMVWQDRDVYLQGPIWAKIPHTDGHFHPSPLMGGFGLKHPPPQILIKNTPVPANPSTTFSAAKFASFITQYSTGQVSVEIEWELQKENSKRWNPEIQYTSNYYKSNNVEFAVNTEGVYSEPRPIGTRYLTRNL

SEQ ID NO: 368 - DNA, 2208 bp, Artificial Sequence
  Description of Artificial Sequence: Synthetic polynucleotide
atggctgccgatggttatcttccagattggctcgaggacaaccttagtgaaggaattcgcgagtggtgggacttgaaacctggagccccgaagcccaaagccaaccagcaaaagcaggacgacggccggggtctggtgcttcctggctacaagtacctcggacccttcaacggactcgacaagggggagcccgtcaacgcggcggacgcagcggccctcgagcacgacaaggcctacgaccagcagctcaaagcgggtgacaatccgtacctgcggtataaccacgccgacgccgagtttcaggagcgtctgcaagaagatacgtcttttgggggcaacctcgggcgagcagtcttccaggccaagaagcgggttctcgaacctctcggtctggttgaggaaggtgctaagacggctcctggaaagaaacgtccggtagagcagtcgccacaagagccagactcctcctcgggcattggcaagacaggccagcagcccgctaaaaagagactcaattttggtcagactggcgactcagagtcagtccccgacccacaacctctcggagaacctccagcaacccccgctgctgtgggacctactacaatggcttcaggcggtggcgcaccaatggcagacaataacgaaggcgccgacggagtgggtaatgcctcaggaaattggcattgcgattccacatggctgggcgacagagtcatcaccaccagcacccgaacctgggccctgcccacctacaacaaccacctctacaaacaaatttccagccaatcaggagcctcgaacgacaatcactactttggctacagcaccccttgggggtattttgatttcaacagattccactgccacttttcaccacgtgactggcagcgactcatcaacaacaattggggattccggcccaagagactcagcttcaagctcttcaacatccaggtcaaggaggtcacgcagaatgaaggcaccaagaccatcgccaataaccttaccagcacggttcaagtgtttacggactcggagtatcagctcccgtacgtgctcggctcggcgcatcaaggatgcctcccgccgttcccagcagacgtcttcatggtgccacagtatggatacctcaccctgaacaacgggagtcaggcagtaggacgctcttcattttactgcctggagtactttccttctcagatgctgcgtaccggaaacaactttaccttcagctacacttttgaggacgttcctttccacagcagctacgctcacagccagagtctggaccgtctcatgaatcctctgattgaccagtacctgtattacttgagcagaacaaacactccaagtggaaccaccacgcagtcaaggcttcagttttctcaggccggagcgagtgacattcgggaccagtctaggaactggcttcctggaccctgttaccgccagcagcgagtatcaaagacatctgcggataacaacaacagtgaatactcgtggactggagctaccaagtaccacctcaatggcagagactctctggtgaatccgggcccggccatggcaagccacaaggactatgaagaaaagttttttcctcagagcggggttctcatctttgggaagcaaggctcagagaaaacaaatgtggacattgaaaaggtcatgattacagacgaagaggaaatcaggacaaccaatcccgtggctacggagcagtatggttctgtatctaccaacctccagagaggcaacagacaagcagctaccgcagatgtcaacacacaaggcgttcttccaggcatggtctggcaggacagagatgtgtaccttcaggggcccatctgggcaaagattccacacacggacggacattttcacccgtctccgctgatgggcggctttggcctgaaacatcctccgcctcagatcctgatcaagaacacgcctgtacctgcggatcctccgaccaccttcaaccagtcaaagctgaactctttcatcactcagtattctactggccaagtcagcgtggagatcgagtgggagctgcagaaggaaaacagcaagcgctggaaccccgagatccagtacacctccaactactacaaatctacaagtgtggactttgctgttaatacagaaggcgtgtactctgaaccccgccccattggcacccgttacctcacccgtaatctgtaa

SEQ ID NO: 369 - protein, 735 aa, Artificial Sequence
  Description of Artificial Sequence: Synthetic polypeptide
MAADGYLPDWLEDNLSEGIREWWDLKPGAPKPKANQQKQDDGRGLVLPGYKYLGPFNGLDKGEPVNAADAAALEHDKAYDQQLKAGDNPYLRYNHADAEFQERLQEDTSFGGNLGRAVFQAKKRVLEPLGLVEEGAKTAPGKKRPVEQSPQEPDSSSGIGKTGQQPAKKRLNFGQTGDSESVPDPQPLGEPPATPAAVGPTTMASGGGAPMADNNEGADGVGNASGNWHCDSTWLGDRVITTSTRTWALPTYNNHLYKQISSQSGASNDNHYFGYSTPWGYFDFNRFHCHFSPRDWQRLINNNWGFRPKRLSFKLFNIQVKEVTQNEGTKTIANNLTSTVQVFTDSEYQLPYVLGSAHQGCLPPFPADVFMVPQYGYLTLNNGSQAVGRSSFYCLEYFPSQMLRTGNNFTFSYTFEDVPFHSSYAHSQSLDRLMNPLIDQYLYYLSRTNTPSGTTTQSRLQFSQAGASDIRDQSRNWLPGPCYRQQRVSKTSADNNNSEYSWTGATKYHLNGRDSLVNPGPAMASHKDYEEKFFPQSGVLIFGKQGSEKTNVDIEKVMITDEEEIRTTNPVATEQYGSVSTNLQRGNRQAATADVNTQGVLPGMVWQDRDVYLQGPIWAKIPHTDGHFHPSPLMGGFGLKHPPPQILIKNTPVPADPPTTFNQSKLNSFITQYSTGQVSVEIEWELQKENSKRWNPEIQYTSNYYKSTSVDFAVNTEGVYSEPRPIGTRYLTRNL

SEQ ID NO: 370 - DNA, 2214 bp, Artificial Sequence
  Description of Artificial Sequence: Synthetic polynucleotide
atggctgccgatggttatcttccagattggctcgaggacaacctctctgagggcattcgcgagtggtgggacttgaaacctggagccccgaaacccaaagccaaccagcaaaagcaggacgacggccggggtctggtgcttcctggctacaagtacctcggacccttcaacggactcgacaagggggagcccgtcaacgcggcggatgcagcggccctcgagcacgacaaggcctacgaccagcagctcaaagcgggtgacaatccgtacctgcggtataaccacgccgacgccgagtttcaggagcgtctgcaagaagatacgtcttttgggggcaacctcgggcgagcagtcttccaggccaagaagagggttctcgaaccttttggtctggttgaggaaggtgctaagacggctcctggaaagaaacgtccggtagagcagtcgccacaagagccagactcctcctcgggcattggcaagacaggccagcagcctgcaagaaaaagattgaattttggtcagactggagacgcagactcagtacctgacccccagcctctcggacagccaccagcagccccctctggtctgggaactaatacgatggctacaggcagtggcgcaccaatggcagacaataacgagggcgccgacggagtgggtaattcctcgggaaattggcattgcgattcccaatggctgggggacagagtcatcaccaccagcacccgaacctgggccctgcccacctacaacaatcacctctacaagcaaatctccaacagcacatctggaggatcttcaaatgacaacgcctacttcggctacagcaccccctgggggtattttgatttcaacagattccactgccatttctcaccacgtgactggcagcgactcatcaacaacaattggggattccggcccaagagactcaacttcaagctcttcaacatccaggtcaaggaggtcacgcagaatgaaggcaccaagaccatcgccaataacctcaccagcaccatccaggtgtttacggactcggagtaccagctgccgtacgttctcggctctgcccaccagggctgcctgcctccgttcccggcggacgtgttcatgattccccagtacggctacctaacactcaacaacggtagtcaggccgtgggacgctcctccttctactgcctggaatactttccttcgcagatgctgagaaccggcaacaacttccagtttacttacaccttcgaggacgtgcctttccacagcagctacgcccacagccagagcttggaccggctgatgaatcctctgattgaccagtacctgtactacttgtctcggactcaaacaacaggaggcacgacaaatacgcagactctgggcttcagccaaggtgggcctaatacaatggccaatcaggcaaagaactggctgccaggaccctgttaccgccagcagcgagtatcaaagacatttgcggataacaacaacagtgaatactcgtggactggagctaccaagtaccacctcaatggcagagactctctggtgaatccgggcccggccatggcaagccacaaggacgatgaagaaaagttttttcctcagagcggggttctcatctttgggaagcaaggctcagagaaaacaaatgtggacattgaaaaggtcatgattacagacgaagaggaaatcaggacaaccaatcccgtggctacggagcagtatggttctgtatctaccaacctccagagaggcaacagacaagcagctaccgcagatgtcaacacacaaggcgttcttccaggcatggtctggcaggacagagatgtgtaccttcaggggcccatctgggcaaagattccacacacggacggacattttcacccctctcccctcatgggtggattcggacttaaacaccctccgcctcagatcctgatcaagaacacgcctgtacccgcggatcctccgaccaccttcaaccagtcaaagctgaactctttcatcacccagtattctactggccaagtcagcgtggagatcgagtgggagctgcagaaggaaaacagcaagcgctggaaccccgagatccagtacacctccaactactacaaatctacaagtgtggactttgctgttaatacagaaggcgtgtactctgaaccccgccccattggcacccgttacctcacccgtaatctgtaa

SEQ ID NO: 371 - protein, 737 aa, Artificial Sequence
  Description of Artificial Sequence: Synthetic polypeptide
MAADGYLPDWLEDNLSEGIREWWDLKPGAPKPKANQQKQDDGRGLVLPGYKYLGPFNGLDKGEPVNAADAAALEHDKAYDQQLKAGDNPYLRYNHADAEFQERLQEDTSFGGNLGRAVFQAKKRVLEPFGLVEEGAKTAPGKKRPVEQSPQEPDSSSGIGKTGQQPARKRLNFGQTGDADSVPDPQPLGQPPAAPSGLGTNTMATGSGAPMADNNEGADGVGNSSGNWHCDSQWLGDRVITTSTRTWALPTYNNHLYKQISNSTSGGSSNDNAYFGYSTPWGYFDFNRFHCHFSPRDWQRLINNNWGFRPKRLNFKLFNIQVKEVTQNEGTKTIANNLTSTIQVFTDSEYQLPYVLGSAHQGCLPPFPADVFMIPQYGYLTLNNGSQAVGRSSFYCLEYFPSQMLRTGNNFQFTYTFEDVPFHSSYAHSQSLDRLMNPLIDQYLYYLSRTQTTGGTTNTQTLGFSQGGPNTMANQAKNWLPGPCYRQQRVSKTFADNNNSEYSWTGATKYHLNGRDSLVNPGPAMASHKDDEEKFFPQSGVLIFGKQGSEKTNVDIEKVMITDEEEIRTTNPVATEQYGSVSTNLQRGNRQAATADVNTQGVLPGMVWQDRDVYLQGPIWAKIPHTDGHFHPSPLMGGFGLKHPPPQILIKNTPVPADPPTTFNQSKLNSFITQYSTGQVSVEIEWELQKENSKRWNPEIQYTSNYYKSTSVDFAVNTEGVYSEPRPIGTRYLTRNL

SEQ ID NO: 372 - DNA, 2217 bp, Artificial Sequence
  Description of Artificial Sequence: Synthetic polynucleotide
atggctgccgatggttatcttccagattggctcgaggacactctctctgaaggaataagacagtggtgggcgctgaaacctggagccccgaagcccaaagccaaccagcaaaagcaggacgacggccggggtctggtgcttcctggctacaagtacctcggacccttcaacggactcgacaagggggagcccgtcaacgcggcggatgcagcggccctcgagcacgacaaggcctacgaccagcagctcaaagcgggtgacaatccgtacctgcggtataaccacgccgacgccgagtttcaggagcgtctgcaagaagatacgtcttttgggggcaacctcgggcgagcagtcttccaggccaagaagcgggttctcgaacctctcggtctggttgaggaaggcgctaagacggctcctggaaagaagagaccggtagagccatcaccccagcgttctccagactcctctacgggcatcggcaagaaaggccaacagcccgccagaaaaagactcaattttggtcagactggcgactcagagtcagttccagaccctcaacctctcggagaaccaccagcagcccccacaagtttgggatctaatacaatggcttcaggcggtggcgcaccaatggcagacaataacgagggtgccgatggagtgggtaattcctcaggaaattggcattgcgattcccaatggctgggcgacagagtcatcaccaccagcacccgcacctgggccttgcccacctacaataaccacctctacaagcaaatctccagtgcttcaacgggggccagcaacgacaaccactacttcggctacagcaccccctgggggtattttgactttaaccgcttccactgccacttctcgccaagagactggcaaagactcatcaacaacaattggggattccggcccaagagactcaacttcaaactcttcaacatccaagtcaaggaggtcacgacgaatgatggcgtcacgaccatcgccaataacctcaccagcaccatccaggtgtttacggactcggagtaccagctgccgtacgttctcggctctgcccaccagggctgcctgcctccgttcccggcggacgtgttcatgattccccagtatggatacctcaccctgaacaacggaagtcaagcggtgggacgctcatccttttactgcctggagtacttcccttcgcagatgctaaggactggaaataacttccaattcagctataccttcgaggatgtaccttttcacagcagctacgctcacagccagagtttggatcgcttgatgaatcctcttattgatcagtatctgtactacctgaacagaacgcaaggaacaacctctggaacaaccaaccaatcacggctgctttttagccaggctgggcctcagtctatgtctttgcaggccagaaattggctacctgggccctgctaccggcaacagagactttcaaagactgctaacgacaacaacaacagtaactttccttggacagcagccagcaaatatcatctcaatggccgcgactcgctggtgaatccaggaccagctatggccagtcacaaggacgatgaagaaaaatttttccctatgcacggcaatctaatatttggcaaagaagggacaacggcaagtaacgcagaattagataatgtaatgattacggatgaagaagagattcgtaccaccaatcctgtggcaacagagcagtatggaactgtggcaaataacttgcagagctcaaatacagctcccacgactagaactgtcaatgatcagggggccttacctggcatggtgtggcaagatcgtgacgtgtaccttcaggggcccatctgggcaaagattccacacacggacggacattttcacccctctcccctcatgggtggattcggacttaaacaccctcctccgcagattctcatcaagaacaccccggtacctgcgaatccttcgaccaccttcagtgcggcaaagtttgcttccttcatcacacagtactccacgggacaggtcagcgtggagatcgagtgggagctgcagaaggaaaacagcaagcgctggaacccggagatccagtacacttccaactattacaagtctaataatgttgaatttgctgttaatactgaaggtgtatatagtgaaccccgccccattggcaccagatacctgactcgtaatctgtaa

SEQ ID NO: 373 - protein, 738 aa, Artificial Sequence
  Description of Artificial Sequence: Synthetic polypeptide
MAADGYLPDWLEDTLSEGIRQWWALKPGAPKPKANQQKQDDGRGLVLPGYKYLGPFNGLDKGEPVNAADAAALEHDKAYDQQLKAGDNPYLRYNHADAEFQERLQEDTSFGGNLGRAVFQAKKRVLEPLGLVEEGAKTAPGKKRPVEPSPQRSPDSSTGIGKKGQQPARKRLNFGQTGDSESVPDPQPLGEPPAAPTSLGSNTMASGGGAPMADNNEGADGVGNSSGNWHCDSQWLGDRVITTSTRTWALPTYNNHLYKQISSASTGASNDNHYFGYSTPWGYFDFNRFHCHFSPRDWQRLINNNWGFRPKRLNFKLFNIQVKEVTTNDGVTTIANNLTSTIQVFTDSEYQLPYVLGSAHQGCLPPFPADVFMIPQYGYLTLNNGSQAVGRSSFYCLEYFPSQMLRTGNNFQFSYTFEDVPFHSSYAHSQSLDRLMNPLIDQYLYYLNRTQGTTSGTTNQSRLLFSQAGPQSMSLQARNWLPGPCYRQQRLSKTANDNNNSNFPWTAASKYHLNGRDSLVNPGPAMASHKDDEEKFFPMHGNLIFGKEGTTASNAELDNVMITDEEEIRTTNPVATEQYGTVANNLQSSNTAPTTRTVNDQGALPGMVWQDRDVYLQGPIWAKIPHTDGHFHPSPLMGGFGLKHPPPQILIKNTPVPANPSTTFSAAKFASFITQYSTGQVSVEIEWELQKENSKRWNPEIQYTSNYYKSNNVEFAVNTEGVYSEPRPIGTRYLTRNL

SEQ ID NO: 374 - DNA, 2208 bp, Artificial Sequence; identical to SEQ ID NO: 10
  Description of Artificial Sequence: Synthetic polynucleotide

SEQ ID NO: 375 - protein, 735 aa, Artificial Sequence [sequence omitted]

SEQ ID NO: 376 - DNA, 2208 bp, Artificial Sequence
  Description of Artificial Sequence: Synthetic polynucleotide
atggctgccgatggttatcttccagattggctcgaggacaacctctctgagggcattcgcgagtggtgggcgctgaaacctggagccccgaagcccaaagccaaccagcaaaagcaggacgacggccggggtctggtgcttcctggctacaagtacctcggacccttcaacggactcgacaagggggagcccgtcaacgcggcggacgccgcggccctcgagcacgacaaggcctacgaccagcagctgcaggcgggtgacaatccgtacctgcggtataaccacgccgacgccgagtttcaggagcgtctgcaagaagatacgtcttttgggggcaacctcgggcgagcagtcttccaggccaaaaagaggcttcttgaacctcttggtctggttgaggaagcagctaaaacggctcctggaaagaagaggcctgtagagcagtctcctcaggaaccggactcctccgcgggtattggcaaatcgggtgcacagcccgccaaaaagagactcaatttcggtcagactggcgactcagagtcagtcccagaccctcaacctctcggagaaccaccagcagcccccacaagtttgggatctaatacaatggcttcaggcggtggcgcaccaatggcagacaataacgaaggcgccgacggagtgggtaatgcctcaggaaattggcattgcgattccacatggctgggcgacagagtcatcaccaccagcacccgcacctgggccttgcccacctacagcaaccatctctacaagcaaatctccagccaatcaggagcttcaaacgacaacgactactttggctacagcaccccttgggggtattttgatttcaacagattccactgccacttttcaccacgtgactggcaaagactcatcaacaacaactggggattccgacccaagagactcaacttcaagctctttaacattcaagtcaaagaggtcacgcagaatgacggtacgacgacgattgccaataaccttaccagcacggttcaggtgtttactgactcggagtaccagctcccgtacgtcctcggctcggcgcatcaaggatgcctcccgccgttcccagcagacgtcttcatggtgccacagtatggatacctcaccctgaacaacgggagtcaggcagtaggacgctcttcattttactgcctggagtactttccttctcagatgctgcgtaccggaaacaactttaccttcagctacacttttgaggacgttcctttccacagcagctacgctcacagccagagtctggaccgtctcatgaatcctctcatcgaccagtacctgtattacttgagcagaacaaacactccaagtggaaccaccacgcagtcaaggcttcagttttctcaggccggagcgagtgacattcgggaccagtctaggaactggcttcctggaccctgttaccgccagcagcgagtatcaaagacatctgaggataacaacaacagtgaatactcgtggactggagctaccaagtaccacctcaatggcagagactctctggtgaatccgggcccggccatggcaagccacaaggacgatgaagaaaagttttttcctcagagcggggttctcatctttgggaagcaaggctcagagaaaacaaatgtggacattgaaaaggtcatgattacagacgaagaggaaatcaggacaaccaatcccgtggctacggagcagtatggttctgtatctaccaacctccagagaggcaacagacaagcagctaccgcagatgtcaacacacaaggcgttcttccaggcatggtctggcaggacagagatgtgtaccttcaggggcccatctgggcaaagattccacacacggacggacattttcacccctctcccctcatgggtggattcggacttaaacaccctcctccacagattctcatcaagaacaccccggtacctgcgaatccttcgaccaccttcagtgcggcaaagtttgcttccttcatcacacagtactccacgggacaggtcagcgtggagatcgagtgggagctgcagaaggaaaacagcaaacgctggaatcccgaaattcagtacacttccaactacaacaagtctgttaatgtggactttactgtggacactaatggcgtgtattcagagcctcgccccattggcaccagatacctgactcgtaatctgtaa

SEQ ID NO: 377 - protein, 735 aa, Artificial Sequence
  Description of Artificial Sequence: Synthetic polypeptide
MAADGYLPDWLEDNLSEGIREWWALKPGAPKPKANQQKQDDGRGLVLPGYKYLGPFNGLDKGEPVNAADAAALEHDKAYDQQLQAGDNPYLRYNHADAEFQERLQEDTSFGGNLGRAVFQAKKRLLEPLGLVEEAAKTAPGKKRPVEQSPQEPDSSAGIGKSGAQPAKKRLNFGQTGDSESVPDPQPLGEPPAAPTSLGSNTMASGGGAPMADNNEGADGVGNASGNWHCDSTWLGDRVITTSTRTWALPTYSNHLYKQISSQSGASNDNDYFGYSTPWGYFDFNRFHCHFSPRDWQRLINNNWGFRPKRLNFKLFNIQVKEVTQNDGTTTIANNLTSTVQVFTDSEYQLPYVLGSAHQGCLPPFPADVFMVPQYGYLTLNNGSQAVGRSSFYCLEYFPSQMLRTGNNFTFSYTFEDVPFHSSYAHSQSLDRLMNPLIDQYLYYLSRTNTPSGTTTQSRLQFSQAGASDIRDQSRNWLPGPCYRQQRVSKTSEDNNNSEYSWTGATKYHLNGRDSLVNPGPAMASHKDDEEKFFPQSGVLIFGKQGSEKTNVDIEKVMITDEEEIRTTNPVATEQYGSVSTNLQRGNRQAATADVNTQGVLPGMVWQDRDVYLQGPIWAKIPHTDGHFHPSPLMGGFGLKHPPPQILIKNTPVPANPSTTFSAAKFASFITQYSTGQVSVEIEWELQKENSKRWNPEIQYTSNYNKSVNVDFTVDTNGVYSEPRPIGTRYLTRNL

SEQ ID NO: 378 - DNA, 2208 bp, Artificial Sequence
  Description of Artificial Sequence: Synthetic polynucleotide
atggctgccgatggttatcttccagattggctcgaggacaacctctctgagggcattcgcgagtggtgggcgctgaaacctggagccccgaagcccaaagccaaccagcaaaagcaggacgacggccggggtctggtgcttcctggctacaagtacctcggacccttcaacggactcgacaagggggagcccgtcaacgcggcggacgcagcggccctcgagcacgacaaggcctacgaccagcagctgcaggcgggtgacaatccgtacctgcggtataaccacgccgacgccgagttccaggagcgtctgcaagaagatacgtcttttgggggcaacctcgggcgagcagtcttccaggccaagaagagggttctcgaaccttttggtctggttgaggaaggtgctaagacggctcctggaaagaaacgtccggtagagcagtcgccacaagagccagactcctcctcgggcattggcaagacaggccagcagcccgctaaaaagagactcaattttggtcagactggcgactcagagtcagtcccagaccctcaacctctcggagaaccaccagcagcccccacaagtttgggatctaatacaatggcttcaggcggtggcgcaccaatggcagacaataacgagggcgccgacggagtgggtaattcctcgggaaattggcattgcgattccacatggatgggcgacagagtcatcaccaccagcacccgaacctgggccctgcccacctacaacaaccacctctacaaacaaatttccagccaatcaggagcttcaaacgacaaccactactttggctacagcaccccttgggggtattttgactttaacagattccactgccacttttcaccacgtgactggcagcgactcattaacaacaactggggattccggcccaagaaactcaacttcaagctctttaacatccaggtcaaggaggtcacgcagaatgaaggcaccaagaccatcgccaataacctcaccagcaccatccaggtgtttacggactcggagtaccagctgccgtacgttctcggctctgcccaccagggctgcctgcctccgttcccggcggacgtgttcatgattccccagtacggctacctaacactcaacaacggtagtcaggccgtgggacgctcctccttctactgcctggaatactttccttcgcagatgctgagaaccggcaacaacttccagtttacttacaccttcgaggacgtgcctttccacagcagctacgcccacagccagagcttggaccggctgatgaatcctctgattgaccagtacctgtattacttgtctcggactcaaacaacaggaggcacgacaaatacgcagactctgggcttcagccaaggtgggcctaatacaatggccaatcaggcaaagaactggctgcctggaccctgttaccgccagcagcgagtatcaaagacatctgcggataacaacaacagtgaatactcgtggactggagctaccaagtaccacctcaatggcagagactctctggtgaatccgggcccggccatggcaagccacaaggacgatgaagaaaagttttttcctcagagcggggttctcatctttgggaagcaaggctcagagaaaacaaatgtggacattgaaaaggttatgattacagacgaagaggaaatcaggacaaccaatcccgtggctacggagcagtatggttctgtatctaccaacctccagagaggcaacagacaagcagctaccgcagatgtcaacacacagggcgttcttccaggcatggtctggcaggacagagatgtgtaccttcagggtcccatttgggccaaaattcctcacacagatggacactttcacccgtcccctcttatgggcggctttggactcaagaacccgcctcctcagatcctcatcaaaaacacgcctgttcctgcgaatcctccggcagagttttcagctacaaagtttgcttcattcatcacccaatactccacaggacaagtgagtgtggaaattgaatgggagctgcagaaagaaaacagcaagcgctggaatcccgaagtgcagtacacatccaattatgcaaaatctgccaacgttgattttactgtggacactaatggcgtgtattcagagcctcgccccattggcaccagatacctcacccgtaatctgtaa

SEQ ID NO: 379 - protein, 735 aa, Artificial Sequence
  Description of Artificial Sequence: Synthetic polypeptide
MAADGYLPDWLEDNLSEGIREWWALKPGAPKPKANQQKQDDGRGLVLPGYKYLGPFNGLDKGEPVNAADAAALEHDKAYDQQLQAGDNPYLRYNHADAEFQERLQEDTSFGGNLGRAVFQAKKRVLEPFGLVEEGAKTAPGKKRPVEQSPQEPDSSSGIGKTGQQPAKKRLNFGQTGDSESVPDPQPLGEPPAAPTSLGSNTMASGGGAPMADNNEGADGVGNSSGNWHCDSTWMGDRVITTSTRTWALPTYNNHLYKQISSQSGASNDNHYFGYSTPWGYFDFNRFHCHFSPRDWQRLINNNWGFRPKKLNFKLFNIQVKEVTQNEGTKTIANNLTSTIQVFTDSEYQLPYVLGSAHQGCLPPFPADVFMIPQYGYLTLNNGSQAVGRSSFYCLEYFPSQMLRTGNNFQFTYTFEDVPFHSSYAHSQSLDRLMNPLIDQYLYYLSRTQTTGGTTNTQTLGFSQGGPNTMANQAKNWLPGPCYRQQRVSKTSADNNNSEYSWTGATKYHLNGRDSLVNPGPAMASHKDDEEKFFPQSGVLIFGKQGSEKTNVDIEKVMITDEEEIRTTNPVATEQYGSVSTNLQRGNRQAATADVNTQGVLPGMVWQDRDVYLQGPIWAKIPHTDGHFHPSPLMGGFGLKNPPPQILIKNTPVPANPPAEFSATKFASFITQYSTGQVSVEIEWELQKENSKRWNPEVQYTSNYAKSANVDFTVDTNGVYSEPRPIGTRYLTRNL

SEQ ID NO: 380 - DNA, 2214 bp, Artificial Sequence; identical to SEQ ID NO: 370
  Description of Artificial Sequence: Synthetic polynucleotide

SEQ ID NO: 381 - protein, 737 aa, Artificial Sequence; identical to SEQ ID NO: 371
  Description of Artificial Sequence: Synthetic polypeptide

SEQ ID NO: 382 - DNA, 2196 bp, Adeno-associated virus
atggctgctgacggttatcttccagattggctcgaggacaacctctctgagggcattcgcgagtggtgggcgctgaaacctggagccccgcaacccaaagccaaccagcaaaagcaggacgacggccggggtctggtgcttcctggctacaagtacctcggacccttcaacggactcgacaagggggagcccgtcaacgaggcggacgccgcggccctcgagcacgacaaggcctacgaccagcagctcaaagcgggtgacaatccgtacctgcggtataatcacgccgacgccgagtttcaagagcgtctgcaagaagatacgtcctttgggggcaacctcgggcgagcagtcttccaggccaaaaagagggtactcgagcctctgggtctggttgaggaaggcgctaagacggctcctggaaagaagcggccagtagaaccggactccagctcgggcatcggcaagtcaggccagcagcccgcgaaaaagagactgaattttgggcagactggcgactcagagtcagtgcctgacccccaacctctctcagaaccacccgcaggtccctctggtctgggatctggtacaatggctgctggcggtggcgctccaatggcagacaataacgaaggcgccgacggagtgggtaatgtctcaggaaattggcattgcgattccacatggctgggcgaccgagtcatcaccaccagcactcggacctgggccctccccacctacaacaaccacctctacaagcaaatctccaacgggacctcgggaggcagcagcaacgacaacacctactttggctacagcaccccctgggggtattttgactttaacagattccactgccacttttcaccacgtgactggcagcgactcatcaacaacaactgggggttccggcccaagaagctcaacttcaagctcttcaacatccaggtcaaggaggtcacccagaatgaaggcaccaagaccatcgccaataacctcaccagcacggtgcaggtctttacggactcggagtaccagctcccgtacgtgctcggctctgcccaccagggctgcctgcctccgttcccggcggacgtgttcatgattccgcagtacgggtacctgacgctgaacaacgggagccaggccgtggggcgatcctccttctactgcctggagtactttccctcgcagatgctgagaacgggcaacaactttaccttcagctacaccttcgaggacgtgcccttccacagcagctacgcgcacagccagagcctggaccggctgatgaacccgctgattgaccagtacctgtactacctgtctcggactcagaccaacgggaccaatgccacgcagactctgttgtttgctcaggccgggcctcagaacatgtcggctcaggccaagaactggctgcctggtccttgctatcggcagcagcgcgtctctacgacagtgtcgcaaaacaacaacagcaactttacctggaccggggcgaccaagtaccacctgaacggccgagactccctggtgagccccggtgtcgccatggcaacgcacaaggacgacgaggagcgcttcttcccgagcagcggggtcctgatgtttggcaagcagggcgctggaaaggacaatgtcgagtacaccaacgtgatgctcaccagcgaggaggagatcaagaccaccaaccctgtggccacggagcagtacggcgtggtggctgacaatctgcagcagaccaactcagctcccattgtgggggcagtcaacagccagggggccttacccggtatggtctggcagaaccgggacgtgtacctgcagggtcccatctgggccaagatcccgcatacggacggcaactttcacccgtctcctctcatgggcggctttggactgaaacacccgcctccccagatcctgatcaaaaacacgccggtacctgcggatcccccggtgaactttacggacgctaagctggcgagtttcatcacgcagtacagcaccgggcaggtcagcgtggagattgagtgggagctgcagaaggagaacagcaagcgctggaatcccgagattcagtacacttccaattattataaatcagctaatgtggactttgccgtcaatgcagatggtgtatatagtgaaccccgccccattggcactcgttacctcacccgtaatctgtaa

SEQ ID NO: 383 - protein, 731 aa, Adeno-associated virus
MAADGYLPDWLEDNLSEGIREWWALKPGAPQPKANQQKQDDGRGLVLPGYKYLGPFNGLDKGEPVNEADAAALEHDKAYDQQLKAGDNPYLRYNHADAEFQERLQEDTSFGGNLGRAVFQAKKRVLEPLGLVEEGAKTAPGKKRPVEPDSSSGIGKSGQQPAKKRLNFGQTGDSESVPDPQPLSEPPAGPSGLGSGTMAAGGGAPMADNNEGADGVGNVSGNWHCDSTWLGDRVITTSTRTWALPTYNNHLYKQISNGTSGGSSNDNTYFGYSTPWGYFDFNRFHCHFSPRDWQRLINNNWGFRPKKLNFKLFNIQVKEVTQNEGTKTIANNLTSTVQVFTDSEYQLPYVLGSAHQGCLPPFPADVFMIPQYGYLTLNNGSQAVGRSSFYCLEYFPSQMLRTGNNFTFSYTFEDVPFHSSYAHSQSLDRLMNPLIDQYLYYLSRTQTNGTNATQTLLFAQAGPQNMSAQAKNWLPGPCYRQQRVSTTVSQNNNSNFTWTGATKYHLNGRDSLVSPGVAMATHKDDEERFFPSSGVLMFGKQGAGKDNVEYTNVMLTSEEEIKTTNPVATEQYGVVADNLQQTNSAPIVGAVNSQGALPGMVWQNRDVYLQGPIWAKIPHTDGNFHPSPLMGGFGLKHPPPQILIKNTPVPADPPVNFTDAKLASFITQYSTGQVSVEIEWELQKENSKRWNPEIQYTSNYYKSANVDFAVNADGVYSEPRPIGTRYLTRNL

SEQ ID NO: 384 - DNA, 2196 bp, Adeno-associated virus
atggctgctgacggttatcttccagattggctcgaggacaacctctctgagggcattcgcgagtggtgggcgctgaaacctggagccccgcaacccaaagccaaccagcaaaagcaggacgacggccggggtctggtgcttcctggctacaagtacctcggacccttcaacggactcgacaagggggagcccgtcaacgaggcggacgccgcggccctcgagcacgacaaggcctacgaccagcagctcaaagcgggtgacaatccgtacctgcggtataatcacgccgacgccgagtttcaagagcgtctgcaagaagatacgtcctttgggggcaacctcgggcgagcagtcttccaggccaaaaagagggtactcgagcctctgggtctggttgaggaaggcgctaagacggctcctggaaagaagcggccagtagaaccggactccagctcgggcatcggcaagtcaggccggcagcccgcgaaaaagagactgaattttgggcagactggcgactcagagtcagtgcctgacccccaacctctctcagaaccacccgcaggtccctctggtctgggatctggtacaatggctgcaggcggtggcgctccaatggcagacaataacgaaggcgccgacggagtgggtaatgcctcaggaaattggcattgcgattccacatggctgggcgaccgagtcatcaccaccagcactcggacctgggccctccccacctacaacaaccacctctacaagcaaatctccaacgggacctcgggaggcagcagcaacgacaacacctactttggctacagcaccccctgggggtattttgactttaacagattccactgccacttttcaccacgtgactggcagcgactcatcaacaacaactggggattccggcccaagaggctcaacttcaagctcttcaacatccaggtcaaggaggtcacccagaatgaaggcaccaagaccatcgccaataacctcaccagcacggtgcaggtctttacggactcgaagtaccagctcccgtacgtgctcggctctgcccaccagggctgcctgcctccgttcccggcggacgtgttcatgattccgcagtacgggtacctgacgctgaacaacgggagccaggccgtggggcgatcctccttctactgcctggagtactttccctcgcagatgctgagaacgggcaacaactttaccttcagctacaccttcgaggacgtgcccttccacagcagctacgcgcacagccagagcctggaccggctgatgaacccgctgattgaccagtacctgtactacctgtctcggactcagaccaacgggaccaatgccacgcagactctgttgtttgctcaggccgggcctcagaacatgtcggctcaggccaagaactggctgcctggtccttgctatcggcagcagcgcgtctctacgacagtgtcgcaaaacaacaacagcaactttacctggaccggggcgaccaagtaccacctgaacggccgagactccctggtgaaccccggtgtcgccatggcaacgcacaaggacgacgaggagcgcttcttcccgagcagcggggtcctgatgtttggcaagcagggcgctggaaaggacaatgtcgagtacaccaacgtgatgctcaccagcgaggaggagatcaagaccaccaaccctgtggccacggagcagtacggtgtggtggctgacaatctgcagcagaccaactcggctcccattgtgggggcagtcaacagccagggggccttacccggtatggtctggcagaaccgggacgtgtacctgcagggtcccatctgggccaagatcccgcatacggacggcaactttcacccgtctcctctcatgggcggctttggactgaaacacccgcctccccagatcctgatcaaaaacacgccggtacctgcggatcccccggtgaactttacggacgctaagctggcgagtttcatcacgcagtacagcaccgggcaggtcagcgtggagattgagtgggagctgcagaaggagaacagcaagcgctggaatcccgagattcagtacacttccaattattataaatcagctaatgtggactttgccgtcaatgcagatggtgtatatagtgaaccccgccccattggcactcgttacctcacccgtaatctgtaa

SEQ ID NO: 385 - protein, 731 aa, Adeno-associated virus
MAADGYLPDWLEDNLSEGIREWWALKPGAPQPKANQQKQDDGRGLVLPGYKYLGPFNGLDKGEPVNEADAAALEHDKAYDQQLKAGDNPYLRYNHADAEFQERLQEDTSFGGNLGRAVFQAKKRVLEPLGLVEEGAKTAPGKKRPVEPDSSSGIGKSGRQPAKKRLNFGQTGDSESVPDPQPLSEPPAGPSGLGSGTMAAGGGAPMADNNEGADGVGNASGNWHCDSTWLGDRVITTSTRTWALPTYNNHLYKQISNGTSGGSSNDNTYFGYSTPWGYFDFNRFHCHFSPRDWQRLINNNWGFRPKRLNFKLFNIQVKEVTQNEGTKTIANNLTSTVQVFTDSKYQLPYVLGSAHQGCLPPFPADVFMIPQYGYLTLNNGSQAVGRSSFYCLEYFPSQMLRTGNNFTFSYTFEDVPFHSSYAHSQSLDRLMNPLIDQYLYYLSRTQTNGTNATQTLLFAQAGPQNMSAQAKNWLPGPCYRQQRVSTTVSQNNNSNFTWTGATKYHLNGRDSLVNPGVAMATHKDDEERFFPSSGVLMFGKQGAGKDNVEYTNVMLTSEEEIKTTNPVATEQYGVVADNLQQTNSAPIVGAVNSQGALPGMVWQNRDVYLQGPIWAKIPHTDGNFHPSPLMGGFGLKHPPPQILIKNTPVPADPPVNFTDAKLASFITQYSTGQVSVEIEWELQKENSKRWNPEIQYTSNYYKSANVDFAVNADGVYSEPRPIGTRYLTRNL

SEQ ID NO: 386 - DNA, 2196 bp, Adeno-associated virus
atggctgctgacggttatcttccagattggctcgaggacaacctctctgagggcattcgcgagtggtgggcgctgaaacctggagccccgcaacccaaagccaaccagcaaaagcaggacgacggccggggtctggtgcttcctggctacaagtacctcggacccttcaacggactcgacaagggggagcccgtcaacgaggcggacgccgcggccctcgagcacgacaaggcctacgaccagcagctcaaagcgggtgacaatccgtacctgcggtataatcacgccgacgccgagtttcaagagcgtctgcaagaagatacgtcctttgggggcaacctcgggcgagcagtcttccaggccaaaaagagggtactcgagcctctgggtctggttgaggaaggcgctaagacggctcctggaaagaagcggccagtagaaccggactccagctcgggcatcggcaagtcaggccagcagcccgcgaaaaagagactgaattttgggccgactggcgactcagagtcagtgcctgacccccaacctctctcagaaccacctgcaggtccctctggtctgggatctggtacaatggctgcaggcggtggcgctccaatggcagacaataacgaaggcgccgacggagtgggtaatgtctcaggaaattggcattgcgattccacatggctgggcgaccgagtcatcaccaccagcactcggacctgggccctccccacctacaacaaccacctctacaagcaaatctccaacgggacctcgggaggcagcagcaacgacaacacctactttggctacagcaccccctgggggtattttgactttaacagattccactgccacttttcaccacgcgactggcagcgactcatcaacaacaactggggattccggcccaagaagctcaacttcaagctcttcaacatccaggtcaaggaggtcacccagaatgaaggcaccaagaccaccgccaataacctcaccagcacggtgcaggtctttacggactcggagtaccagctcccgtacgtgctcggctctgcccaccagggctgcctgcctccgttcccggcggacgtgttcatgattccgcagtacgggtacctgacgctgaacaacgggagccaggccgtggggcgatcctccttctactgcctggagtactttccctcgcagatgctgagaacgggcaacaactttaccttcagctacaccttcgaggacgtgcccttccacagcagctacgcgcacagccagagcctggaccggctgatgaacccgctgattgaccagtacctgtactacctgtctcggactcagaccaacgggaccaatgccacgcagactctgttgtttgctcaggccgggcctcagaacatgtcggctcaggccaagaactggctgcctggtccttgctatcggcagcagcgcgtctctacggcagtgtcgcaaaacaacaacagcaactttacctggaccggggcgaccaagtaccacctgaacggccgagactccctggtgaaccccggtgtcgccatggcaacgcacaaggacgacgaggagcgcttcttcccgagcagcggggtcctgatgtttggcaagcagggcgctggaaaggacaatgtcgagtacaccaacgtgatgctcaccagcgaggaggagatcaagaccaccaaccctgtggccacggagcagtacggtgtggtggctgacaatctgcagcagaccaactcggctcccattgtgggggcagtcaacagccagggggccttacccggtatggtctggcagaaccgggacgtgtacctgcagggtcccatctgggccaagatcccgcatacggacggcaactttcacccgtctcctctcatgggcggctttggactgaaacacccgcctccccagatcctgatcaaaaacacgccggtacctgcggatcccccggtgaactttacggacgctaagctggcgagtttcatcacgcagtacagcaccgggcaggtcagcgtggagattgagtgggagctgcagaaggagaacagcaagcgctggaatcccgagattcagtacacttccaattattataaatcagctaatgtggactttgccgtcaatgcagatggtgtatatagcgaaccccgccccattggcactcgttacctcacccgtaatctgtaa

SEQ ID NO: 387 - protein, 731 aa, Adeno-associated virus
MAADGYLPDWLEDNLSEGIREWWALKPGAPQPKANQQKQDDGRGLVLPGYKYLGPFNGLDKGEPVNEADAAALEHDKAYDQQLKAGDNPYLRYNHADAEFQERLQEDTSFGGNLGRAVFQAKKRVLEPLGLVEEGAKTAPGKKRPVEPDSSSGIGKSGQQPAKKRLNFGPTGDSESVPDPQPLSEPPAGPSGLGSGTMAAGGGAPMADNNEGADGVGNVSGNWHCDSTWLGDRVITTSTRTWALPTYNNHLYKQISNGTSGGSSNDNTYFGYSTPWGYFDFNRFHCHFSPRDWQRLINNNWGFRPKKLNFKLFNIQVKEVTQNEGTKTTANNLTSTVQVFTDSEYQLPYVLGSAHQGCLPPFPADVFMIPQYGYLTLNNGSQAVGRSSFYCLEYFPSQMLRTGNNFTFSYTFEDVPFHSSYAHSQSLDRLMNPLIDQYLYYLSRTQTNGTNATQTLLFAQAGPQNMSAQAKNWLPGPCYRQQRVSTAVSQNNNSNFTWTGATKYHLNGRDSLVNPGVAMATHKDDEERFFPSSGVLMFGKQGAGKDNVEYTNVMLTSEEEIKTTNPVATEQYGVVADNLQQTNSAPIVGAVNSQGALPGMVWQNRDVYLQGPIWAKIPHTDGNFHPSPLMGGFGLKHPPPQILIKNTPVPADPPVNFTDAKLASFITQYSTGQVSVEIEWELQKENSKRWNPEIQYTSNYYKSANVDFAVNADGVYSEPRPIGTRYLTRNL

SEQ ID NO: 388 - DNA, 4404 bp, Adeno-associated virus
atggctgccgatggttatcttccagattggctcgagggcaacctctctgagggcattcgcgagtggtgggacttgaaacctggagccccgaaacccaaagccaaccagcaaaagcaggacgacggccggggtctggtgcttcctggctacaggtacctcggacccttcaacggactcgacaagggagagccggtcaacgaggcagacgccgcggccctcgagcacgacaaggcctacgacaagcagctcgagcagggggacaacccgtacctcaagtacaaccacgccgacgccgagtttcaggagcgtcttcaagaagatacgtcttttgggggcaacctcgggcgagcagtcttccaggccaagaagcgggttctcgaacctctcggtctggttgaggaaggcgctaagacggctcctggaaagaagagacccatagaatcccccgactcctccacgggcatcggcaagaacggccagccgcccgctaaaaagaagctcaactttgggcagactggcgactcagagtcagtgcccgacccccaacctctcggagaacctcccgccgcgccctcaggtctgggatctggtacaatggctgcaggcggtggcgcaccaatggcagacaataacgaaggcgccgacggagtgggtaatgcctccggaaattggcattgcgattccacatggctgggcgacagagtcatcaccaccagcacccgcacctgggccctgcccacctacaacaaccacctctacaagcagatatcaagtcagagcggggctaccaacgacaaccacttcttcggctacagcaccccctggggctattttgacttcaacagattccactgccacttctcaccacgtgactggcagcgactcatcaacaacaactggggattccggcccagaaagctgcggttcaagttgttcaacatccaggtcaaggaggtcacgacgaacgacggcgttacgaccatcgctaataaccttaccagcacgattcaggtcttctcggactcggagtaccaactgccgtacgtcctcggctctgcgcaccagggctgcctccctccgttccctgcggacgtgttcatgattcctcagtacggatatctgactctaaacaacggcagtcagtctgtgggacgttcctccttctactgcctggagtactttccttctcagatgctgagaacgggcgataactttgaattcagctacacctttgaggaagtgcctttccacagcagctatgcgcacagccagagcctggaccggctgatgaatcccctcatcgaccagtacctgtactacctggcccggacccagagcactacggggtccacaagggagctgcagttccatcaggctgggcccaacaccatggccgagcaatcaaagaactggctgcccggaccctgttatcggcagcagagactgtcaaaaaacatagacagcaacaacaacagtaactttgcctggaccggggccactaaataccatctgaatggtagaaattcattaaccaacccgggcgtagccatggccaccaacaaggacgacgaggaccagttctttcccatcaacggagtgctggtttttggcaaaacgggggctgccaacaagacaacgctggaaaacgtgctaatgaccagcgaggaggagatcaaaaccaccaatcccgtggctacagaagaatacggtgtggtctccagcaacctgcaatcgtctacggccggaccccagacacagactgtcaacagccagggggctctgcccggcatggtctggcagaaccgggacgtgtacctgcagggtcccatctgggccaaaattcctcacacggacggcaactttcacccgtctcccctgatgggcggatttggactcaaacacccgcctcctcaaattctcatcaaaaacaccccggtacctgctaatcctccagaggtgtttactcctgccaagtttgcctcatttatcacgcagtacagcaccggccaggtcagcgtggagatcgagtgggaactgcagaaagaaaacagcaaacgctggaatccagagattcagtacacctcaaattatgccaagtctaataatgtggaatttgctgtcaacaacgaaggggtttatactgagcctcgccccattggcacccgttacctcacccgtaacctgtaaatggctgccgatggttatcttccagattggctcgaggacaacctctctgagggcattcgcgagtggtgggacttgaaacctggagccccgaaacccaaagccaaccagcaaaagcaggacgacggccggggtctggtgcttcctggctacaagtacctcggacccttcaacggactcgacaagggggagcccgtcaacgcggcggacgcagcggccctcgagcacgacaaggcctacgaccagcagctcaaagcgggtgacaatccgtacctgcggtataaccacgccgacgccgagtttcaggagcgtctgcaagaagatacgtcttttgggggcaacctcgggcgagcagtcttccaggccaagaagcgggttctcgaacctctcggtctggttgaggaaggcgctaagacggctcctggaaagaagagaccggtagagccatcaccccagcgttctccagactcctctacgggcatcggcaagaaaggccagcagcccgcgaaaaagagactcaactttgggcagactggcgactcagagtcagtgcccgaccctcaaccaatcggagaaccccccgcaggcccctctggtctgggatctggtacaatggctgcaggcggtggcgctccaatggcagacaataacgaaggcgccgacggagtgggtagttcctcaggaaattggcattgcgattccacatggctgggcgacagagtcatcaccaccagcacccgaacctgggccctccccacctacaacaaccacctctacaagcaaatctccaacgggacttcgggaggaagcaccaacgacaacacctacttcggctacagcaccccctgggggtattttgactttaacagattccactgccacttctcaccacgtgactggcagcgactcatcaacaacaactggggattccggcccaagagactcaacttcaagctcttcaacatccaggtcaaggaggtcacgcagaatgaaggcaccaagaccatcgccaataaccttaccagcacgattcaggtctttacggactcggaataccagctcccgtacgtcctcggctctgcgcaccagggctgcctgcctccgttcccggcggacgtcttcatgattcctcagtacgggtacctgactctgaacaatggcagtcaggccgtgggccgttcctccttctactgcctggagtactttccttctcaaatgctgagaacgggcaacaactttgagttcagctaccagtttgaggacgtgccttttcacagcagctacgcgcacagccaaagcctggaccggctgatgaaccccctcatcgaccagtacctgtactacctgtctcggactcagtccacgggaggtaccgcaggaactcagcagttgctattttctcaggccgggcctaataacatgtcggctcaggccaaaaactggctacccgggccctgctaccggcagcaacgcgtctccacgacactgtcgcaaaataacaacagcaactttgcctggaccggtgccaccaagtatcatctgaatggcagagactctctggtaaatcccggtgtcgctatggcaacccacaaggacgacgaagagcgattttttccgtccagcggagtcttaatgtttgggaaacagggagctggaaaagacaacgtggactatagcagcgttatgctaaccagtgaggaagaaattaaaaccaccaacccagtggccacagaacagtacggcgtggtggccgataacctgcaacagcaaaacgccgctcctattgtaggggccgtcaacagtcaaggagccttacctggcatggtctggcagaaccgggacgtgtacctgcagggtcctatctgggccaagattcctcacacggacggaaactttcatccctcgccgctgatgggaggctttggactgaaacacccgcctcctcagatcctgattaagaatacacctgttcccgcggatcctccaactaccttcagtcaagctaagctggcgtcgttcatcacgcagtacagcaccggacaggtcagcgtggaaattgaatgggagctgcagaaagaaaacagcaaacgctggaacccagagattcaatacacttccaactactacaaatctacaaatgtggactttgctgttaacacagatggcacttattctgagcctcgccccatcggcacccgttacctcacccgtaatctgtaa

SEQ ID NO: 389 - protein, 738 aa, Adeno-associated virus; identical to SEQ ID NO: 7

SEQ ID NO: 390 - DNA, 3129 bp, Adeno-associated virus
gaattcgccctttctacggctgcgtcaactggaccaatgagaactttcccttcaacgattgcgtcgacaagatggtgatctggtgggaggagggcaagatgacggccaaggtcgtggagtccgccaaggccattctcggcggcagcaaagtgcgcgtggaccaaaagtgcaagtcgtccgcccagatcgaccccacccccgtgatcgtcacctccaacaccaacatgtgcgccgtgattgacgggaacagcaccaccttcgagcaccagcagccgttgcaggaccggatgttcaagtttgaactcacccgccgtctggagcacgactttggcaaggtgacaaagcaggaagtcagagagttcttccgctgggcgcaggatcacgtgaccgaggtggcgcacgagttctacgtcagaaagggtggagccaacaagagacccgcccccgatgacgcggataaaagcgagcccaagcgggcctgcccctcagtcgcggatccatcgacgtcagacgcggaaggagctccggtggactttgccgacaggtaccaaaacaaatgttctcgtcacgcgggcatgcttcagatgctgtttccctgcaaaacatgcgagagaatgaatcagaatttcaacatttgcttcacgcacgggaccagagactgttcagaatgtttccccggcgtgtcagaatctcaaccggtcgtcagaaaaaagacgtatcggaaactctgtgcgattcatcatctgctgggggcgggcacccgagattgcttgctcggcctgcgatctggtcaacgtggacctagatgactgtgtttctgagcaataaatgacttaaaccaggtatggctgccgatggttatcttccagattggctcgaggacaacctctctgagggcattcgcgagtggtgggacttgaaacctggagccccgaaacccaaagccaaccagcaaaagcaggacgacggccggggtctggtgcttcctggctacaagtacctcggacccttcaacggactcgacaagggggagcccgtcaacgcggcggacgcagcggccctcgagcacgacaaggcctacgaccagcagctcaaagcgggtgacaatccgtacctgcggtataaccacgccgacgccgagtttcaggagcgtctgcaagaagatacgtcttttgggggcaacctcgggcgagcagtcttccaggccaagaagcgggttctcgaacctctcggtctggttgaggaaggcgctaagacggctcctggaaagaagagaccggtagagccatcaccccagcgttctccagactcctctacgggcatcggcaagaaaggccagcagcccgcgaaaaagagactcaactttgggcagactggcgactcagagtcagtgcccgaccctcaaccaatcggagaaccccccgcaggcccctctggtctgggatctggtacaatggctgcaggcggtggcgctccaatggcagacaataacgaaggcgccgacggagtgggtagttcctcaggaaattggcattgcgattccacatggctgggcgacagagtcatcaccaccagcacccgaacctgggccctccccacctacaacaaccacctctacaagcaaatctccaacgggacttcgggaggaagcaccaacgacaacacctacttcggctacagcaccccctgggggtattttgactttaacagattccactgccacttctcaccacgtgactggcagcgactcatcaacaacaactggggattccggcccaagagactcaacttcaagctcttcaacatccaggtcaaggaggtcacgcagaatgaaggcaccaagaccatcgccaataaccttaccagcacgattcaggtctttacggactcggaataccagctcccgtacgtcctcggctctgcgcaccagggctgcctgcctccgttcccggcggacgtcttcatgattcctcagtacgggtacctgactctgaacaatggcagtcaggccgtgggccgttcctccttctactgcctggagtactttccttctcaaatgctgagaacgggcaacaactttgagttcagctaccagtttgaggacgtgccttttcacagcagctacgcgcacagccaaagcctggaccggctgatgaaccccctcatcgaccagtacctgtactacctgtctcggactcagtccacgggaggtaccgcaggaactcagcagttgctattttctcaggccgggcctaataacatgtcggctcaggccaaaaactggctacccgggccctgctaccggcagcaacgcgtctccacgacactgtcgcaaaataacaacagcaactttgcctggaccggtgccaccaagtatcatctgaatggcagagactctctggtaaatcccggtgtcgctatggcaacccacaaggacgacgaagagcgattttttccgtccagcggagtcttaatgtttgggaaacagggagctggaaaagacaacgtggactatagcagcgttatgctaaccagtgaggaagaaattaaaaccaccaacccagtggccacagaacagtacggcgtggtggccgataacctgcaacagcaaaacgccgctcctattgtaggggccgtcaacagtcaaggagccttacctggcatggtctggcagaaccgggacgtgtacctgcagggtcctatctgggccaagattcctcacacggacggaaactttcatccctcgccgctgatgggaggctttggactgaaacacccgcctcctcagatcctgattaagaatacacctgttcccgcggatcctccaactaccttcagtcaagctaagctggcgtcgttcatcacgcagtacagcaccggacaggtcagcgtggaaattgaatgggagctgcagaaagaaaacagcaaacgctggaacccagagattcaatacacttccaactactacaaatctacaaatgtggactttgctgttaacacagatggcacttattctgagcctcgccccatcggcacccgttacctcacccgtaatctgtaattgcttgttaatcaataaaccggttgattcgtttcagttgaactttggtctctgcgaagggcgaattc

SEQ ID NO: 391 - protein, 738 aa, Artificial Sequence; identical to SEQ ID NO: 7
  Description of Artificial Sequence: Synthetic polypeptide

SEQ ID NO: 392 - protein, 733 aa, Artificial Sequence
  Description of Artificial Sequence: Synthetic polypeptide
MAADGYLPDWLEDNLSEGIREWWDLRPGAPKPKANQQKQDDGRGLVLPGYKYLGPFNGLDKGEPVNEADAAALEHDKAYDKQLEQGDNPYLKYNHADAEFQERLQEDTSFGGNLGRAVFQAKKRVLEPLGLVEEGAKTAPGKKRPIESPDSSTGIGKKGQQPAKKRLNFGQTGDSESVPDPQPIGEPPAGPSGLGSGTMAAGGGAPMADNNEGADGVGSSSGNWHCDSTWLGDRVITTSTRTWALPTYNNHLYKQISNGTSGGSTNDNTYFGYSTPWGYFDFNRFHCHFSPRDWQRLINNNWGFRPKRLNFKLFNIQVKEVTQNEGTKTIANNLTSTIQVFTDSEYQLPYVLGSAHQGCLPPFPADVFMIPQYGYLTLNNGSQAVGRSSFYCLEYFPSQMLRTGNNFEFSYQFEDVPFHSSYAHSQSLDRLMNPLIDQYLYYLSRTQSTGGTAGTQQLLFSQAGPNNMSAQAKNWLPGPCYRQQRVSTTVSQNNNSNFAWTGATKYHLNGRDSLVNPGVAMATHKGDEERFFPSSGVLMFGKQGAGKDNVDYSSVMLTSEEEIKTTNPVATEQYGVVADNLQQQNAAPIVGAVNSQGALPGMVWQNRDVYLQGPIWAKIPHTDGNFHPSPLMGGFGLKHPPPQILIKNTPVPADPPTTFSQAKLASFITQYSTGQVSVEIEWELQKENSKRWNPEIQYTSNYYKSTNVDFAVNTEGTYSEPRPIGTRYLTRNL

SEQ ID NO: 393 - DNA, 2501 bp, Adeno-associated virus
gaattcgcccttggctgcgtcaactggaccaatgagaactttcccttcaacgattgcgtcgacaagatggtgatctggtgggaggagggcaagatgacggccaaggtcgtggagtccgccaaggccattcatcatctgctggggcgggctcccgagattgcttgctcggcctgcgatctggtcaacgtggacctggatgactgtgtttctgagcaataaatgacttaaaccaggtatggctgccgatggttatcttccagattggctcgaggacaacctctctgagggcattcgcgagtggtgggacttgagacctggagccccgaaacccaaagccaaccagcaaaagcaggacgacggccggggtctggtgcttcctggctacaagtacctcggacccttcaacggactcgacaagggagagccggtcaacgaggcagacgccgcggccctcgagcacgacaaggcctacgacaagcagctcgagcagggggacaacccgtacctcaagtacaaccacgccgacgccgagtttcaggagcgtcttcaagaagatacgtcttttgggggcaacctcgggcgagcagtcttccaggccaagaagcgggttctcgaacctctcggtctggttgaggaaggcgctaagacggctcctggaaagaagagacccatagaatcccccgactcctccacgggcatcggcaagaaaggccagcagcccgctaaaaagagactcaactttgggcagactggcgactcagagtcagtgcccgaccctcaaccaatcggagaaccccccgcaggcccctctggtctgggatctggcacaatggctgcaggcggtggcgctccaatggcagacaataacgaaggcgccgacggagtgggtagttcctcaggaaattggcattgcgattccacatggctgggcgacagagtcatcaccaccagcacccgaacctgggccctccccacctacaacaaccacctctacaagcaaatctccaacgggacatcgggaggaagcaccaacgacaacacctacttcggctacagcaccccctgggggtattttgactttaacagattccactgccacttctcaccacgtgactggcagcgactcatcaacaacaactggggattccggcccaagagactcaacttcaagctcttcaacatccaggtcaaggaggtcacgcagaatgaaggcaccaagaccatcgccaataaccttaccagcacgattcaggtctttacggactcggaataccagctcccgtacgtcctcggctctgcgcaccagggctgcctgcctccgttcccggcggacgtcttcatgattcctcagtacgggtacctgactctgaacaacggcagtcaggccgtgggccgttcctccttctactgcctggagtactttccttctcaaatgctgagaacgggcaacaactttgagttcagctaccagtttgaggacgtgccttttcacagcagctatgcgcacagccaaagcctggaccggctgatgaaccccctcatcgaccagtacctgtactacctgtctcggactcagtccacgggaggtaccgcaggaactcagcagttgctattttctcaggccgggcctaataacatgtcggctcaggccaaaaactggctacccgggccctgctaccggcagcaacgcgtctccacgacagtgtcgcaaaataacaacagcaactttgcttggaccggtgccaccaagtatcatctgaatggcagagactctctggtaaatcccggtgtcgctatggcaacgcacaagggcgacgaagagcgattttttccatccagcggagtcttgatgtttgggaaacagggagctggaaaagacaacgtagactatagcagcgttatgctaaccagtgaggaagaaatcaaaaccaccaacccagtggccacagaacagtacggcgtggtggccgataacctgcaacagcaaaacgccgctcctattgtaggggccgtcaacagtcaaggagccttacctggcatggtctggcagaaccgggacgtgtacctgcagggtcctatctgggccaagattcctcacacggacggcaactttcatccttcgccgctgatgggaggctttggactgaaacacccgcctcctcagatcctgattaagaatacacctgttcccgcggatcctccaactaccttcagtcaagccaagctggcgtcgttcatcacgcagtacagcaccggacaggtcagcgtggaaattgaatgggagctgcagaaagagaacagcaagcgctggaacccagagattcagtatacttccaactactacaaatctacaaatgtggactttgctgtcaatactgagggtacttattcagagcctcgccccattggcacccgttacctcacccgtaacctgtaattgcctgttaatcaataaaccggttgattcgtttcagttgaactttggtctcaagggcgaattc

SEQ ID NO: 394 - DNA, 2187 bp, Adeno-associated virus
atggctgccgatggttatcttccagattggctcgaggacaacctctctgagggcattcgcgagtggtgggacttgaaacctggagccccgaaacccaaagccaaccagcaaaagcaggacgacggccggggtctggtgcttcctggctacaagtacctcggacccttcaacggactcgacaagggagagccggtcaacgaggcagacgccgcggccctcgagcacgacaaggcctacgacaagcagctcgagcagggggacaacccgtacctcaagtacaaccacgccgacgccgagtttcaggagcgtcttcaagaagatacgtcttttgggggcaacctcgggcgagcagtcttccaggccaagaagcgggttctcgaacctctcggtctggttgaggaaggcgctaagacggctcctggaaagaagagacccatagaatcccccgactcctccacgggcatcggcaagaaaggccagcagcccgctaaaaagaagctcaactttgggcagactggcgactcagagtcagtgcccgacccccaacctctcggagaacctcccgccgcgccctcaggtctgggatctggtacaatggctgcaggcggtggcgcaccaatggcagacaataacgaaggcgccgacggagtgggtaatgcctccggaaattggcattgcgattccacatggctgggcgacagagtcatcaccaccagcacccgcacctgggccctgcccacctacaacaaccacctctacaagcagatatcaagtcagagcggggctaccaacgacaaccacttcttcggctacagcaccccctggggctattttgacttcaacagattccactgccacttctcaccacgtgactggcagcgactcatcaacaacaactggggattccggcccagaaagctgcggttcaagttgttcaacatccaggtcaaggaggtcacgacgaacgacggcgttacgaccatcgctaataaccttaccagcacgattcaggtcttctcggactcggagtaccaactgccgtacgtcctcggctctgcgcaccagggctgcctccctccgttccctgcggacgtgttcatgattcctcagtacggatatctgactctaaacaacggcagtcagtctgtgggacgttcctccttctactgcctggagtactttccttctcagatgctgagaacgggcaataactttgaattcagctacacctttgaggaagtgcctttccacagcagctatgcgcacagccagagcctggaccggctgatgaatcccctcatcgaccagtacctgtactacctggcccggacccagagcactacggggtccacaagggagctgcagttccatcaggctgggcccaacaccatggccgagcaatcaaagaactggctgcccggaccctgttatcggcagcagagactgtcaaaaaacatagacagcaacaacaacagtaactttgcctggaccggggccactaaataccatctgaatggtagaaattcattaaccaacccgggcgtagccatggccaccaacaaggacgacgaggaccagttctttcccatcaacggagtgctggtttttggcgaaacgggggctgccaacaagacaacgctggaaaacgtgctaatgaccagcgaggaggagatcaaaaccaccaatcccgtggctacagaagaatacggtgtggtctccagcaacctgcaatcgtctacggccggaccccagacacagactgtcaacagccagggggctctgcccggcatggtctggcagaaccgggacgtgtacctgcagggtcccatctgggccaaaattcctcacacggacggcaactttcacccgtctcccctgatgggcggatttggactcaaacacccgcctcctcaaattctcatcaaaaacaccccggtacctgctaatcctccagaggtgtttactcctgccaagtttgcctcatttatcacgcagtacagcaccggccaggtcagcgtggagatcgagtgggaactgcagaaagaaaacagcaaacgctggaatccagagattcagtacacctcaaattatgccaagtctaataatgtggaatttgctgtcaacaacgaaggggtttatactgagcctcgccccattggcacccgttacctcacccgtaacctgtaa

SEQ ID NO: 395 - protein, 728 aa, Adeno-associated virus; identical to SEQ ID NO: 63

SEQ ID NO: 396 - protein, 728 aa, Adeno-associated virus; identical to SEQ ID NO: 155

SEQ ID NO: 397 - protein, 728 aa, Adeno-associated virus; identical to SEQ ID NO: 155

SEQ ID NO: 398 - protein, 733 aa, Artificial Sequence
  Description of Artificial Sequence: Synthetic polypeptide
MAADGHLPDWLEDNLSEGIREWWDLKPGAPKPKANQQKQDDGRGLVLPGYKYLGPFNGLDKGEPVNAADAAALEHDKAYDQQLKAGDNPYLRYNHADAEFQERLQEDTSFGGNLGRAVFQAKKRVLEPLGLVEEGAKTAPGKKRPIESPDSSTGIGKKGQQPAKKKLNFGQTGDSESVPDPQPIGEPPAGPSGLGSGTMAAGGGAPMADNNEGADGVGSSSGNWHCDSTWLGDRVITTSTRTWALPTYNNHLYKQISNGTSGGSTNDNTYFGYSTPWGYFDFNRFHCHFSPRDWQRLINNSWGFRPKRLNFKLFNIQVKEVTQNEGTKTIANNLTSTIQVFTDSEYQLPYVLGSAHQGCLPPFPADVFMIPQYGYLTLNNGSQAVGRSSFYCLEYFPSQMLRTGNNFEFSYQFEDVPFHSSYAHSQSLDRLMNPLIDQYLYYLSRTQSTGGTAGTQQLLFSQAGPNNMSAQAKNWLPGPCYRQQRVSTTLSQNNNSNFAWTGATKYHLNGRDSLVNPGVAMATHKDDEERFFPSSGVLMFGKQGAGKDNVDYSSVMLTSEEEIKTTNPVATEQYGVVADNLQQQNAAPIVGAVNSQGALPGMVWQNRDVYLQGPIWAKIPHTDGNFHPSPLMGGFGLKHPPPQILIKNTPVPADPPTTFSQAKLASFITQYSTGQVSVEIEWELQKENSKRWNPEIQYTSNYYKSTNVDFAVNTEGTYSEPRPIGTRYLTRNL

SEQ ID NO: 399 - DNA, 3113 bp, Adeno-associated virus
gaattcgccctttctacggctgcgtcaactggaccaatgagaactttcccttcaacgattgcgtcgacaagatggtgatctggtgggaggagggcaagatgacggccaaggtcgtggagtccgccaaggccattctcggcggcagcaaggtgcgcgtggaccaaaagtgcaagtcgtccgcccagatcgatcccacccccgtgatcgtcacttccaacaccaacatgtgcgccgtgattgacgggaacagcaccaccttcgagcaccagcagccgttacaagaccggatgttcaaatttgaactcacccgccgtctggagcatgactttggcaaggtgacaaagcaggaagtcaaagagttcttccgctgggcgcaggatcacgtgaccgaggtggcgcatgagttctacgtcagaaagggtggagccaacaagagacccgcccccgatgacgcggataaaagcgagcccaagcgggcctgcccctcagtcgcggatccatcgacgtcagacgcggaaggagctccggtggactttgccgacaggtaccaaaacaaatgttctcgtcacgcgggcatgcttcagatgctgcttccctgcaagacatgcgagagaatgaatcagaatttcagcatttgcttcacgcacgggaccagagactgttcagaatgtttccccggcgtgtcagaatctcaaccggtcgtcagaaagaggacgtatcggaaactctgtgccattcatcatctgctggggcgggctcccgagattgcttgctcggcctgcgatctggtcaacgtggacctggatgactgtgtttctgagcaataaatgacttaaaccaggtatggctgccgatggtcatcttccagattggctcgaggacaacctctctgagggcattcgcgagtggtgggacttgaaacctggagccccgaaacccaaagccaaccagcaaaagcaggacgacggccggggtctggtgcttcctggctacaagtacctcggacccttcaacggactcgacaagggggagcccgtcaacgcggcggacgcagcggccctcgagcacgacaaggcctacgaccagcagctcaaagcgggtgacaatccgtacctgcggtataaccacgccgacgccgagtttcaggagcgtcttcaagaagatacgtcttttgggggcaacctcgggcgagcagtcttccaggccaagaagcgggttctcgaacctctcggtctggttgaggaaggcgctaagacggctcctggaaagaagagacccatagaatcccccgactcctccacgggcatcggcaagaaaggccagcagcccgctaaaaagaagctcaactttgggcagactggcgactcagagtcagtgcccgaccctcaaccaatcggagaaccccccgcaggcccctctggtctgggatctggtacaatggctgcaggcggtggcgctccaatggcagacaataacgaaggcgccgacggagtgggtagttcctcaggaaattggcattgcgattccacatagctgggcgacagagtcatcaccaccagcacccgaacctgggccctccccacctacaacaaccacctctacaagcaaatctccaacgggacatcgggaggaagcaccaacgacaacacctacttcggctacagcaccccctgggggtattttgactttaacagattccactgccacttctcaccacgtgactggcagcgactcatcaacaacagctggggattccggcccaagagactcaacttcaagctcttcaacatccaggtcaaggaggtcacgcagaatgaaggcaccaagaccatcgccaataaccttaccagcacgattcaggtctttacggactcggaataccagctcccgtacgtcctcggctctgcgcaccagggctgcctgcctccgttcccggcggacgtcttcatgattcctcagtacgggtacctgactctgaacaacggcagtcaggccgtgggccgttcctccttctactgcctggagtactttccttctcaaatgctgagaacgggcaacaactttgagttcagctaccagtttgaggacgtgccttttcacagcagctacgcgcacagccaaagcctggaccggctgatgaaccccctcatcgaccagtacctgtactacctgtctcggactcagtccacgggaggtaccgcaggaactcagcagttgctattttctcaggccgggcctaataacatgtcggctcaggccaaaaactggctacccgggccctgctaccggcagcaacgcgtctccacgacactgtcgcaaaataacaacagcaactttgcttggaccggtgccaccaagtatcatctgaatggcagagactctctggtaaatcccggtgtcgctatggcaacgcacaaggacgacgaagagcgattttttccatccagcggagtcttgatgtttgggaaacagggagctggaaaagacaacgtggactatagcagcgttatgctaaccagtgaggaagaaatcaaaaccaccaacccagtggccacagaacagtacggcgtggtggccgataacctgcaacagcaaaacgccgctcctattgtaggggccgtcaacagtcaaggagccttacctggcatggtctggcagaaccgggacgtgtacctgcagggtcctatctgggccaagattcctcacacggacggcaactttcatccttcgccgctgatgggaggctttggactgaaacacccgcctcctcagatcctgattaagaatacacctgttcccgcggatcctccaactaccttcagtcaagccaagctggcgtcgttcatcacgcagtacagcaccggacaggtcagcgtggaaattgaatgggagctgcagaaagagaacagcaagcgctggaacccagagattcagtatacttccaactactacaaatctacaaatgtggactttgctgtcaatactgagggtacttattcagagcctcgccccattggcacccgttacctcacccgtaacctgtaattgcctgttaatcaataaaccggttaattcgtttcagttgaactttggtctctgcgaagggcgaattc

SEQ ID NO: 400 - protein, 731 aa, Artificial Sequence
  Description of Artificial Sequence: Synthetic polypeptide
MAADGYLPDWLEDNLSEGIREWWDLKPGAPKPKANQQKQDDGRGLVLPGYKYLGPFNGLDKGEPVNEADAAALEHDKAYDKQLEQGDNPYLKYNHADAEFQERLQEDTSFGGNLGRAVFRAKKRVLEPLGLVEEGAKTAPGKKRPIESPDSSTGIGKKGQQPAKKKLNFGQTGDSESVPDPQPLGEPPAAPSGLGSGTMAAGGGAPMADNNEGADGVGNASGNWHCDSTWLGDRVITTSTRTWALPTYNNHLYKQISSQSGATNDNHFFGYSTPWGYFDFNRFHCHFSPRDWQRLINNNRGFRPRKLRFKLFNIQVKEVTTNDGVTTIANNLTSTIQVFSDSEYQLPYVLGSAHQGCLPPFPADVFMIPQYGYLTLNNGSQSVGRSSFYCLEYFPSQMLRTGNNFEFSYQFEDVPFHSSYAHSQSLDRLMNPLIDQYLYYLSRTQSTGGTAGTQQLLFSQAGPNNMSAQAKNWLPGPCYRQQRVSTTLSQNNNSNFAWTGATKYHLNGRDSLVNPGVAMATHKDDEERFFPSSGVLMFGKQGAGKDNVDYSSVMLTSEEEIKTTNPVATEQYGVVADNLQQQNAAPIVGAVNSQGALPGMAWQNRDVYLQGPIWAKIPHTDGNFHPSPLMGGFGLKHPPPQILIKNTPVPADPPTTFSQAKLASFITQYSTGQVSVEIEWELQKENSKRWNPEIQYTSNYYKSTNVDFAVNTEGTYSEPRPIGTRYLTRNL

SEQ ID NO: 401 - DNA, 3106 bp, Adeno-associated virus
gaattcgcccttctacggctgcgtcaactggaccaatgagaactttcccttcaacgattgcgtcgacaagatggtgatctggtgggaggagggcaagatgacggccaaggtcgtggagtccgccaaggccattctcggcggcagcaaggtgcgcgtggaccaaaagtgcaagtcgtccgcccagatcgaccccacccccgtgatcgtcacctccaacaccaacatgtgcgccgtgattgacgggaacagcaccaccttcgagcaccagcagccgttgcaggaccggatgttcaaatttgaactcacccgccgtctggagcatgactttggcaaggcgacaaagcaggaagtcaaagagttcttccgctgggcgcaggatcacgtgaccgaggtggcgcatgagttctacgtcagaaagggtggagccaacaagagacccgcccccgatgacgcggataaaagcgagcccaagcgggcccgcccctcagtcgcggatccatcgacgtcagacgcggaaggagctccggtggactttgccgacaggtaccaaaacaaatgttctcgtcacgcgggcatgcttcagatgctgtttccctgcaaaacatgcgagagaatgaatcagaatttcaacatttgcttcacgcacgggaccagagactgttcagaatgtttccccggcgtgtcagaatctcaaccggtcgtcagaaagaggacgtatcggaaactctgtgccattcatcatctgctggggcgggctcccgagattgcttgctcggcctgcgatctggtcaacgtggacctggatgactgtgtttctgagcaataaatgacttaaaccaggtatggctgccgatggttatcttccagattggctcgaggacaacctctctgagggcattcgcgagtggtgggacttgaaacctggagccccgaaacccaaagccaaccagcaaaagcaggacgacggccggggtctggtgcttcctggctacaagtacctcggacccttcaacggactcgacaagggagagccggtcaacgaggcagacgccgcggccctcgagcacgacaaggcctacgacaagcagctcgagcagggggacaacccgtacctcaagtacaaccacgccgacgccgagtttcaggagcgtcttcaagaagatacgtcttttgggggcaacctcgggcgagcagtcttccgggccaagaagcgggttctcgaacctctcggtctggttgaggaaggcgctaagacggctcctggaaagaagagacccatagaatcccccgactcctccacgggcatcggcaagaaaggccagcagcccgctaaaaagaagctcaactttgggcagactggcgactcagagtcagtgcccgacccccaacctctcggagaacctcccgccgcgccctcaggtctgggatctggtacaatggctgcaggcggtggcgcaccaatggcagacaataacgaaggcgccgacggagtgggtaatgcctccggaaattggcattgcgattccacatggctgggcgacagagtcatcaccaccagcacccgcacctgggccctgcccacctacaacaaccacctctacaagcagatatcaagtcagagcggggctaccaacgacaaccacttcttcggctacagcaccccctggggctattttgacttcaacagattccactgccacttctcaccacgtgactggcagcgactcatcaacaacaaccggggattccggcccagaaagctgcggttcaagttgttcaacatccaggtcaaggaggtcacgacgaacgacggcgttacgaccatcgctaataaccttaccagcacgattcaggtcttctcggactcggagtaccaactgccgtacgtcctcggctctgcgcaccagggctgcctccctccgttccctgcggacgtgttcatgattcctcagtacggatatctgactctaaacaacggcagtcagtctgtgggacgttcctccttctactgcctggagtactttccttctcagatgctgagaacgggcaataactttgaattcagctaccagtttgaggacgtgccctttcacagcagctacgcgcacagccaaagcctggaccggctgatgaaccccctcatcgaccagtacctgtactacctgtctcggactcagtccacgggaggtaccgcaggaactcagcagttgctattttctcaggccgggcctaataacatgtcggctcaggccaaaaactggctacccgggccctgctaccggcagcaacgcgtctccacgacactgtcgcaaaataacaacagcaactttgcttggaccggtgccaccaagtatcatctgaatggcagagactctctggtaaatcccggtgtcgctatggcaacgcacaaggacgacgaagagcgattttttccatccagcggagtcttgatgtttgggaaacagggagctggaaaagacaacgtggactatagcagcgttatgctaaccagtgaggaagaaatcaaaaccaccaacccagtggccacagaacagtacggcgtggtggccgataacctgcaacagcaaaacgccgctcctattgtaggggccgtcaacagtcaaggagccttacctggcatggcctggcagaaccgggacgtgtacctgcagggtcctatctgggccaagattcctcacacggacggcaactttcatccttcgccgctgatgggaggctttggactgaaacacccgcctcctcagatcctgattaagaatacacctgttcccgcggatcctccaactaccttcagtcaagccaagctggcgtcgttcatcacgcagtacagcaccggacaggtcagcgtggaaattgaatgggagctgcagaaagagaacagcaagcgctggaacccagagattcagtatacttccaactactacaaatctacaaatgtggactttgctgtcaatactgagggtacttattcagagcctcgccccattggcacccgttacctcacccgtaacctgtaattgcctgttaatcaataaaccggttaattcgtttcagttgaactttggtctctgcgaagggcgaattc

SEQ ID NO: 402 - protein, 738 aa, Artificial Sequence
  Description of Artificial Sequence: Synthetic polypeptide
MAADGYLPDWLEDNLSEGIREWWDLKPGAPKPKANQQKQDDGRGLVLPGYKYLGPFNGLDKGEPVNEADAAALEHDKAYDKQLEQGDNPYLKYNHADAEFQERLQEDTSFGGNLGRAVFQAKKRVLEPLGLVEEGAKTAPGKKRPVEPSPQRSPDSSTGIGKTGQQPAKKRLNFGQTGDSESVPDPQPIGEPPAGPSGLGSGTMAAGGGAPMADNNEGADGVGSSSGNWHCDSTWLGDRVITTSTRTWALPTYNNHLYKQISNGTSGGSTNDNTYFGYSTPWGYFDFNRFHCHFSPRDWQRLINNNWGFRPKRLNFKLFNIQVKEVTQNEGTKTIANNLTSTIQVFTDSEYQLPYVLGSAHQGCLPPFPADVFMIPQYGYLTLNNGSQAVGRSSFYCLEYFPSQMLRTGNNFEFSYQFEDVPFHSSYAHSQSLDRLMNPLIDQYLYYLSRTQSTGGTAGTQQLLFSQAGPNNMSAQAKNWLPGPCYRQQRVSTTLSQNNNSNFAWTGATKYHLNGRDSLVNPGVAMATHKDDEERFFPSSGVLMFGKQGAGKDNVDYSSVMLTSEEEIKTTNPVATEQYGVVADNLQQQNAAPIVGAVNSQGALPGMVWQNRDVYLQGPIWAKIPHTDGNFHPSPLMGGFGLKHPPPQILIKNTPVPADPPTTFSQAKLASFITQYSTGQVSVEIEWELQKENSKRWNPEIQYTSNYYKSTNVDFAVNTEGTYSEPRPIGTRYLTRNL

SEQ ID NO: 403 - DNA, 3197 bp, Adeno-associated virus
gaattcgccctttctacggctgcgtcaactggaccaatgagaactttcccttcaacgattgcgtcgacaagatggtgatctggtgggaggagggcaagatgacggccaaggtcgtggagtccgccaaggccattctcggcggcagcaaggtgcgcgtggaccaaaagtgcaagtcgtccgcccagatcgaccccacccccgtgatcgtcacctccaacaccaacatgtgcgccgtgattgacgggaacagcaccaccttcgagcaccagcagccgttacaagaccggatgttcaaatttgaactcacccgccgtctggagcacgactttggcaaggtgacaaagcaggaagtcaaagagttcttccgctgggcgcaggatcacgtgaccgaggtggcgcatgagttctacgtcagaaagggtggagccaacaagagacccgcccccgatgacgcggataaaagcgagcccaagcgggcctgcccctcagtcgcggatccatcgacgtcagacgcggaaggagctccggtggactttgccgacaggtaccaaaacaaatgttctcgtcacgcgggcatgcttcagatgctgtttccctgcaagacatgcgagagaatgaatcagaatttcaacatttgcttcacgcacgggaccagagactgttcagaatgtttccccggcgtgtcagaatctcaaccggtcgtcagaaagaggacgtatcggaaactctgtgccattcatcatctgctggggcgggctcccgagattgcttgctcggcctgcgatctggtcaacgtggacctggatgactgtgtttctgagcaataaatgacttaaaccaggtatggctgccgatggttatcttccagattggctcgaggacaacctctctgagggcattcgcgagtggtgggacttgaaacctggagccccgaaacccaaagccaaccagcaaaagcaggacgacggccggggtctggtgcttcctggctacaagtacctcggacccttcaacggactcgacaagggagagccggtcaacgaggcagacgccgcggccctcgagcacgacaaggcctacgacaagcagctcgagcagggggacaacccgtacctcaagtacaaccacgccgacgccgagtttcaggagcgtcttcaagaagatacgtcttttgggggcaacctcgggcgagcagtcttccaggccaagaagcgggttctcgaacctctcggtctggttgaggaaggcgctaagacggctcctggaaagaagagaccggtagagccatcaccccagcgttctccagactcctctacgggcatcggcaagacaggccagcagcccgcgaaaaagagactcaactttgggcagactggcgactcagagtcagtgcccgaccctcaaccaatcggagaaccccccgcaggcccctctggtctgggatctggtacaatggctgcaggcggtggcgctccaatggcagacaataacgaaggcgccgacggagtgggtagttcctcaggaaattggcattgcgattccacatggctgggcgacagagtcatcaccaccagcacccgaacctgggccctccccacctacaacaaccacctctacaagcaaatctccaacgggacatcgggaggaagcaccaacgacaacacctacttcggctacagcaccccctgggggtattttgactttaacagattccactgccacttctcaccacgtgactggcagcgactcatcaacaacaactggggattccggcccaagagactcaacttcaagctcttcaacatccaggtcaaggaggtcacgcagaatgaaggcaccaagaccatcgccaataaccttaccagcacgattcaggtctttacggactcggaataccagctcccgtacgtcctcggctctgcgcaccagggctgcctgcctccgttcccggcggacgtcttcatgattcctcagtacgggtacctgactctgaacaacggcagtcaggccgtgggccgttcctccttctactgcctggagtactttccttctcaaatgctgagaacgggcaacaactttgagttcagctaccagtttgaggacgtgccttttcacagcagctacgcgcacagccaaagcctggaccggctgatgaaccccctcatcgaccagtacctgtactacctgtctcggactcagtccacgggaggtaccgcaggaactcagcagttgctattttctcaggccgggcctaataacatgtcggctcaggccaaaaactggctacccgggccctgctaccggcagcaacgcgtctccacgacactgtcgcaaaataacaacagcaactttgcttggaccggtgccaccaagtatcatctgaatggcagagactctctggtaaatcccggtgtcgctatggcaacgcacaaggacgacgaagagcgattttttccatccagcggagtcttgatgtttgggaaacagggagctggaaaagacaacgtggactatagcagcgttatgctaaccagtgaggaagaaatcaaaaccaccaacccagtggccacagaacagtacggcgtggtggccgataacctgcaacagcaaaacgccgctcctattgtaggggccgtcaacagtcaaggagccttacctggcatggtctggcagaaccgggacgtgtacctgcagggtcctatctgggccaagattcctcacacggacggcaactttcatccttcgccgctgatgggaggctttggactgaaacacccgcctcctcagatcctgattaagaatacacctgttcccgcggatcctccaactaccttcagtcaagccaagctggcgtcgttcatcacgcagtacagcaccggacaggtcagcgtggaaattgaatgggagctgcagaaagagaacagcaagcgctggaacccagagattcagtatacttccaactactacaaatctacaaatgtggactttgctgtcaatactgagggtacttattcagagcctcgccccattggcacccgttacctcacccgtaacctgtaattgcctgttaatcaataaaccggttaattcgtttcagttgaactttggtctctgcgaagggcgaattcgtttaaacctgcaggactagtccctttagtgagggttaattctgagcttggcgtaatcatgggtcatag

SEQ ID NO: 404 - protein, 735 aa, Artificial Sequence
  Description of Artificial Sequence: Synthetic polypeptide
MAADGYLPDWLEDNLSEGIREWWDLKPGAPKPKANQQKQDDGRGLVLPGYKYLGPFNGLDKGEPVNEADAAALEHDKAYDKQLEQGDNPYLKYNHADAEFQERLQEDTSFGGNLGRAVFQAKKRVLEPLGLVEEGAKTAPGKKRPVEPSPQRSPDSSTGIGKTGQQPAKKRLNFGQTGDSESVPDPQPIGEPPAGPSGLGSGTMAAGGGAPMADNNEGADGVGSSSGNWHCDSTWLGDRVITTSTRTWALPTYNNHLYKQISNGTSGGSTNDNTYFGYSTPWGYFDFNRFHCHFSPRDWQRLINNNWGFRPRKLRFKLFNIQVKEVTTDDGVTTIANNLTSTIQVFSDSEYQLPYVLGSAHQGCLPPFPADVFMIPQYGYLTLNNGSQSVGRSSFYCLEYFPSQMLRTGNNFEFSYTFEEVPFHSSYAHSQSLDRLMNPLIDQYLYYLARTQSTTGSTRELQFHQAGPNTMAEQSKNWLPGPCYRQQRLSKNIDSNNNSNFAWTGATKYHLNGRNSLTNPGVAMATNKDDEDQFFPINGVLVFGKTGAANKTTLENVLMTSEEEIKTTNPVATEEYGVVSSNLQSSTAGPQTQTVNSQGALPGMVWQNRDVYLQGPIWAKIPHTDGNFHPSPLMDGFGLKHPPPQILIKNTPVPANPPEVFTPAKFASFITQYSTGQVSVEIEWELQKENSKRWNPEIQYTSNYAKSNNVEFAVNNEGVYTEPRPIGTRYLTRNL

SEQ ID NO: 405 - DNA, 3276 bp, Adeno-associated virus
gaattcgcccttcgcagagaccaaagttcaactgaaacgaattaaccggtttattgattaacaggcaattacaggttacgggtgaggtaacgggtgccaatggggcgaggctcagtataaaccccttcgttgttgacagcaaattccacattattagacttggcataatttgaggtgtactgaatctctggattccagcgtttgctgttttctttctgcagttcccactcgatctccacgctgacctggccggtgctgtactgcgtgataaatgaggcaaacttggcaggagtaaacacctctggaggattagcaggtaccggggtgtttttgatgagaatttgaggaggcgggtgtttgagtccaaatccgtccatcaggggagacgggtgaaagttgccgtccgtgtgaggaattttggcccagatgggaccctgcaggtacacgtcccggttctgccagaccatgccgggcagagccccctggctgttgacagtctgtgtctggggtccggccgtagacgattgcaggttgctggagaccacaccgtattcttctgtagccacgggattggtggttttgatctcctcctcgctggtcattagcacgttttccagcgttgtcttgttggcagcccccgttttgccaaaaaccagcactccgttgatgggaaagaactggtcctcgtcgtccttgttggtggccatggctacgcccgggttggttaatgaatttctaccattcagatggtatttagtggccccggtccaggcaaagttactgttgttgttgctgtctatgttttttgacagtctctgctgccgataacagggtccgggcagccagttctttgattgctcggccatggtgttgggcccagcctgatggaactgcagctcccttgtggaccccgtagtgctctgggtccgggccaggtagtacaggtactggtcgatgaggggattcatcagccggtccaggctctggctatgcgcatagctgctgtggaaaggcacttcctcaaaggtgtagctgaattcaaagttattgcccgttctcagcatctgagaaggaaagtactccaggcagtagaaggaggaacgtcccacagactgactgccgttgtttagagtcagatatccgtactgaggaatcatgaacacgtccgcagggaacggagggaggcagccctggtgcgcagagccgaggacgtacggcagttggtactccgagtccgagaagacctgaatcgtgctggtaaggttattagcgatggtcgtaacgccgtcgtccgtcgtgacctccttgacctggatgttgaacaacttgaaccgcagctttctgggccggaatccccagttgttgttgatgagtcgctgccagtcacgtggtgagaagtggcagtggaatctgttaaagtcaaaatacccccagggggtgctgtagccgaagtaggtgttgtcgttggtgcttcctcccgatgtcccgttggagatttgcttgtagaggtggttgttgtaggtggggagggcccaggttcgggtgctggtggtgatgactctgtcgcccagccatgtggaatcgcaatgccaatttcctgaggaactacccactccgtcggcgccttcgttattgtctgccattggagcgccaccgcctgcagccattgtaccagatcccagaccagaggggcctgcggggggttctccgattggttgagggtcgggcactgactctgagtcgccagtctgcccaaagttgagtctctttttcgcgggctgctggcctgtcttgccgatgcccgtagaggagtctggagaacgctggggtgatggctctaccggtctcttctttccaggagccgtcttagcgccttcctcaaccagaccgagaggttcgagaacccgcttcttggcctggaagactgctcgcccgaggttgcccccaaaagacgtatcttcttgaagacgctcctgaaactcggcgtcggcgtggttgtacttgaggtacgggttgtccccctgctcgagctgcttgtcgtaggccttgtcgtgctcgagggccgcggcgtctgcctcgttgaccggctctcccttgtcgagtccgttgaagggtccgaggtacttgtagccaggaagcaccagaccccggccgtcgtcctgcttttgctggttggctttgggtttcggggctccaggtttcaagtcccaccactcgcgaatgccctcagagaggttgtcctcgagccaatctggaagataaccatcggcagccatacctggtttaagtcatttattgctcagaaacacagtcatccaggtccacgttgaccagatcgcaggccgagcaagcaatctcgggagcccgccccagcagatgatgaatggcacagagtttccgatacgtcctctttctgacgaccggttgagattctgacacgccggggaaacattctgaacagtctctggtcccgtgcgtgaagcaaatgttgaaattctgattcattctctcgcatgtcttgcagggaaacagcatctgaagcatgcccgcgtgacgagaacacttgttttggtacctgtcggcaaagtccaccggagctccttccgcgtctgacgtcgatggatgcaaaatgtcgcaaaagcactcacgtgacagctaatacaggaccactcccctatgacgtgatttacgtcagcgctatgcccgcgtgacgagaacatttgttttggtacctgtcggcaaagtccaccggagctccttccgcgtctgacgtcgatggatccgcgactgaggggcaggcccgcttgggctcgcttttatccgcgtcatcgggggcgggtctcttgttggctccaccctttctgacgtagaactcatgcgccacctcggtcacgtgatcctgcgcccagcggaagaactctttgacttcctgctttgtcaccttgccaaagtcatgctccagacggcgggtgagttcaaatttgaacatccggtcctgcaacggctgctggtgctcgaaggtggtgctgttcccgtcaatcacggcgcacatgttggtgttggaagtgacgatcacgggggtgggatcgatctgggcggaagacttgcacttttggtccacgcgcaccttgctgccgccgagaatggccttggcggactccacgaccttggccgtcatcttgccctcctcccaccagatcaccatcttgtcgacgcaatcgttgaagggaaagttctcattggtccagttgacgcagccgtagaaagggcgaattc

SEQ ID NO: 406 - protein, 738 aa, Adeno-associated virus; identical to SEQ ID NO: 71

SEQ ID NO: 407 - protein, 738 aa, Adeno-associated virus
MAADGYLPDWLEDNLSEGIREWWDLKPGAPKPKANQQKQDDGRGLVLPGYKYLGPFNGLDKGEPVNAADAAALEHDKAYDQQLKAGDNPYLRYNHADAEFQERLQEDTSFGGNLGRAVFQAKKRVLEPLGLVEEGAKTAPGKKRPVEPSPQRSPDSSTGIGKKGHQPARKRLNFGQTGDSESVPDPQPIGEPPAGPSGLGSGTMAAGGGAPMADNNEGADGVGSSSGNWHCDSTWLGDRVITTSTRTWALPTYNNHLYKQISNGTSGGSTNDNTYFGYSTPWGYFDFNRFHCHFSPRDWQRLINNNWGFRPKRLNFKLFNIQVKEVTQNEGTKTIANNLTSTIQVFTDSEYQLPYVPGSAHQGCLPPFPADVFMIPQYGYLTLNNGSQAVGRSSFYCLEYFPSQMLRTGNNFEFSYTFEDVPFHSSYAHSQSLDRLMNPLIDQYLYYLSRTQSTGGTQGTQQLLFSQAGPANMSAQAKNWLPGPCYRQQRVSTTLSQNNNSNFAWTGATKYHLNGRDSLVNPGVAMATHKDDEERFFPSSGVLMFGKQGAGKDNVDYSSVMLTSEEEIKTTNPVATEQYGVVADNLQQTNGAPIVGTVNSQGALPGMVWQNRDVYLQGPIWAKIPHTDGNFHPSPLMGGFGLKHPPPQILIKNTPVPADPPTTFSQAKLASFITQYSTGQVSVEIEWELQKENSKRWNPEIQYTSNYYKSTNVDFAVNTEGTYSEPRPIGTRYLTRNL

SEQ ID NO: 408 - protein, 738 aa, Adeno-associated virus; identical to SEQ ID NO: 69

SEQ ID NO: 409 - protein, 728 aa, Artificial Sequence
  Description of Artificial Sequence: Synthetic polypeptide
MAADGYLPDWLEDNLSEGIREWWDLKPGAPKPKANQQKQDDGRGLVLPGYKYLGPFNGLDKGEPVNEADAAALEHDKAYDKQLEQGDNPYLKYNHADAEFQERLQEDTSFGGNLGRAVFQAKKRVLEPLGLVEEGAKTAPGKKRPIESPDSSTGIGRKGQQPAKKKLNFGQTGDSESVPDPQPIGEPPAGPSGLGSGTMAAGGGAPMADNNEGADGVGNASGNWHCDSTWLGDRVITTSTRTWALPTYNNHLYKQISSQSGATNDNHFFGYSTPWGYFDFNRFHCHFSPRDWQRLINNNWGFRPRKLRFKLFNIQVKEVTTNDGVTTIANNLTSTIQVFSDSEYQLPYVLGSAHQGCLPPFPADVFMIPQYGYLTLNNGSQSVGRSSFYCLEYFPSQMLRTGNNFEFSYTFEEVPFHSSYAHSQSLDRLMNPLIDQYLYYLARTQSTTGSTRELQFHQAGPNTMAEQSKNWLPGPCYRQQRLSKNIDSNNNSNFAWTGATKYHLNGRNSLTNPGVAMATNKDDEDQFFPINGVLVFGKTGAANKTTLENVLMTSEEEIKTTNPVATEEYGVVSSNLQSSTAGPQTQTVNSQGALPGMVWQNRDVYLQGPIWAKIPHTDGNFHPSPLMGGFGLKHPPPQILIKNTPVPANPPEVFTPAKFASFITQYSTGQVSVEIEWELQKENSKRWNPEIQYTSNYAKSNNVEFAVNNEGVYTEPRPIGTRYLTRNL

SEQ ID NO: 410 - DNA, 2489 bp, Adeno-associated virus
gaattcgccctttctacggctgcgtcaactggaccaatgagaactttcccttcaacgattgcgtcgacaagatggtgatctggtgggaggagggcaagatgacggccaaggtcgtgaagtccgccaaggccattcatcatctgctggggcgggctcccgagattgcttgctcggcctgcgatctggtcaacgtggacctggatgactgtgtttctgagcaataaatgacttaaaccaggtatggctgccgatggttatcttccagattggctcgaggacaacctctctgagggcattcgcgagtggtgggacttgaaacctggagccccgaaacccaaagccaaccagcaaaagcaggacgacggccggggtctggtgcttcctggctacaagtacctcggacccttcaacggactcgacaagggagagccggtcaacgaggcagacgccgcggccctcgagcacgacaaggcctacgacaagcagctcgagcagggggacaacccgtacctcaagtacaaccacgccgacgccgagtttcaggagcgtcttcaagaagatacgtcttttgggggcaacctcgggcgagcagtcttccaggccaagaagcgggttctcgaacctctcggtctggttgaggaaggcgctaagacggctcctggaaagaagagacccatagaatcccccgactcctccacgggcatcggcaggaaaggccagcagcccgctaaaaagaagctcaactttgggcagactggcgactcagagtcagtgcccgaccctcaaccaatcggagaaccccccgcaggcccctctggtctgggatctggtacaatggctgcaggcggtggcgctccaatggcagacaataacgaaggcgccgacggagtgggtaatgcctccggaaattggcattgcgattccacatggctgggcgacagagtcatcaccaccagcacccgcacctgggccctgcccacctacaacaaccacctctacaagcagatatcaagtcagagcggggctaccaacgacaaccacttcttcggctacagcaccccctggggctattttgacttcaacagattccactgccacttctcaccacgtgactggcagcgactcatcaacaacaactggggattccggcccagaaagctgcggttcaagttgttcaacatccaggtcaaggaggtcacgacgaacgacggcgttacgaccatcgccaataaccttaccagcacgattcaggtcttctcggactcggagtaccaactgccgtacgtcctcggctctgcgcaccagggctgcctccctccgttccctgcggacgtgttcatgattcctcagtacggatatctgactctaaacaacggcagtcagtctgtgggacgttcctccttctactgcctggagtactttccttctcagatgctgagaacgggcaataactttgaattcagctacacctttgaggaagtgcctttccacagcagctatgcgcacagccagagcctggaccggctgatgaatcccctcatcgaccagtacctgtactacctggcccggacccagagcactacggggtccacaagggagctgcagttccatcaggctgggcccaacaccatggccgagcaatcaaagaactggctgcccggaccctgttatcggcagcagagactgtcaaaaaacatagacagcaacaacaacagtaactttgcctggaccggggccactaaataccatctgaatggtagaaattcattaaccaacccgggcgtagccatggccaccaacaaggacgacgaggaccagttctttcccatcaacggagtgctggtttttggcaaaacgggggctgccaacaagacaacgctggaaaacgtgctaatgaccagcgaggaggagatcaaaaccaccaatcccgtggctacagaagaatacggtgtggtctccagcaacctgcaatcgtctacggccggaccccagacacagactgtcaacagccagggggctctgcccggcatggtctggcagaaccgggacgtgtacctgcagggtcccatctgggccaaaattcctcacacggacggcaactttcacccgtctcccctgatgggcggatttggactcaaacacccgcctcctcaaattctcatcaaaaacaccccggtacctgctaatcctccagaggtgtttactcctgccaagtttgcctcatttatcacgcagtacagcaccggccaggtcagcgtggagatcgagtgggaactgcagaaagaaaacagcaaacgctggaatccagagattcagtacacctcaaattatgccaagtctaataatgtggaatttgctgtcaacaacgaaggggtttatactgagcctcgccccattggcacccgttacctcacccgtaacctgtaattgcctgttaatcaataaaccggttaattcgtttcagttgaactttggtcaagggcgaattc

SEQ ID NO: 411 - protein, 728 aa, Artificial Sequence
  Description of Artificial Sequence: Synthetic polypeptide
MAADGYLPDWLEDNLSEGIREWWDLKPGAPKPKANQQKQDDGRGLVLPGYKYLGPFNGLDKGEPVNAADAAALEHDKAYDQQLKAGDNPYLRYNHADAEFQERLQEDTSFGGNLGRAVFQAKKRVLEPLGLVEEGAKTAPGKKRPIESPDSSTGIGKKGQQPAKKKLNFGQTGDSESVPDPQPIGEPPAGPSGLGSGTMAAGGGAPMADNNEGADGVGNASGNWHCDSTWLGDRVITTSTRTWALPTYNNHLYKQISSQSGATNDNHFFGYSTPWGYFDFNRFHCHFSPRDWQRLINNNWGFRPRKLRFKLFNIQVKEVTTNDGVTTIANNLTSTIQVFSDSEYQLPYVLGSAHQGCLPPFPADVFMIPQYGYLTLNNGSQSVGRSSFYCLEYFPSQMLRTGNNFEFSYTFEEVPFHSSYAHSQSLDRLMNPLIDQYLYYLARTQSTTGSTRELQFHQAGPNTMAEQSKNWLPGPCYRRQRLSKDIDSNNNSNFAWTGATKYHLNGRNSLTNPGVAMATNKDDEDQFFPINGVLVFGKTGAANKTTLENVLMTSEEEIKTTNPVATEEYGVVSSNLQSSTAGPQTQTVNSQGALPGMVWQNRDVYLQGPIWAKIPHTDGNFHPSPLMGGFGLKHPPPQILIKNTPVPANPPEVFTPAKFASFITQYSTGQVSVEIEWELQKENSKRWNPEIQYTSNYAKSNNVEFAVNNEGVYTEPRPIGTRYLTRNL

SEQ ID NO: 412 - DNA, 3098 bp, Adeno-associated virus
gaattcgccctttctacggctgcgtcaactggaccaatgagaactttcccttcaacgattgcgtcgacaagatggtgatctggtgggaggagggcaagatgacggccaaggtcgtggagtccgccaaggccattctcggcggcagcaaggtgcgcgtggaccaaaagtgcaagtcttccgcccagatcgatcccacccccgtgatcgtcacttccaacaccaacatgtgcgccgtgattgacgggaacagcaccaccttcgagcaccagcagccgttacaagaccggatgttcaaatttgaactcacccgccgtctggagcacgactttggcaaggtgacaaagcaggaagtcaaagagttcttccgctgggcgcaggatcacgtgaccgaggtggcgcatgagttctacgtcagaaagggtggagccaacaagagacccgcccccgatgacgcggataaaagcgagcccaagcgggcctgcccctcagtcgcggatccatcgacgtcagacgcggaaggagctccggtggactttgccgacaggtaccaaaacaaatgttctcgtcacgcgggcatgcttcagatgctgtttccctgcaagacatgcgagagaatgaatcagaatttcaacatttgcttcacgcacgggaccggagactgttcagaatgtttccccggcgtgtcagaatctcaaccggtcgtcagaaagaggacgtatcggaaactctgtgccattcatcatctgctggggcgggctcccgagattgcttgctcggcctgcgatctggtcaacgtggacctggatgactgtgtttctgagcaataaatgacttaaaccaggtatggctgccgatggttatcttccagattggctcgaggacaacctctctgagggcattcgcgagtggtgggacttgaaacctggagccccgaaacccaaagccaaccagcaaaagcaggacgacggccggggtctggtgcttcctggctacaagtacctcggacccttcaacggactcgacaagggagagccggtcaacgcggcggacgcagcggccctcgagcacgacaaggcctacgaccagcagctcaaagcgggtgacaatccgtacctgcggtataaccacgccgacgccgagtttcaggagcgtcttcaagaagatacgtcttttgggggcaacctcgggcgagcagtcttccaggccaagaagcgggttctcgaacctctcggtctggttgaggaaggcgctaagacggctcctggaaagaagagacccatagaatcccccgactcctccacgggcatcggcaagaaaggccagcagcccgctaaaaagaagctcaactttgggcagactggcgactcagagtcagtgcccgaccctcaaccaatcggagaaccccccgcaggcccctctggtctgggatctggtacaatggctgcaggcggtggcgctccaatggcagacaataacgaaggcgccgacggagtgggtaatgcctccggaaattggcattgcgattccacatggctgggcgacagagtcatcaccaccagcacccgcacctgggccctgcccacctacaacaaccacctctacaagcagatatcaagtcagagcggggctaccaacgacaaccacttcttcggctacagcaccccctggggctattttgacttcaacagattccactgccacttctcaccacgtgactggcagcgactcatcaacaacaactggggattccggcccagaaagctgcggttcaagttgttcaacatccaggtcaaggaggtcacgacgaacgacggcgttacgaccatcgctaataaccttaccagcacgattcaggtcttctcggactcggagtaccaactgccgtacgtcctcggctctgcgcaccagggctgcctccctccgttccctgcggacgtgttcatgattcctcagtacggatatctgactctaaacaacggcagtcagtctgtgggacgttcctccttctactgcctggagtactttccttctcagatgctgagaacgggcaataactttgaattcagctacacctttgaggaagtgcctttccacagcagctatgcgcacagccagagcctggaccggctgatgaatcccctcatcgaccagtacctgtactacctggcccggacccagagcactacggggtccacaagggagctgcagttccatcaggctgggcccaacaccatggccgagcaatcaaagaactggctgcccggaccctgttatcggcggcagagactgtcaaaagacatagacagcaacaacaacagtaactttgcctggaccggggccactaaataccatctgaatggtagaaattcattaaccaacccgggcgtagccatggccaccaacaaggacgacgaggaccagttctttcccatcaacggagtgctggtttttggcaaaacgggggctgccaacaagacaacgctggaaaacgtgctaatgaccagcgaggaggagatcaaaaccaccaatcccgtggctacagaagaatacggtgtggtctccagcaacctgcaatcgtctacggccggaccccagacacagactgtcaacagccagggggctctgcccggcatggtctggcagaaccgggacgtgtacctgcagggtcccatctgggccaaaattcctcacacggacggcaactttcacccgtctcccctgatgggcggatttggactcaaacacccgcctcctcaaattctcatcaaaaacaccccggtacctgctaatcctccagaggtgtttactcctgccaagtttgcctcatttatcacgcagtacagcaccggccaggtcagcgtggagatcgagtgggaactgcagaaagagaacagcaaacgctggaatccagagattcagtacacctcaaattatgccaagtctaataatgtggaatttgctgtcaacaacgaaggggtttatactgagcctcgccccattggcacccgttacctcacccgtaacctgtaattacttgttaatcaataaaccggttgattcgtttcagttgaactttggtctctgcgaagggcgaattc

SEQ ID NO: 413 - protein, 685 aa, Artificial Sequence
  Description of Artificial Sequence: Synthetic polypeptide
MAADGYLPDWLEDNLSEGIREWWDLKPGAPKPKANQQKQDDGRGLVLPGYKYLGPFNGLDKGEPVNEADAAALEHDKAYDKQLEQGDNPYLKYNHADAEFQERLQEDTSFGGNLGRAVFQAKKRVLEPLGLVEEGAKTAPGKKRPVEPSPQRSPDSSTGIGKTGQQPAKKRLNFGQTGDSESVPDPQPIGEPPAGPSGLGSGTMAAGGGAPMADNNEGADGVGSSSGNWHCDSTWLGDRVITTSTRTWALPTYNNHLYKQISNGTSGGSTNDNTYFGYSTPWGYFDFNRFHCHFSPRDWQRLINNNWGFRPKRLNFKLFNIQVKEVTQNEGTKTIANNLTSTIQVFTDSEYQLPYVLGSAHQGCLPPFPADVFMIPQYGYLTLNNGSQAVGRSSFYCLEYFPSQMLRTGNNFEFSYQFEDVPFHSSYAHSQSLDRLTNPLIDQYLYYLARTQSTTGSTRGLQFHQAGPNTMAEQSKNWLPGPCYRQQRLSKNIDSNNNSNFAWTGATKYHLNGRNSLTNPGVAMATNKDDEDQFFPINGVLVFGKTGAANKTTLENVLMTSEEEIKTTNPVATEEYGVVSSNLQSSTAGPQTQTVNSQGALPGMVWQNRDVYLQGPIWAKIPHTDGNFHPSPLMGGFGLKHPPPQILIKYTSNYYKSTNVDFAVNTEGTYSEPRPIGTRYLTRNL

SEQ ID NO: 414 - DNA, 2969 bp, Adeno-associated virus
gaattcgccctttctacggctgcgtcaactggaccaatgagaactttcccttcaacgattgcgtcgacaagatggtgatctggtgggaggagggcaagatgacggccaaggtcgtggagtccgccaaggccattctcggcggcagcaaggtgcgcgtggaccaaaagtgcaagtcgtccgcccagatcgaccccacccccgtgatcgtcacctccaacaccaacatgtgcgccgtgattgacgggaacagcaccaccttcgagcaccagcagccgttacaagaccggatgttcaaatttgaactcacccgccgtctggagcacgactttggcaaggtgacaaagcaggaagtcaaagagttcttccgctgggcgcaggatcacgtgaccgaggtggcgcatgagttctacgtcagaaagggtggagccaacaagagacccgcccccgatgacgcggataaaagcgagcccaagcgggcctgcccctcagtcgcggatccatcgacgtcagacgcggaaggagctccggtggactttgccgacaggtaccaaaacaaatgttctcgtcacgcgggcatgcttcagatgctgtttccctgcaagacatgcgagagaatgaatcagaatttcaacatttgcttcacgcacgggaccagagactgttcagaatgtttccccggcgtgtcagaatctcaaccggtcgtcagaaagaggacgtatcggaaactctgtgccattcatcatctgctggggcgggctcccgagattgcttgctcggcctgcgatctggtcaacgtggacctggatgactgtgtttctgagcaataaatgacttaaaccaggtatggctgccgatggttatcttccagattggctcgaggacaacctctctgagggcatccgcgagtggtgggacttgaaacctggagccccgaaacccaaagccaaccagcaaaagcaggacgacggccggggtctggtgcttcctggctacaagtacctcggacccttcaacggactcgacaagggagagccggtcaacgaggcagacgccgcggccctcgagcacgacaaggcctacgacaagcagctcgagcagggggacaacccgtacctcaagtacaaccacgccgacgccgagtttcaggagcgtcttcaagaagatacgtcttttgggggcaacctcgggcgagcagtcttccaggccaagaagcgggttctcgaacctctcggtctggttgaggaaggcgctaagacggctcctggaaagaagagaccggtagagccatcaccccagcgttctccagactcctctacgggcatcggcaagacaggccagcagcccgcgaaaaagagactcaactttgggcagactggcgactcagagtcagtgcccgaccctcaaccaatcggagaaccccccgcaggcccctctggtctgggatctggtacaatggctgcaggcggtggcgctccaatggcagacaataacgaaggcgccgacggagtgggtagttcctcaggaaattggcattgcgattccacatggctgggcgacagagtcatcaccaccagcacccgaacctgggccctccccacctacaacaaccacctctacaagcaaatctccaacgggacatcgggaggaagcaccaacgacaacacctacttcggctacagcaccccctgggggtattttgactttaacagattccactgccacttctcaccacgtgactggcagcgactcatcaacaacaactggggattccggcccaagagactcaacttcaagctcttcaacatccaggtcaaggaggtcacgcagaatgaaggcaccaagaccatcgccaataaccttaccagcacgattcaggtctttacggactcggaataccagctcccgtacgtcctcggctctgcgcaccagggctgcctgcctccgttcccggcggacgtcttcatgattcctcagtacgggtacctgactctgaacaacggcagtcaggccgtgggccgttcctccttctactgcctggagtactttccttctcaaatgctgagaacgggcaacaactttgagttcagctaccagtttgaggacgtgccttttcacagcagctacgcgcacagccaaagcctggaccggctgacgaaccccctcatcgaccagtacctgtactacctggcccggacccagagcactacggggtccacaagggggctgcagttccatcaggctgggcccaacaccatggccgagcaatcaaagaactggctgcccggaccctgttatcggcagcagagactgtcaaaaaacatagacagcaacaacaacagtaactttgcctggaccggggccactaaataccatctgaatggtagaaattcattaaccaacccgggcgtagccatggccaccaacaaggacgacgaggaccagttctttcccatcaacggagtgctggtttttggcaaaacgggggctgccaacaagacaacgctggaaaacgtgctaatgaccagcgaggaggagatcaaaaccaccaatcccgtggctacagaagaatacggtgtggtctccagcaacctgcaatcgtctacggccggaccccagacacagactgtcaacagccagggggctctgcccggcatggtctggcagaaccgggacgtgtacctgcagggtcccatctgggccaaaattcctcacacggacggcaactttcacccgtctcccctgatgggcggatttggactcaaacacccgcctcctcaaattctcatcaagtatacttccaactactacaaatctacaaatgtggactttgctgtcaatactgagggtacttattcagagcctcgccccattggcacccgttacctcacccgtaacctgtaattgcctgttaatcaataaaccggttaattcgtttcagttgaactttggtctctgcgaagggcgaattc

SEQ ID NO: 415 - protein, 733 aa, Artificial Sequence
  Description of Artificial Sequence: Synthetic polypeptide
MAADGYLPDWLEDNLSEGIREWWDLKPGAPKPKANQQKQDDGRGLVLPGYKYLGPFNGLDKGEPVNAADAAALEHDKAYDQQLKAGDNPYLRYNHADAEFQERLQEDTSFGGNLGRAVFQAKKRVLEPLGLVEEGAKTAPGKKRPIESPDSSTGIGKKGQQPAKKKLNFGQTGDSESVPDPQPIGEPPAGPSGLGSGTMAAGGGAPMADNNEGADGVGSSSGNWHCDSTWLGDRVITTSTRTWALPTYNNHLYKQISNGTSGGSTNDNTYFGYSTPWGYFDFNRFHCHFSPRDWQRLINNNWGFRPKRLNFKLFNIQVKEVTQNEGTKTIANNLTSTIQVFTDSEYQLPYVLGSAHQGCLPPFPADVFMIPQYGYLTLNNGSQAVGRSSFYCLEYFPSQMLRTGNNFEFSYQFEDVPFHSSYAHSQSLDRLMNPLIDQYLYYLSRTQSTGGTAGTQQLLFSQAGPNNMSAQAKNWLPGPCYRQQRVSTTVSQNNNSNFAWTGATKYHLNGRDSLVNPGVAMATHKGDEERFFPSSGVLMFGKQGAGKDNVDYSSVMLTSEEEIKTTNPVATEQYGVVADNLQQQNAAPIVGAVNSQGALPGMVWQNRDVYLQGPIWAKIPHTDGNFHPSPLMGGFGLKHPPPQILIKNTPVPADPPTTFSQAKLASFITQYSTGQVSVEIEWELQKENSKRWNPEIQYTSNYYKSTNVDFAVNTEGTYSEPRPIGTRYLTRSL

SEQ ID NO: 416 - DNA, 3113 bp, Adeno-associated virus
gaattcgccctttctacggctgcgtcaactggaccaatgagaactttcccttcaacgattgcgtcgacaagatggtgatctggtgggaggagggcaagatgacggccaaggtcgtggagtccgccaaggccattctcggcggcagcaaggtgcgcgtggaccaaaagtgcaagtcgtccgcccagatcgatcccacccccgtgatcgtcacttccaacaccaacatgtgcgccgtgattgacgggaacagcaccaccttcgagcaccagcagccgttacaagaccggatgttcaaatttgaactcacccgccgtctggagcatgactttggcaaggtgacaaagcaggaagtcaaagagttcttccgctgggcgcaggatcacgtgaccgaggtggcgcatgagttctacgtcagaaagggtggagccaacaagagacccgcccccgatgacgcggataaaagcgagcccaagcgggcctgcccctcagtcgcggatccatcgacgtcagacgcggaaggagctccggtggactttgccgacaggtaccaaaacaaatgttctcgtcacgcgggcatgcttcagatgctgtttccctgcaagacatgcgagagaatgaatcagaatttcaacatttgcttcacgcacgggaccagagactgttcagaatgtttccccggcgtgtcagaatctcaaccggtcgtcagaaagaggacgtatcggaaactctgtgccattcatcatctgctggggcgggctcccgagattgcttgctcggcctgcgatctggtcaacgtggacctggatgactgtgtttctgagcaataaatgacttaaaccaggtatggctgccgatggttatcttccagattggctcgaggacaacctctctgagggcattcgcgagtggtgggacttgaaacctggagccccgaaacccaaagccaaccagcaaaagcaggacgacggccggggtctggtgcttcctggctacaagtacctcggacccttcaacggactcgacaagggggagcccgtcaacgcggcggacgcagcggccctcgagcacgacaaggcctacgaccagcagctcaaagcgggtgacaatccgtacctgcggtataaccacgccgacgccgagtttcaggagcgtcttcaagaagatacgtcttttgggggcaacctcgggcgagcagtcttccaggccaagaagcgggttctcgaacctctcggtctggttgaggaaggcgctaagacggctcctggaaagaagagacccatagaatcccccgactcctccacgggcatcggcaagaaaggccagcagcccgctaaaaagaagctcaactttgggcagactggcgactcagagtcagtgcccgaccctcaaccaatcggagaaccccccgcaggcccctctggtctgggatctggtacaatggctgcaggcggtggcgctccaatggcagacaataacgaaggcgccgacggagtgggtagttcctcaggaaattggcattgcgattccacatggctgggcgacagagtcatcaccaccagcacccgaacctgggccctccccacctacaacaaccacctctacaagcaaatctccaacgggacatcgggaggaagcaccaacgacaacacctacttcggctacagcaccccctgggggtattttgactttaacagattccactgccacttctcaccacgtgactggcagcgactcatcaacaacaactggggattccggcccaagagactcaacttcaagctcttcaacatccaggtcaaggaggtcacgcagaatgaaggcaccaagaccatcgccaataaccttaccagcacgattcaggtctttacggactcggaataccagctcccgtacgtcctcggctctgcgcaccagggctgcctgcctccgttcccggcggacgtcttcatgattcctcagtacgggtacctgactctgaacaacggcagtcaggccgtgggccgttcctccttctactgcctggagtactttccttctcaaatgctgagaacgggcaacaactttgagttcagctaccagtttgaggacgtgccttttcacagcagctatgcgcacagccaaagcctggaccggctgatgaaccccctcatcgaccagtacctgtactacctgtctcggactcagtccacgggaggtaccgcaggaactcagcagttgctattttctcaggccgggcctaataacatgtcggctcaggccaaaaactggctacccgggccctgctaccggcagcaacgcgtctccacgacagtgtcgcaaaataacaacagcaactttgcttggaccggtgccaccaagtatcatctgaatggcagagactctctggtaaatcccggtgtcgctatggcaacgcacaagggcgacgaagagcgattttttccatccagcggagtcttgatgtttgggaaacagggagctggaaaagacaacgtggactatagcagcgttatgctaaccagtgaggaagaaatcaaaaccaccaacccagtggccacagaacagtacggcgtggtggccgataacctgcaacagcaaaacgccgctcctattgtaggggccgtcaacagtcaaggagccttacctggcatggtctggcagaaccgggacgtgtacctgcagggtcctatctgggccaagattcctcacacggacggcaactttcatccttcgccgctgatgggaggctttggactgaaacacccgcctcctcagatcctgattaagaatacacctgttcccgcggatcctccaactaccttcagtcaagccaagctggcgtcgttcatcacgcagtacagcaccggacaggtcagcgtggaaattgaatgggagctgcagaaagagaacagcaagcgctggaacccagagattcagtatacttccaactactacaaatctacaaatgtggactttgctgtcaatactgagggtacttattcagagcctcgccccattggcacccgttacctcacccgtagcctgtaattgcctgttaatcaataaaccggttgattcgtttcagttgaactttggtctctgcgaagggcgaattc

SEQ ID NO: 417 - protein, 738 aa, Artificial Sequence
  Description of Artificial Sequence: Synthetic polypeptide
MAADGYLPDWLEDNLSEGIREWWDLKPGAPKPKANQQKQDDGRGLVLPGYKYLGPFNGLDKGEPVNAADAAALEHDKAYDQQLKAGDNPYLRYNHADAEFQERLQEDTSFGGNLGRAVFQAKKRVLEPLGLVEEGAKTAPGKKRPVEPSPQRSPDSSTGIGKTGQQPAKKRLNFGQTGDSESVPDPQPIGEPPAGPSGLGSGTMAAGGGAPMADNNEGADGVGSSSGNWHCDSTWLGDRVITTSTRTWALPTYNNHLYKQISNGTSGGSTNDNTYFGYSTPWGYFDFNRFHCHFSPRDWQRLINNNWGFRPKRLNFKLFNIQVKEVTQNEGTKTIANNLTSTIQVFTDSEYQLPYVLGSAHQGCPPPFPADVFMIPQYGYLTLNNGSQAVGRSSFYCLEYFPSQMRRTGNNFEFSYQFEDVPFHSSYAHSQSLDRLMNPLIDQYLYYLSRTQSTGGTAGTQQLLFSQAGPNNMSAQAKNWLPGPCYRQQRVSTTLSQNNNSNFAWTGATKYHLNGRDSLVNPGVAMATHKDDEERFFPSSGVLMFGKQGAGKDNVDYSSVMLTSEEEIKTTNPVATEQYGVVADNLQQQNAAPIVGAVNSQGALPGMVWQNRDVYLQGPIWAKIPHTDGNFHPSPLMGGFGLKHPPPQILIKNTPVPADPPTTFSQAKLASFITQYSTGQVSVEIEWELQKENSKRWNPEIQYTSNYYKSTNVDFAVNTEGTYSEPRPIGTRYLTRNL

SEQ ID NO: 418 - DNA, 3128 bp, Adeno-associated virus
gaattcgccctttctacggctgcgtcaactggaccaatgagaactttcccttcaacgattgcgtcgacaagatggtgatctggtgggaggagggcaagatgacggccaaggtcgtggagtccgccaaggccattctcggcggcagcaaggtgcgcgtggaccaaaagtgcaagtcgtccgcccagatcgaccccacccccgtgatcgtcacctccaacaccaacatgtgcgccgtgattgacgggaacagcaccaccttcgagcaccagcagccgttgcaggaccggatgttcaaatttgaactcacccgccgtctggagcatgactttggcaaggtgacaaagcaggaagtcaaagagttcttccgctgggcgcaggatcacgtgaccgaggtggcgcatgagttctacgtcagaaagggtggagccaacaagagacccgcccccgatgacgcggataaaagcgagcccaagcgggcctgcccctcagtcgcggatccatcgacgtcagacgcggaaggagctccggtggactttgccgacaggtaccaaaacaaatgttctcgtcacgcgggcatgcttcagatgctgtttccctgcaagacatgcgagagaatgaatcagaatttcaacatttgcttcacgcgcgggaccagagactgttcagaatgtttcccgggcgtgtcagaatctcaaccggtcgtcagaaagaggacgtatcggaaactctgtgccattcatcatctgctggggcgggctcccgagattgcttgctcggcctgcgatctggtcaacgtggacctggatgactgtgtttctgagcaataaatgacttaaaccaggtatggctgccgatggttatcttccagattggctcgaggacaacctctctgagggcattcgcgagtggtgggacttgaaacctggagccccgaaacccaaagccaaccagcaaaagcaggacgacggccggggtctggtgcttcctggctacaagtacctcggacccttcaacggactcgacaagggggagcccgtcaacgcggcggacgcagcggccctcgagcacgacaaggcctacgaccagcagctcaaagcgggtgacaatccgtacctgcggtataaccacgccgacgccgagtttcaggagcgtctgcaagaagatacgtcttttgggggcaacctcgggcgagcagtcttccaggccaagaagcgggttctcgaacctctcggtctggttgaggaaggcgctaagacggctcctggaaagaagagaccggtagagccatcaccccagcgttctccagactcctctacgggcatcggcaagacaggccagcagcccgcgaaaaagagactcaactttgggcagactggcgactcagagtcagtgcccgaccctcaaccaatcggagaaccccccgcaggcccctctggtctgggatctggtacaatggctgcaggcggtggcgctccaatggcagacaataacgaaggcgccgacggagtgggtagttcctcaggaaattggcattgcgattccacatggctgggcgacagagtcatcaccaccagcacccgaacctgggccctccccacctacaacaaccacctctacaagcaaatctccaacgggacatcgggaggaagcaccaacgacaacacctacttcggctacagcaccccctgggggtattttgactttaacagattccactgccacttctcaccacgtgactggcagcgactcatcaacaacaactggggattccggcccaagagactcaacttcaagctcttcaacatccaggtcaaggaggtcacgcagaatgaaggcaccaagaccatcgccaataaccttaccagcacgattcaggtctttacggactcggaataccagctcccgtacgtcctcggctctgcgcaccagggctgcccgcctccgttcccggcggacgtcttcatgattcctcagtacgggtacctgactctgaacaacggcagtcaggccgtgggccgttcctccttctactgcctggagtactttccttctcaaatgcggagaacgggcaacaactttgagttcagctaccagtttgaggacgtgccttttcacagcagctacgcgcatagccaaagcctggaccggctgatgaaccccctcatcgaccagtacctgtactacctgtctcggactcagtccacgggaggtaccgcaggaactcagcagttgctattttctcaggccgggcctaataacatgtcggctcaggccaaaaactggctacccgggccctgctaccggcagcaacgcgtctccacgacactgtcgcaaaataacaacagcaactttgcttggaccggtgccaccaagtatcatctgaatggcagagactctctggtaaatcccggtgtcgctatggcaacgcacaaggacgacgaagagcgattttttccatccagcggagtcttgatgtttgggaaacagggagctggaaaagacaacgtggactatagcagcgttatgctaaccagtgaggaagaaatcaaaaccaccaacccagtggccacagaacagtacggcgtggtggccgataacctgcaacagcaaaacgccgctcctattgtaggggccgtcaacagtcaaggagccttacctggcatggtctggcagaaccgggacgtgtacctgcagggtcctatctgggccaagattcctcacacggacggcaactttcatccttcgccgctgatgggaggctttggactgaaacacccgcctcctcagatcctgattaagaatacacctgttcccgcggatcctccaactaccttcagtcaagccaagctggcgtcgttcatcacgcagtacagcaccggacaggtcagcgtggaaattgaatgggagctgcagaaagagaacagcaagcgctggaacccagagattcagtatacttccaactactacaaatctacaaatgtggactttgctgtcaatactgagggtacttattcagagcctcgccccattggcacccgttacctcacccgtaacctgtaattgcctgttaatcaataaaccggttaattcgtttcagttgaactttggtctctgcgaagggcgaattc

SEQ ID NO: 419 - protein, 738 aa, Adeno-associated virus; identical to SEQ ID NO: 407

SEQ ID NO: 420 - DNA, 1933 bp, Adeno-associated virus
  misc_feature (1302)..(1302): n is a, c, t, or g
caaggcctacgaccagcagctcaaagcgggtgacaatccgtacctgcggtataaccacgccgacgccgagtttcaggagcgtcttcaagaagatacgtcttttgggggcaacctcgggcgagcagtcttccaggccaaaaagcgggttctcgaacctcttggtctggttgagacgccagctaagacggcacctggaaagaagcgaccggtagactcgccagactccacctcgggcatcggcaagaaaggccagcagcccgcgaaaaagagactcaactttgggcagactggcgactcagagtcagtccccgaccctcaaccaatcggagaaccaccagcaggcccctctggtctgggatctggtacaatggctgcaggcggtggcgcaccaatggctgacaataacgagggcgccgacggagtgggtaatgcctcaggaaattggcattgcgattccacatggctgggcgacagagtcatcaccaccagcacccgaacctgggccctgcccacctacaacaaccacctctacaagcaaatctccagtcagtcagcagggagcaccaacgataacgtctatttcggctacagcaccccctgggggtattttgacttcaacagattccattgccacttctcaccacgtgactggcagcgacttatcaacaacaactggggattccggcccaagaagctcaacttcaagctcttcaacatccaggtcaaggaggtcacgacgaatgacggtgtcacaaccatcgctaataaccttaccagcacggttcaggtcttttcggactcggaatatcaactgccgtacgtcctcggctccgcgcaccagggctgcctgcctccgttcccggcagacgtgttcatgattccgcagtacggatacctgactctgaacaatggcagccaatcggtaggccgttcctccttctactgcctggagtactttccttctcagatgctgagaacgggcaacaacttcacctttagctacaccttcgaggacgtgcctttccacagcagctacgcgcacagccagagtctggaccggctgatgaatcccctcatcgaccagtacctgtactacttggccagaacacagagcaacgcaggaggtactgctggcaatcgggaactgcagttttatcagggcggacctaccaccatggccgaacaagcaaagaactggctgcccggaccttgcttccggcaacagagagtatccaagacgctggatcaaaataacaacagcaactttgcctggactggtgccacaaaataccatttaaatgnaagaaattcattggttaatcccggtgtcgccatggcaacccacaaggacgacgaggaacgcttcttcccttcgagcggagttctaatttttggcaaaactggagcagctaataaaactacattagaaaacgtgctcatgacaaatgaagaagaaattcgtcctaccaacccggtagctaccgaggaatacgggattgtaagcagcaacttgcaggcggctagcaccgcagcccagacacaagttgttaacaaccagggagccttacctggcatggtctggcagaaccgggacgtgtacctgcaaggtcccatttgggccaagattcctcacacggacggcaactttcacccgtctcctctaatgggtggctttggactgaaacacccgcctccccagatcctgatcaaaaacacaccggtacctgctaatcctccagaagtgtttactcctgccaagtttgcttccttcatcacgcagtacagcaccgggcaagtcagcgttgagatcgagtgggagctgcagaaagagaacagcaagcgctggaacccagagattcagtacacctccaactttgacaaacagactggagtggactttgctgttgacagccagggtgtttactctgagcct

SEQ ID NO: 421 - protein, 733 aa, Artificial Sequence
  Description of Artificial Sequence: Synthetic polypeptide
MAADGYLPDWLEDNLSEGIREWWDLKPGAPKPKANQQKQDDGRGLVLPGYKYLGPFNGLDKGEPVNAADAAALEHDKAYDQQLKAGDNPYLRYNHADAEFQERLQEDTSFGGNLGRAVFQAKKRVLEPLGLVEEGAKTAPGKKRPLESPQEPDSSSGIGKKGKQPAKKRLNFEEDTGAGDGPPEGSDTSAMSSDIEMRAAPGGNAVDAGQGSDGVGNASGDWHCDSTWSEGKVTTTSTRTWVLPTYNNHLYLRLGTTSNSNTYNGFSTPWGYFDFNRFHCHFSPRDWQRLINNNWGLRPKAMRVKIFNIQVKEVTTSNGETTVANNLTSTVQIFADSSYELPYVMDAGQEGSLSPFPNDVFMVPQYGYCGIVTGENQNQTDRNAFYCLEYFPSQMLRTGNNFEMAYNFGKVPFHSMYAYSQSPDRLMNPLLDQYLWHLQSTTSGETLNQGNAATTFGKIRSGDFAFYRKNWLPGPCVKQQRLSKTASQNYKIPASGGNALLKYDTHYTLNNRWSNIAPGPPMATAGPSDGDFSNAQLIFPGPSVTGNTTTSANNLLFTSEEEIAATNPRDTDMFGQIADNNQNATTAPITGNVTAMGVLPGMVWQNRDIYYQGPIWAKIPHADGHFHPSPLIGGFGLKHPPPQIFIKNTPVPANPATTFTAARVDSFITQYSTGQVAVQIEWEIEKERSKRWNPEVQFTSNYGNQSSMLWAPDTTGKYTEPRVIGSRYLTNHL

SEQ ID NO: 422 - DNA, 3105 bp, Adeno-associated virus
gaattcgcccttgctgcgtcaactggaccaatgagaactttcccttcaacgattgcgtcgacaagatggtgatctggtgggaggagggcaagatgaccgccaaggtcgtggagtccgccaaggccattctgggcggaagcaaggtgcgcgtggaccaaaagtgcaagtcatcggcccagatcgaccccacgcccgtgatcgtcacctccaacaccaacatgtgcgccgtgatcgacgggaacagcaccaccttcgagcaccagcagccgctgcaggaccgcatgttcaagttcgagctcacccgccgtctggagcacgactttggcaaggtgaccaagcaggaagtcaaagagttcttccgctgggctcaggatcacgtgactgaggtggcgcatgagttctacgtcagaaagggcggagccaccaaaagacccgcccccagtgacgcggatataagcgagcccaagcgggcctgcccctcagttgcggagccatcgacgtcagacgcggaagcaccggtggactttgcggacaggtaccaaaacaaatgttctcgtcacgcgggcatgcttcagatgctgtttccctgcaagacatgcgagagaatgaatcagaatttcaacgtctgcttcacgcacggggtcagagactgctcagagtgcttccccggcgcgtcagaatctcaacccgtcgtcagaaaaaagacgtatcagaaactgtgcgcgattcatcatctgctggggcgggcacccgagattgcgtgttcggcccgcgatctcgtcaacgtggacttggatgactgtgtttctgagcaataaatgacttaaaccaggtatggctgctgacggttatcttccagattggctcgaggacaacctctctgagggcattcgcgagtggtgggacctgaaacctggagcccccaagcccaaggccaaccagcagaagcaggacgacggccggggtctggtgcttcctggctacaagtacctcggacccttcaacggactcgacaagggggagcccgtcaacgcggcggacgcagcggccctcgagcacgacaaggcctacgaccagcagctcaaagcgggtgacaatccgtacctgcggtataaccacgccgacgccgagtttcaggagcgtctgcaagaagatacgtcttttgggggcaacctcgggcgagcagtcttccaggccaagaagagggtactcgaacctctgggcctggttgaagaaggtgctaagacggctcctggaaagaagagaccgttagagtcaccacaagagcccgactcctcctcaggaatcggcaaaaaaggcaaacaaccagccaaaaagagactcaactttgaagaggacactggagccggagacggaccccctgaaggatcagataccagcgccatgtcttcagacattgaaatgcgtgcagcaccgggcggaaatgctgtcgatgcgggacaaggttccgatggagtgggtaatgcctcgggtgattggcattgcgattccacctggtctgagggcaaggtcacaacaacctcgaccagaacctgggtcttgcccacctacaacaaccacttgtacctgcggctcggaacaacatcaaacagcaacacctacaacggattctccaccccctggggatactttgactttaacagattccactgtcacttctcaccacgtgactggcaaagactcatcaacaacaactggggactacgaccaaaagccatgcgcgttaaaatcttcaatatccaagttaaggaggtcacaacgtcgaacggcgagactacggtcgctaataaccttaccagcacggttcagatatttgcggactcgtcgtatgagctcccgtacgtgatggacgctggacaagagggaagtctgtctcctttccccaatgacgtcttcatggtgcctcaatatggctactgtggcattgtgactggcgaaaatcagaaccagacggacagaaatgctttctactgcctggagtattttccttcacaaatgctgagaactggcaataactttgaaatggcttacaactttgggaaggtgccgttccactcaatgtatgcttacagccagagcccggacagactgatgaatcccctcctggaccagtacctgtggcacttacagtcgaccacctctggagagactctgaatcaaggcaatgcagcaaccacatttggaaaaatcaggagtggagactttgccttttacagaaagaactggctgcctgggccttgtgttaaacagcagagactctcaaaaactgccagtcaaaattacaagattcctgccagcgggggcaacgctctgttaaagtatgacacccactataccttaaacaaccgctggagcaacatagcgcctggacctccaatggcaacagctggaccttcagatggggacttcagcaacgcccagctcatcttccctggaccatcagtcaccggaaacacaacaacctcagcaaacaatctgttgtttacatcagaagaagaaattgctgccaccaacccaagagacacggacatgtttggtcagattgctgacaataatcagaatgctacaactgctcccataaccggcaacgtgactgctatgggagtgcttcctggcatggtgtggcaaaacagagacatttactaccaagggccaatttgggccaagatcccacacgcggacggacattttcatccttcaccgctaattggcggttttggactgaaacatccgcctccccagatatttatcaaaaacacccccgtacctgccaatcctgcgacaaccttcactgcagccagagtggactctttcatcacacaatacagcaccggccaggtcgctgttcagattgaatgggaaatcgaaaaggaacgctccaaacgctggaatcctgaagtgcagtttacttcaaactatgggaaccagtcttctatgttgtgggctcccgatacaactgggaagtatacagagccgcgggttattggctctcgttatttgactaatcatttgtaactgcctagttaatcaataaaccgtgtgattcgtttcagttgaactttggtctctgcgaagggcgaattc

SEQ ID NO: 423 - protein, 733 aa, Adeno-associated virus
MAADGYLPDWLEDNLSEGIREWWDLKPGAPKPKANQQKQDDGRGLVLPGYKYLGPFNGLDKGEPVNAADAAALEHDKAYDQQLKAGDNPYLRYNHADAEFQERLQEDTSFGGNLGRAVFQAKKRVLEPLGLVEEGAKTAPGKKRPLESPQEPDSSSGIGKKGKQPAKKRLNFEEDTGAGDGPPEGSDTSAMSSDIEMRAAPGGNAVDAGQGSDGVGNASGDWHCDSTWSEGKVTTTSTRTWVLPTYNNHLYLRLGTTSNSNTYNGFSTPWGYFDFNRFHCHFSPRDWQRLINNNWGLRPKAMRVKIFNIQVKEVTTSNGETTVANNLTSTVQIFADSSYELPYVMDAGQEGSLPPFPNDVFMVPQYGYCGIVTGENQNQTDRNAFYCLEYFPSQMLRTGNNFEMAYNFEKVPFHSMYAHSQSLDRLMNPLLDQYLWHLQSTTSGETLNQGNAATTFGKIRSGDFAFYRKNWLPGPCVKQQRFSKTASQNYKIPASGGNALLKYDTHYTLNNRWSNIAPGPPMATAGPSDGDFSNAQLIFPGPSVTGNTTTSANNLLFTSEEEIAATNPRDTDMFGQIADNNQNATTAPITGNVTAMGVLPGMVWQNRDIYYQGPIWAKIPHADGHFHPSPLIGGFGLKHPPPQIFIKNTPVPANPATTFTAARVDSFITQYSTGQVAVQIEWEIEKERSKRWNPEVQFTSNYGNQSSMLWAPDTTGKYTEPRVIGSRYLTNHL

SEQ ID NO: 424 - DNA, 3105 bp, Adeno-associated virus
gaattcgcccttgctgcgtcaactggaccaatgagaactttcccttcaacgattgcgtcgacaagatggtgatctggtgggaggagggcaagatgaccgccaaggtcgtggagtccgccaaggccattctgggcggaagcaaggtgcgcgtggaccaaaagtgcaagtcatcggcccagatcgaccccacgcccgtgatcgtcacctccaacaccaacatgtgcgccgtgatcgacgggaacagcaccaccttcgagcaccagcagccgctgcaggaccgcatgttcaagttcgagctcacccgccgtctggagcacgactttggcaaggtgaccaagcaggaagtcaaagagttcttccgctgggctcaggatcacgtgactgaggtggcgcatgagttctacgtcagaaagggcggagccaccaaaagacccgcccccagtgacgcggatataagcgagcccaagcgggcctgcccctcagttgcggagccatcgacgtcagacgcggaagcaccggtggactttgcggacaggtaccaaaacaaatgttctcgtcacgcgggcatgcttcagatgctgtttccctgcaagacatgcgagagaatgaatcagaatttcaacgtctgcttcacgcacggggtcagagactgctcagagtgcttccccggcgcgtcagaatctcaacccgtcgtcagaaaaaagacgtatcagaaactgtgcgcgattcatcatctgctggggcgggcacccgagattgcgtgttcggcctgcgatctcgtcaacgtggacttggatgactgtgtttctgagcaataaatgacttaaaccaggtatggctgctgacggttatcttccagattggctcgaggacaacctctctgagggcattcgcgagtggtgggacctgaaacctggagcccccaagctcaaggccaaccagcagaagcaggacgacggccggggtctggtgcttcctggctacaagtacctcggacccttccacggactcgacaagggggagcccgtcaacgcggcggacgcagcggccctcgagcacgacaaggcctacgaccagcagctcaaagcgggtgacaatccgtacctgcggtataaccacgccgacgccgagtttcaggagcgtctgcaagaagatacgtcttttgggggcaacctcgggcgagcagtcttccaggccaagaagagggtactcgaaccactgggcctggttgaagaaggtgctaagacggctcctggaaagaagagaccgttagagtcaccacaagagcccgactcctcctcaggaatcggcaaaaaaggcaaacaaccagccaaaaagagactcaactttgaagaggacactggagccggagacggaccccctgaaggatcagataccagcgccatgtcttcagacattgaaatgcgtgcagcaccgggcggaaatgctgtcgatgcgggacaaggttccgatggagtgggtaatgcctcgggtgattggcattgcgattccacctggtctgagggcaaggtcacaacaacctcgaccagaacctgggtcttgcccacctacaacaaccacttgtacctgcggctcggaacaacatcaaacagcaacacctacaacggattctccaccccctggggatactttgactttaacagattccactgtcacttctcaccacgtgactggcaaagactcatcaacaacaactggggactacgaccaaaagccatgcgcgttaaaatcttcaatatccaagttaaggaggtcacaacgtcgaacggcgagactacggtcgctaataaccttaccagcacggttcagatatttgcggactcgtcgtatgagctcccgtacgtgatggacgctggacaagagggaagtctgcctcctttccccaatgacgtcttcatggtgcctcaatatggctactgtggcattgtgactggcgaaaatcagaaccagacggacagaaatgctttctactgcctggagtattttccttcacaaatgctgagaactggcaataactttgaaatggcttacaactttgagaaggtgccgttccactcaatgtatgctcacagccagagcctggacagactgatgaatcccctcctggaccagtacctgtggcacttacagtcgaccacctctggagagactctgaatcaaggcaatgcagcaaccacatttggaaaaatcaggagtggagactttgccttttacagaaagaactggctgcctgggccttgtgttaaacagcagagattctcaaaaactgccagtcaaaattacaagattcctgccagcgggggcaacgctctgttaaagtatgacacccactataccttaaacaaccgctggagcaacatagcgcctggacctccaatggcaacagctggaccttcagatggggacttcagcaacgcccagctcatcttccctggaccatcagtcaccggaaacacaacaacctcagcaaacaatctgttgtttacatcagaaggagaaattgctgccaccaacccaagagacacggacatgtttggtcagattgctgacaataatcagaatgctacaactgctcccataaccggcaacgtgactgctatgggagtgcttcctggcatggtgtggcaaaacagagacatttactaccaagggccaatttgggccaagatcccacacgcggacggacattttcatccttcaccgctaattggcggttttggactgaaacatccgcctccccagatatttatcaaaaacacccccgtacctgccaatcctgcgacaaccttcactgcagccagagtggactctttcatcacacaatacagcaccggccaggtcgctgttcagattgaatgggaaatcgaaaaggaacgctccaaacgccggaatcctgaagtgcagtttacttcaaactatgggaaccagtcttctatgttgtgggctcccgatacaactgggaagtatacagagccgcgggttattggctctcgttatttgactaatcatttgtaactgcctagttaatcaataaaccgtgtgattcgtttcagttgaactttggtctctgcgaagggcgaattc

SEQ ID NO: 425 - protein, 733 aa, Artificial Sequence
  Description of Artificial Sequence: Synthetic polypeptide
MAADGYLPDWLEDNLSEGIREWWDLKPGAPKPKANQQKQDDGRGLVLPGYEYLGPFNGLDKGEPVNAADAAALEHDKAYDQQLKAGDNPYLRYNHADAEFQERLQEDTSFGGNLGRAVFQAKKRVLEPLGLVEEGAKTAPGKKRPLESPQEPDSSSGIGKKGKQPAKKRLNFEEDTGAGDGPPEGSDTSAMSSDIEMRAAPGGNAVDAGQGSDGVGNASGDWHCDSTWSEGKVTTTSTRTWVLPTYNNHLYLRLGTTSNSNTYNGFSTPWGYFDFNRFHCHFSPRDWQRLINNNWGLRPKAMRVKIFNIQVKEVTTSNGETTVANNLTSTVQIFADSSYELPYVMDAGQEGSLPPFPNDVFMVPQYGYCGIVTGENQNQTDRNAFYCLEYFPSQMLRTGNNFETAYNFEKVPFHSMYAHSQSLDGLMNPLLDQYLWHLQSTTSGETLNQGNAATTFGKIRSGDFAFYRKNWLPGPCVKQQRFSKTASQNYKIPASGGNALLKYDTHYTLNNRWSNIAPGPPMATAGPSDGDFSNAQLIFPGPSVTGNTTTSANNLLFTSEEEIAATNPRDTDMFGQIADNNQNATTAPITGNVTAMGVLPGMVWQNRDIYYQGPIWAKIPHADGHFHPSPLIGGFGLKHPPPQIFIKNTPVPAYPATTFTAARVDSFITQYSTGQVAVQIEWEIEKERSKRWNPEVQFTSNCGNQSSMLWAPDTTGKYTEPRVIGSRYLTNHL

SEQ ID NO: 426 - DNA, 3105 bp, Adeno-associated virus
gaattcgcccttcgcagagaccaaagttcaactgaaacgaatcacacggtttattgattaactaggcagttacaaatgattagtcaaataacgagagccaataacccgcggctctgtatacttcccagttgtatcgggagcccacaacatagaagactggttcccacagtttgaagtaaactgcacttcaggattccagcgtttggagcgttccttttcgatttcccattcaatctgaacagcgacctggccggtgctgtattgtgtgatgaaagagtccactctggctgcagtgaaggttgtcgcaggataggcaggtacgggggtgtttttgataaatatctggggaggcggatgtttcagtccaaaaccgccaattagcggtgaaggatgaaaatgtccgtccgcgtgtgggatcttggcccaaattggcccttggtagtaaatgtctctgttttgccacaccatgccaggaagcactcccatagcagtcacgttgccggttatgggagcagttgtagcattctgattattgtcagcaatctgaccaaacatgtccgtgtctcttgggttggtggcagcaatttcttcttctgatgtaaacaacagattgtttgctgaggttgttgtgtttccggtgactgatggtccagggaagatgagctgggcgttgctgaagtccccatctgaaggtccagctgttgccattggaggtccaggcgctatgttgctccagcggttgtttaaggtatagtgggtgtcatactttaacagagcgttgcccccgctggcaggaatcttgtaattttgactggcagtttttgagaatctctgctgtttaacacaaggcccaggcagccagttctttctgtaaaaggcaaagtctccactcctgatttttccaaatgtggttgctgcattgccttgattcagagtctctccagaggtggtcgactgtaagtgccacaggtactggtccaggaggggattcatcagtccgtccaggctctggctgtgagcatacattgagtggaacggcaccttctcaaagttgtaagccgtttcaaagttattgccagttctcagcatttgtgaaggaaaatactccaggcagtagaaagcatttctgtccgtctggttctgattttcgccagtcacaatgccacagtagccatattgaggcaccatgaagacgtcattggggaaaggaggcagacttccctcttgtccagcgtccatcacgtacgggagctcatacgacgagtccgcaaatatctgaaccgtgctggtaaggttattagcgaccgtagtctcgccgttcgacgttgtgacctccttaacttggatattgaagattttaacgcgcatggcttttggtcgtagtccccagttgttgttgatgagtctttgccagtcacgtggtgagaagtgacagtggaatctgttaaagtcaaagtatccccagggggtggagaatccgttgtaggtgttgctgtttgatgttgttccgagccgcaggtacaagtggttgttgtaggtgggcaagacccaggttctggtcgaggttgttgtgaccttgccctcagaccaggtggaatcgcaatgccaatcacccgaggcattacccactccatcggaaccttgtcccgcatcgacagcatttccgcccggtgctgcacgcatttcaatgtctgaagacatggcgctggtatctgatccttcagggggtccgtctccggctccagtgtcctcttcaaagttgagtctctttttggctggttgtttgccttttttgccgattcctgaggaggagtcgggctcttgtggtgactctaacggtctcttctttccaggagccgtcttagcaccttcttcaaccaggcccagaggttcgagtaccctcttcttggcctggaagactgctcgcccgaggttgcccccaaaagacgtatcttcttgcagacgctcctgaaactcggcgtcggcgtggttataccgcaggtacggattgtcacccgctttgagctgctggtcgtaggccttgtcgtgctcgagggccgctgcgtccgccgcgttgacgggctcccccttgtcgagtccgttgaagggtccgaggtactcgtagccaggaagcaccagaccccggccgtcgtcctgcttctgctggttggccttgggcttgggggctccaggtttcaggtcccaccactcgcgaatgccctcagagaggttgtcctcgagccaatctggaagataaccgtcagcagccatacctggtttaagtcatttattgctcagaaacacagtcatccaagtccacgttgacgagatcgcaggccgaacacgcaatctcgggtgcccgccccagcagatgatgaatcgcgcacagtttctgatacgtcttttttctgacgacgggttgagattctgacgcgccggggaagcactctgagcagtctctgaccccgtgcgtgaagcagacgttgaaattctgattcattctctcgcatgtcttgcagggaaacagcatctgaagcatgcccgcgtgacgagaacatttgttttggtacctgtccgcaaggtccaccggtgcttccgcgtctgacgtcgatggctccgcaactgaggggcaggcccgcttgggctcgcttatatccgcgtcactgggggcgggtcttttggtggctccgccctttctgacgtagaactcatgcgccacctcagtcacgtgatcctgagcccagcggaagaactctttgacttcctgcttggtcaccttgccaaagtcgtgctccagacggcgggtgagctcgaacttgaacatgcggtcctgcagcggctgctggtgctcgaaggtggtgctgttcccgtcgatcacggcgcacatgttggtgttggaggtgacgatcacgggcgtggggtcgatctgggccgatgacttgcacttttggtccacgcgcaccttgcttccgcccagaatggccttggcggactccacgaccttggcggtcatcttgccctcctcccaccagatcaccatcttgtcgacgcaatcgttgaagggaaagttctcattggtccagttgacgcagcaagggcgaattc

SEQ ID NO: 427 - protein, 729 aa, Artificial Sequence
  Description of Artificial Sequence: Synthetic polypeptide
MAADGYLPDWLEDNLSEGIREWWDLKPGAPKPKANQQKQDDGRGLVLPGYKYLGPFNGLDKGEPVNAADAAALEHDKAYDQQLKAGDNPYLRYNHADAEFQERLQEDTSFGGNLGRAVFQAKKRVLEPLGLVEEGAKTAPGKKRPIDSPDSSTGIGKKGQQPAKKKLNFGQTGDSESVPDPQPLGEPPAAPSSVGSGTMAAGGGAPMADNNEGADGVGNASGNWHCDSTWLGDRVITTSTRTWALPTYNNHLYKQISSSSSGATNDNHYFGYSTPWGYFDFNRFHCHFSPRDWQRLINNNWGFRPKKLRFKLFNIQVKEVTTNDGVTTIANNLTSTVQVFSDSEYQLPYVLGSAHQGCLPPFPADVFMIPQYGYLTLNNGSQSVGRSSFYCLEYFPSQMLRTGNNFEFSYSFEDVPFHSSYAHSQSLDRLMNPLIDQYLYYLARTQSTTGSTRELQFHQAGPNTMAEQSKNWLPGPCYRQQGLSKNLDFNNNSNFAWTAATKYHLNGRNSLTNPGIPMATNKDDEDQFFPINGVLVFGKTGAANKTTLENVLMTSEEEIKTTNPVATEEYGVVSSNLQPSTAGPQSQTINSQGALPGMVWQNRDVYLQGPIWAKIPHTDGNFHPSPLMGGFGLKHPPPQILIKNTPVPANPPEVFTPAKFASFITQYSTGQVSVEIEWELQKENSKRWNPEIQYTSNYAKSNNVEFAVNPDGVYTEPRPIGTRYLPRNL

SEQ ID NO: 428 - DNA, 3094 bp, Adeno-associated virus
gaattcgcccttgctgcgtcaactggaccaagagaactttcccttcaacgattgcgtcgacaagatggtgatctggtgggaggagggcaagatgacggccaaggtcgtggagtccgccaaagccattctgggcggaagcaaggtgcgcgtcgaccaaaagtgcaagtcctcggcccagatcgatcccacccccgtgatcgtcacctccaacaccaacatgtgcgccgtgatcgacgggaacagcaccaccttcgagcaccagcagccgttgcaggaccggatgttcaaatttgaactcacccgccgtctggaacacgactttggcaaggtgaccaagcaggaagtcaaagagttcttccgctgggctagtgatcacgtgactgaggtgacgcatgagttctacgtcagaaagggcggagccagcaaaagacccgcccccgatgacgcggatataagcgagcccaagcgggcctgtccctcagtcacggacccatcgacgtcagacgcggaaggagctccggtggactttgccgacaggtaccaaaacaaatgttctcgtcacgcgggcatgcttcagatgctgtttccctgcaaaacgtgcgagagaatgaatcagaatttcaacatttgcttcacgcacggggtcagagactgtttagaatgtttccccggcgtgtcagaatctcaaccggtcgtcagaaaaaagacgtatcggaagctgtgtgcgattcatcatctgctggggcgggcacccgagattgcttgctcggcctgcgacctggtcaacgtggacctggacgactgtgtttctgagcaataaatgacttaaaccgggtatggctgccgatggttatcttccagattggctcgaggacaacctctctgagggcattcgcgagtggtgggacctgaaacctggagccccgaaacccaaagccaaccagcaaaagcaggacgacggccggggtctggtgcttcctggctacaagtacctcggacccttcaacggactcgacaagggggagcccgtcaacgcggcggacgcagcggccctcgagcacgacaaggcctacgaccagcagctcaaagcgggtgacaatccgtacctgcggtataaccacgccgacgccgagtttcaggagcgtctgcaagaagatacgtcatttgggggcaacctcgggcgagcagtcttccaggccaagaagcgggttctcgaacctctcggtctggttgaggaaggcgctaagacggctcctggaaagaagagacccatagactctccagactcctccacgggcatcggcaaaaaaggccagcagcccgctaaaaagaagctcaattttggtcagactggcgactcagagtcagtccccgaccctcaacctcttggagaacctccagcagcgccctctagtgtgggatctggtacaatggctgcaggcggtggcgcaccaatggcagacaataacgaaggtgccgacggagtgggtaatgcctcaggaaattggcattgcgattccacatggctgggcgacagagtcatcaccaccagcaccagaacctgggccctccccacctacaacaaccacctctacaagcaaatctccagcagcagctcaggagccaccaatgacaaccactacttcggctacagcaccccctgggggtattttgactttaacagattccactgccacttctcaccacgtgactggcagcgactcatcaacaacaactggggattccggcccaagaagctgcggttcaagctcttcaacatccaggtcaaggaggtcacaacgaatgacggcgtcacgaccatcgctaataaccttaccagcacggttcaggtcttctcggactcggaataccagctgccgtacgtcctcggctctgcgcaccagggctgcctgcctccgttcccggcggacgtcttcatgattcctcagtacggctacctgactctgaacaacggcagccaatcggtgggccgttcctccttctactgcctggaatatttcccctctcaaatgctgagaacgggcaacaactttgagttcagttacagcttcgaggacgtgcctttccacagcagctacgcgcacagccagagcctagaccggctgatgaaccctctcatcgaccagtacctgtactacctggcccggacccagagcaccacgggttccaccagggaactgcaatttcatcaagctgggcccaatactatggccgagcagtcaaagaactggctgcctggaccctgctataggcaacagggactgtcaaagaacttggactttaacaacaacagcaattttgcctggactgctgccactaaatatcatctgaatggcagaaactctttgaccaatcctggcattcccatggcaaccaacaaggatgatgaggaccagttctttcccatcaacggggtactggtttttggcaagacgggagctgccaacaaaactacgctggaaaacgttctgatgaccagcgaggaggagatcaagaccactaaccctgtggctacagaagaatacggtgtggtctccagcaacctgcagccgtctacagccgggcctcaatcacagactatcaacagccagggagcactgcctggcatggtctggcagaaccgggacgtgtatctgcagggtcccatctgggccaaaattcctcacacggatggcaactttcacccgtctcctctgatgggcggttttggactcaaacacccgcctccacagatcctgatcaaaaacacacctgtacctgctaatcctccggaggtgtttactcctgccaagtttgcctccttcatcacgcagtacagcaccggacaagtcagcgtggaaatcgagtgggagctgcagaaagaaaacagcaagcgctggaacccagaaattcagtatacttccaattatgccaagtctaataatgttgaatttgctgtgaaccctgatggtgtttatactgagcctcgccccattggcactcgttacctcccccgtaatctgtaattgcttgttaatcaataaaccggttgattcgtttcagttgaactttggtctctgcgaagggcgaattc

SEQ ID NO: 429 - protein, 1458 aa, Artificial Sequence
  Description of Artificial Sequence: Synthetic polypeptide
MAADGYLPDWLEDNLSEGIREWWDLKPGAPKPKANQQKQDDGRGLVLPGYKYLGPFNGLDKGEPVNAADAAALEHDKAYDQQLKAGDNPYLRYNHADAEFQERLQEDTSFGGNLGRAVFQAKKRVLEPLGLVEEGAKTAPGKKRPIDSPDSSTGIGKKGQQPAKKKLNFGQTGDSESVPDPQPLGEPPAAPSSVGSGTMAAGGGAPTADNNEGADGVGNASGNWHCDSTWLGDRVITTSTRTWALPTYNNHLYKQISSSSSGATNDNHYFGYSTPWGYFDFNRFHCHFSPRDWQRLINNNWGFRPKKLRFKLFNIQVKEVTTNDGVTTIANNLTSTVQVFSDSEYQLPYVLGSAHQGCLPPFPADVFMIPQYGYLTLNNGSQSVGRSSFYCLEYFPSQMLRTGNNFEFSYSFEDVPFHSSYAHSQSLDRLMNPLIDQYLYYLARTQSTTGSTRELQFHQAGPNTMAEQSKNWLPGPCYRQQRLSKNLDFNNNSNFAWTAATKYHLNGRNSLTNPGIPMATNKDDEDQFFPINGVLVFGKTGAANKTTLENVLMTSEEEIKTTNPVATEEYGVVSSNLQSSTAGPQSQTINSQGALPGMVWQNRDVYLQGPIWAKIPHTDGNFHPSPLMGGFGLEHPPPQILIKNTPVPANPPEVFTPAKFASFITQYSTGQVSVEIEWELQKENSKRWNPEIQYTSNYAKSNNVEFAVNPDGVYTEPRPIGTRYLTRNLMAADGYLPDWLEDNLSEGIREWWDLKPGAPKPKANQQKQDDGRGLVLPGYKYLGPFNGLDKGEPVNAADAAALEHDKAYDQQLKAGDNPYLRYNHADAEFQERLQEDTSFGGNLGRAVFQAKKRVLEPLGLVEEGAKTAPGKKRPIGSPDSSTGIGKKGQQPAKKKLNFGQTGDSESVPDPQPLGEPPAAPSSVGSGTMAAGGGAPMADNNEGADGVGNASGNWHCDSTWLGDRVITTSTRTWALPTYNNHLYKQISSSSSGATNDNHYFGYSTPWGYFDFNRFHCHFSPRDWQRLINNNWGFRPKKLRFKLLNIQVKEVTTNDGVTTIANNLTSTVQVFSDSEYQLPYVLGSAHQGCLPPFPADVFMIPQYGYLTLDNGSQSVGRSSFYCLEYFPSQMLRTGNNFEFSYSFEDVPFHSSYAHSQSLDRLMNPLIDQYLYYLARTQSTTGSTRELQFHQAGPNTMAEQSKNWLPGPCYRQQRLSKNLDFNNNSNFAWTAATKYHLNGRNSLTNPGIPMATNKDDEDQFFPINGVLVFGKTGAANKTTLENVLMTSEEEIKTTNPVATEEYGVVSSNLQSSTAGPQSQTINSQGALPGMVWQNRDVYLQGPIWAKIPHTDGNFHPSPLMGGFGLKHPPPQILIKNTPVPANPPEVFTPAKFASFITQYSTGQVSVEIEWELQKENSKRWNPEIQYTSNYAKSNNVEFAVNPDGVYTEPRPIGTRYLTRNL

SEQ ID NO: 430 - DNA, 3095 bp, Adeno-associated virus
gaattcgcccttcgcagagaccaaagttcaactgaaacgaatcaaccggtttattgattaacaagcaattacagattacgggtgaggtaacgagtgccaatggggcgaggctcagtataaacaccatcagggttcacagcaaattcaacattattagacttggcataattggaagtatactgaatttctgggttccagcgcttgctgttttctttctgcagctcccactcgatttccacgctgacttgtccggtgctgtactgcgtgatgaaggaggcaaacttggcaggagtaaacacctccggaggattagcaggtacaggtgtgtttttgatcaggatctgtggaggcgggtgtttgagtccaaaaccgcccatcagaggagacgggtgaaagttgccatccgtgtgaggaattttggcccagatgggaccctgcagatacacgtcccggttctgccagaccatgccaggcagtgctccctggctgttgatagtctgtgattgaggcccggctgtagacgactgcaggttgctggagaccacaccgtattcttctgtagccacagggttagtggtcttgatctcctcctcgctggtcatcagaacgttttccagcgtagttttgttggcagctcccgtcttgccaaaaaccagtaccccgttgatgggaaagaactggtcctcatcatccttgttggttgccatgggaatgccaggattggtcaaagagtttctgccattcagatgatatttagtggcagcagtccaggcaaaattgctgttgttgttaaagtccaagttctttgacagtctctgttgcctatagcagggtccaggcagccagttctttgactgctcggccatagtattgggcccagcttgatgaaattgcagttccctggtggaacccgtggtgctctgggtccgggccaggtagtacaggtactggtcgatgagagggttcatcagccggtctaggctctggctgtgcgcgtagctgctgtggaaaggcacgtcctcgaagctgtaactgaactcaaagttgttgcccgttctcagcatttgagaggggaaatattccaggcagtagaaggaggaacggcccaccgattggctgccgttgtccagagtcaggtagccgtactgaggaatcatgaagacgtccgccgggaacggaggcaggcagccctggtgcgcagagccgaggacgtacggcagctggtattccgagtccgagaagacctgaaccgtgctggtaaggttattagcgatggtcgtgacgccgtcattcgttgtgacctccttgacctggatgttgaggagcttgaaccgcagcttcttgggccggaatccccagttgttgttgatgagtcgctgccagtcacgtggtgagaagtggcagtggaatctgttaaagtcaaaatacccccagggggtgctgtagccgaagtagtggttgtcattggtggctcctgagctgctgctggagatttgcttgtagaggtggttgttgtaggtggggagggcccaggttctggtgctggtggtgatgactctgtcgcccagccatgtggaatcgcaatgccaatttcctgaggcattacccactccgtcggcaccttcgttattgtctgccattggtgcgccaccgcctgcagccattgtaccagatcccacactagagggcgctgctggaggttctccaagaggttgagggtcggggactgactctgagtcgccagtctgaccaaaattgagcttctttttagcgggctgctggccttttttgccgatgcccgtggaggagtctggagagcctatgggtctcttctttccaggagccgtcttagcgccttcctcaaccagaccgagaggttcgagaacccgcttcttggcctggaagactgctcgcccgaggttgcccccaaatgacgtatcttcttgcagacgctcctgaaactcggcgtcggcgtggttataccgcaggtacggattgtcacccgctttgagctgctggtcgtaggccttgtcgtgctcgagggccgctgcgtccgccgcgttgacgggctcccccttgtcgagtccgttgaagggtccgaggtacttgtagccaggaagcaccagaccccggccgtcgtcctgcttttgctggttggctttgggtttcggggctccaggtttcaggtcccaccactcgcgaatgccctcagagaggttgtcctcgagccaatctggaagataaccatcggcagccatacctggtttaagtcatttattgctcagaaacacagtcgtccaggtccacgttgaccaggtcgcaggccgagcaagcaatctcgggtgcccgccccagcagatgatgaatcgcacacagcttccgatacgtcttttttctgacgaccggttgagattctgacacgccggggaaacattctaaacagtctctgaccccgtgcgtgaagcaaatgttgaaattctgattcattctctcgcacgttttgcagggaaacagcacctgaagcatgcccgcgtgacgagaacatttgttttggtacctgtcggcaaagtccaccggagctccttccgcgtctgacgtcgatgggtccgtgactgagggacgggcccgcttgggctcgcttatatccgcgtcatcgggggcgggtcttttgctggctccgccctttctgacgtagaactcatgcgtcacctcagtcacgtgatcactagcccagcggaagaactctttgacttcctgctttgtcaccttgccaaagtcgtgttccagacggcgggtgagttcaaatttgaacatccggtcctgcaacggttgctggtgctcgaaggtggtgctgttcccgtcgatcacggcgcacatgttggtgttggaggtgacgatcacgggggtgggatcgatctgggcggacgacttgcacttttggtccacgcgcaccttgctgccgccgagaatggccttggcggactccacgaccttggccgtcatcttgccctcctcccaccagatcaccatcttgtcgacgcaatcgttgaagggaaagttctcattggtccagttgacgcagcaagggcgaattc

SEQ ID NO: 431 - DNA, 3095 bp, Adeno-associated virus
gaattcgcccttcgcagagaccaaagttcaactgaaacgaatcaaccggtttattgattaacaagcaattacagattacgggtgaggtaacgagtgccaatggggcgaggctcagtataaacaccatcagggttcacagcaaattcaacattattagacttggcataattggaagtatactgaatttctgggttccagcgcttgctgttttctttctgcagctcccactcgatttccacgctgacttgtccggtgctgtactgcgtgatgaaggaggcaaacttggcaggagtaaacacctccggaggattagcaggtacaggtgtgtttttgatcaggatctgtggaggcgggtgttcgagtccaaaaccgcccatcagaggagacgggtgaaagttgccatccgtgtgaggaattttggcccagatgggaccctgcagatacacgtcccggttctgccagaccatgccaggcagtgctccctggctgttgatagtctgtgattgaggcccggctgtagacgactgcaggttgctggagaccacaccgtattcttctgtagccacagggttagtggtcttgatctcctcctcgctggtcatcagaacgttttccagcgtagttttgttggcagctcccgtcttgccaaaaaccagtaccccgttgatgggaaagaactggtcctcatcatccttgttggttgccatgggaatgccaggattggtcaaagagtttctgccattcagatgatatttagtggcagcagtccaggcaaaattgctgttgttgttaaagtccaagttctttgacagtctctgttgcctatagcagggtccaggcagccagttctttgactgctcggccatagtattgggcccagcttgatgaaattgcagttccctggtggaacccgtggtgctctgggtccgggccaggtagtacaggtactggtcgatgagagggttcatcagccggtctaggctctggctgtgcgcgtagctgctgtggaaaggcacgtcctcgaagctgtaactgaactcaaagttgttgcccgttctcagcatttgagaggggaaatattccaggcagtagaaggaggaacggcccaccgattggctgccgttgttcagagtcaggtagccgtactgaggaatcatgaagacgtccgccgggaacggaggcaggcagccctggtgcgcagagccgaggacgtacggcagctggtattccgagtccgagaagacctgaaccgtgctggtaaggttattagcgatggtcgtgacgccgtcattcgttgtgacctccttgacctggatgttgaagagcttgaaccgcagcttcttgggccggaatccccagttgttgttgatgagtcgctgccagtcacgtggtgagaagtggcagtggaatctgttaaagtcaaaatacccccagggggtgctgtagccgaagtagtggttgtcattggtggctcctgagctgctgctggagatttgcttgtagaggtggttgttgtaggtggggagggcccaggttctggtgctggtggtgatgactctgtcgcccagccatgtggaatcgcaatgccaatttcctgaggcattacccactccgtcggcaccttcgttattgtctgccgttggtgcgccaccgcctgcagccattgtaccagatcccacactagagggcgctgctggaggttctccaagaggttgagggtcggggactgactctgagtcgccagtctgaccaaaattgagcttctttttagcgggctgctggccttttttgccgatgcccgtggaggagtctggagagtctatgggtctcttctttccaggagccgtcttagcgccttcctcaaccagaccgagaggttcgagaacccgcttcttggcctggaagactgctcgcccgaggttgcccccaaatgacgtatcttcttgcaggcgctcctgaaactcggcgtcggcgtggttataccgcaggtacggattgtcacccgctttgagctgctggtcgtaggccttgtcgtgctcgagggccgctgcgtccgccgcgttgacgggctcccccttgtcgagtccgttgaagggtccgaggtacttgtagccaggaagcaccagaccccggccgtcgtcctgcttttgctggttggctttgggtttcggggctccaggtttcaggtcccaccactcgcgaatgccctcagagaggttgtcctcgagccaatctggaagataaccatcggcagccatacctggtttaagccatttattgctcagaaacacagtcgtccaggtccacgttgaccaggtcgcaggccgagcaggcaatctcgggtgcccgccccagcagatgatgaatcgcacacagcttccgatacgtcttttttctgacgaccggttgagattctgacacgccggggaaacattctaaacagtctctgaccccgtgcgtgaagcaaatgttgaaattctgattcattctctcgcacgttttgcagggaaacagcatctgaagcatgcccgcgtggcgagaacatttgttttggtacctgtcggcaaagtccaccggagctccttccgcgtctgacgtcgatgggtccgtgactgagggacaggcccgcttgggctcgcttatatccgcgtcatcgggggcgggtcttttgctggctccgccctttctgacgtagaactcatgcgtcacctcagtcacgtgatcactagcccagcggaagaactctttgacttcctgctttgtcaccttgccaaagtcgtgttccagacggcgggtgagttcaaatttgaacatccggtcctgcaacggctgctggtgctcgaaggtggtgctgttcccgtcgatcacggcgcgcatgttggtgttggaggtgacgatcacgggggtgggatcgatctgggcggacgacttgcacttttggtccacgcgcaccttgctgccgccgagaatggccttggcggactccacgaccttggccgtcatcttgccctcctcccaccagatcaccatcttgtcgacgcaatcgttgaagggaaagttctcattggtccagttgacgcagcaagggcgaattc

SEQ ID NO: 432 - protein, 729 aa, Adeno-associated virus; identical to SEQ ID NO: 160

SEQ ID NO: 433 - protein, 729 aa, Adeno-associated virus
MAADGYLPDWLEDNLSEGIREWWDLKPGAPKPKANQQKQDDGRGLVLPGYKYLGPFNGLDKGEPVNAADAAALEHDKAYDQQLKAGDNPYLRYNHADAEFQERLQEDTSFGGNLGRAVFQAKKRVLEPLGLVEEGAKTAPGKKRPIDSPDSSTGIGKKGQQPAKKKLNFGQTGDSESVPDPQPLGEPPAAPSSVGSGTMAAGGGAPTADNNEGADGVGNASGNWHCDSTWLGDRVITTSTRTWALPTYNNHLYKQISSSSSGATNDNHYFGYSTPWGYFDFNRFHCHFSPRDWQRLINNNWGFRPKKLRFKLFNIQVKEVTTNDGVTTIANNLTSTVQVFSDSEYQLPYVLGSAHQGCLPPFPADVFMIPQYGYLTLNNGSQSVGRSSFYCLEYFPSQMLRTGNNFEFSYSFEDVPFHSSYAHSQSLDRLMNPLIDQYLYYLARTQSTTGSTRELQFHQAGPNTMAEQSKNWLPGPCYRQQRLSKNLDFNNNSNFAWTAATKYHLNGRNSLTNPGIPMATNKDDEDQFFPINGVLVFGKTGAANKTTLENVLMTSEEEIKTTNPVATEEYGVVSSNLQSSTAGPQSQTINSQGALPGMVWQNRDVYLQGPIWAKIPHTDGNFHPSPLMGGFGLKHPPPQILIKNTPVPANPPEVFTPAKFASFITQYSTGQVSVEIEWELQKENSKRWNPEIQYTSNYAKSNNVEFAVNPDGVYTEPRPIGTRYLTRNL

SEQ ID NO: 434 - protein, 729 aa, Adeno-associated virus
MAADGYLPDWLEDNLSEGIREWWDLKPGAPKPKANQQKQDDGRGLVLPGYKYLGPFNGLDKGEPVNAADAAALEHDKAYDQQLKAGDNPYLRYNHADAEFQERLQEDTSFGGNLGRAVFQAKKRVLEPLGLVEEGAKTAPGKKRPIDSPDSSTGIGKKGQQPAKKKLNFGQTGDSESVPDPQPLGEPPAAPSSVGSGTMAAGGGAPMADNNEGADGVGNASGNWHCDSTWLGDRVITTSTRTWALPTYNNHLYKQISSSSSGATNDNHYFGYSTPWGYFDFNRFHCHFSPRDWQRLINNNWGFRPKKLRFKLFNIQVKEVTTNDGVTTIANNLTSTVQVFSDSEYQLPYVLGSAHQGCLPPFPADVFMIPQYGYLTLNNGSQSVGRSSFYCLEYFPSQMLRTGNNFEFSYSFEDVPFHSSYAHSQSLDRLMNPLIDQYLYYLARTQSTTGSTRELQFHQAGPNTMAEQSKNWLPGPCYRQQRLSKNLDFNNNSNFAWTAATKYHLNGRNSLTNPGIPMATNKDDEDQFFPINGVLVFGKTGAANKTTLENVLMTSEEEIKTTNPVATEEYGVVSSNLQSSTAGPQSQTINSQGALPGMVWQNRDVYLQGPIWAKIPHTDGNFHPSPLMGGFGLKHPPPQILIKNTPVPANPPEVFTPAKFASFITQYSTGQVSVEIEWELQKENSKRWNPEIQYTSNYAKSNNVEFAVNPDGVYTEPRPIGTRYLTRNL

SEQ ID NO: 435 - DNA, 2217 bp, Adeno-associated virus
atggctgctgacggttatcttccagattggctcgaggacaacctctctgagggcattcgcgagtggtgggacctgaaacctggagcccccaagcccaaggccaaccagcagaagcaggacgacggccggggtctggtgcttcctggctacaagtacctcggacccttcaacggactcgacaagggggagcccgtcaacgcggcggacgcagcggccctcgagcacgacaaggcctacgaccagcagctcaaagcgggtgacaatccgtacctgcggtataaccacgccgacgccgagtttcaggagcgtctacaagaagatacgtcttttgggggcaacctcgggcgagcagtcttccaggccaagaagcgggttctcgaacctctcggtctggttgaggaagctgctaagacggctcctggaaagaagagaccggtagaaccgtcacctcagcgttcccccgactcctccacgggcatcggcaagaaaggccagcggcccgctaaaaagagactgaactttggtcagactggcgactcagagtcagtccccgaccctcaaccaatcggagaaccaccagcaggcccctctggtctgggatctggtacaatggctgcaggcggtggcgctccaatggcagacaataacgaaggcgccgacggagtgggtagttcctcaggaaattggcattgcgattccacatggctgggcgacagagtcatcaccaccagcacccgaacctgggccctgcccacctacaacaaccacctctacaagcaaatatccaatgggacatcgggaggaagcaccaacgacaacacctacttcggctacagcaccccctgggggtattttgacttcaacagattccactgccacttctcaccacgtgactggcagcgactcatcaacaacaactggggattccggccaaaaagactcagcttcaagcccttcaacatccaggtcaaggaggtcacgcagaatgaaggcaccaagaccatcgccaataaccttaccagcacgattcaggtatttacggactcggaataccagctgccgtacgtcctcggctccgcgcaccagggctgcctgcctccgttcccggcggacgtcttcatgattccccagtacggctaccttacactgaacaatggaagtcaagccgtaggccgttcctccttctactgcctggaatattttccatctcaaatgctgcgaactggaaacaattttgaattcagctacaccttcgaggacgtgcctttccacagcagctacgcacacagccagagcttggaccgactgatgaatcctctcatcgaccagtacctgcactacttatccagaactcagtccacaggaggaactcaaggtacccagcaattgttattttctcaagctgggcctgcaaacatgtcggctcaggctaagaactggctacctggaccttgctaccggcagcagcgagtctctacgacactgtcgcaaaacaacaacagcaactttgcttggactggtgccaccaaatatcacctgaacggaagagactctttggtaaatcccggtgtcgccatggcaacccacaaggacgacgaggaacgcttcttcccgtcgagtggagtcctgatgtttggaaaacagggtgctggaagagacaatgtggactacagcagcgttatgctaaccagcgaagaagaaattaaaaccactaaccctgtagccacagaacaatacggtgtggtggctgacaacttgcagcaaaccaatacagggcctattgtgggaaatgtcaacagccaaggagccttacctggcatggtctggcagaaccgagacgtgtacctgcagggtcccatctgggccaagattcctcacacggacggcaacttccacccttcaccgctaatgggaggatttggactgaagcacccacctcctcagatcctgatcaagaacacgccggtacctgcggatcctccaacaacgttcagccaggcgaaattggcttccttcattacgcagtacagcaccggacaggtcagcgtggaaatcgagtgggagctgcagaaggagaacagcaaacgctggaacccagagattcagtacacttcaaactactacaaatctacaaatgtggactttgctgtcaatacagagggaacttattctgagcctcgccccattggtactcgctacctcacccgtaatctgtaa

SEQ ID NO: 436 - protein, 738 aa, Adeno-associated virus
MAADGYLPDWLEDNLSEGIREWWDLKPGAPKPKANQQKQDDGRGLVLPGYKYLGPFNGLDKGEPVNAADAAALEHDKAYDQQLKAGDNPYLRYNHADAEFQERLQEDTSFGGNLGRAVFQAKKRVLEPLGLVEEAAKTAPGKKRPVEPSPQRSPDSSTGIGKKGQRPAKKRLNFGQTGDSESVPDPQPIGEPPAGPSGLGSGTMAAGGGAPMADNNEGADGVGSSSGNWHCDSTWLGDRVITTSTRTWALPTYNNHLYKQISNGTSGGSTNDNTYFGYSTPWGYFDFNRFHCHFSPRDWQRLINNNWGFRPKRLSFKPFNIQVKEVTQNEGTKTIANNLTSTIQVFTDSEYQLPYVLGSAHQGCLPPFPADVFMIPQYGYLTLNNGSQAVGRSSFYCLEYFPSQMLRTGNNFEFSYTFEDVPFHSSYAHSQSLDRLMNPLIDQYLHYLSRTQSTGGTQGTQQLLFSQAGPANMSAQAKNWLPGPCYRQQRVSTTLSQNNNSNFAWTGATKYHLNGRDSLVNPGVAMATHKDDEERFFPSSGVLMFGKQGAGRDNVDYSSVMLTSEEEIKTTNPVATEQYGVVADNLQQTNTGPIVGNVNSQGALPGMVWQNRDVYLQGPIWAKIPHTDGNFHPSPLMGGFGLKHPPPQILIKNTPVPADPPTTFSQAKLASFITQYSTGQVSVEIEWELQKENSKRWNPEIQYTSNYYKSTNVDFAVNTEGTYSEPRPIGTRYLTRNL

SEQ ID NO: 437 - DNA, 2217 bp, Adeno-associated virus
atggctgctgacggttatcttccagattggctcgaggacaacctctctgagggcattcgcgagtggtgggacctgaaacctggagcccccaagcccaaggccaaccagcagaagcaggacgacggccggggtctggtgcttcctggctacaagtacctcggacccttcaacggactcgacaagggggagcccgtcaacgcggcggacgcagcggccctcgagcacgacaaggcctacgaccagcagctcaaagcgggtgacaatccgtacctgcggtataaccacgccgacgccgagtttcaggagcgtctgcaagaagatacgtcttttgggggcaacctcgggcgagcagtcttccaggccaagaagcgggttctcgaacctctcggtctggttgaggaagctgctaagacggctcctggaaagaagagaccggtagaaccgtcacctcagcgttcccccgactcctccacgggcatcggcaagaaaggccagcagcccgctaaaaagagactgaactttggtcagactggcgactcagagtcagtccccgaccctcaaccaatcggagaaccaccagcaggcccctctggtctgggatctggtacaatggctgcaggcggtggcgctccaatggcagacaataacgaaggcgccgacggagtgggtagttcctcaggaaattggcattgcgattccacatggctgggcgacagagtcatcaccaccagcacccgaacctgggccctgcccacctacaacaaccacctctacaagcaaatatccaatgggacatcgggaggaagcaccaacgacaacacctacttcggctacagcaccccctgggggtattttgacttcaacagattccactgccacttctcaccacgtgactggcagcgactcatcaacaacaactggggattccggccaaaaagactcagcttcaagctcttcaacatccaggtcaaggaggtcacgcagaatgaaggcaccaagaccatcgccaataaccttaccagcacgattcaggtatttacggactcggaataccagctgccgtacgtcctcggctccgcgcaccagggctgcctgcctccgttcccggcggacgtcttcatgattccccagtacggctaccttacactgaacaatggaagtcaagccgtaggccgttcctccttctactgcctggaatattttccatctcaaatgctgcgaactggaaacaattttgaattcagctacaccttcgaggacgtgcctttccacagcagctacgcacacagccagagcttggaccgactgatgaatcctctcatcgaccagtacctgtactacttatccagaactcagtccacaggaggaactcaaggtacccagcaattgttattttctcaagctgggcctgcaaacatgtcggctcaggctaagaactggctacctggaccttgctaccggcagcagcgagtctctacgacactgtcgcaaaacaacaacagcaactttgcttggactggtgccaccaaatatcacctgaacggaagagactctttggtaaatcccggtgtcgccatggcaacccacaaggacgacgaggaacgcttcttcccgtcgagtggagtcctgatgtttggaaaacagggtgctggaagagacaatgtggactacagcagcgttatgctaaccagcgaagaagaaattaaaaccactaaccctgtagccacagaacaatacggtgtggtggctgataacttgcagcaaaccaatacggggcctattgtgggaaatgtcaacagccaaggagccttacctggcatggtctggcagaaccgagacgtgtacctgcagggtcccatctgggccaagattcctcacacggacggcaacttccacccttcaccgctaatgggaggatttggactgaagcacccacctcctcagatcctgatcaagaacacgccggtacctgcggatcctccaacaacgttcagccaggcgaaattggcttccttcattacgcagtacagcaccggacaggtcagcgtggaaatcgagtgggagctgcagaaggagaacagcaaacgctggaacccagagattcagtacacttcaaactactacaaatctacaaatgtggactttgctgtcaatacagagggaacttattctgagcctcgccccattggtactcgttacctcacccgtaatctgtaa

SEQ ID NO: 438 - protein, 738 aa, Adeno-associated virus; identical to SEQ ID NO: 90

SEQ ID NO: 439 - protein, 738 aa, Adeno-associated virus
MAADGYLPDWLEDNLSEGIREWWDLKPGAPKPKANQQKQDDGRGLVLPGYKYLGPFNGLDKGEPVNAADAAALEHDKAYDQQLKAGDNPYLRYNHADAEFQERLQEDTSFGGNLGRAVFQAKKRVLEPLGLVEEAAKTAPGKKRPVEPSPQRSPDSSTGIGKKGQQPAKKRLNFGQTGDSESVPDPQPIGEPPAGPSGLGSGTMAAGGGAPMADNNEGADGVGSSSGNWHCDSTWLGDRVITTSTRTWALPTYNNHLYKQISNGTSGGSTNDNTYFGYSTPWGYFDFNRFHCHFSPRDWQRLINNNWGFRPKRLSFKLFNIQVKEVTQDEGTKTIANNLTSTIQVFTDSEYQLPYVLGSAHQGCLPPFPADVFMIPQYGYLTLNNGSQAVGRSSFYCLEYFPSQMLRTGNNFEFSYTFEDVPFHSSYAHSQSLDRLMNPLIDQYLYYLSRTQSTGGTQGTQQLLFSQAGPANMSARAKNWLPGPCYRQQRVSTTLSQNNNSNFAWTGATKYHLNGRDSLVNPGVAMATHKDDEERFFPSSGVLMFGKQGAGRDNVDYSSVMLTSEEEIKTTNPVATEQYGVVADNLQQANTGPIVGNVNSQGALPGMVWQNRDVYLQGPIWAKIPHTDGNFHPSPLMGGFGLKHPPPQILIKNTPVPADPPTTFSQAKLASFITQYSTGQVSVEIEWELQKENSKRWNPEIQYTSNYYKSTNVDFAVNSEGTYSEPRPIGTRYLTRNL

SEQ ID NO: 440 - DNA, 2217 bp, Adeno-associated virus
atggctgctgacggttatcttccagattggctcgaggacaacctctctgagggcattcgcgagtggtgggacctgaaacctggagcccccaagcccaaggccaaccagcagaagcaggacgacggccggggtctggtgcttcctggctacaagtacctcggacccttcaacggactcgacaagggggagcccgtcaacgcggcggacgcagcggccctcgagcacgacaaggcctacgaccagcagctcaaagcgggtgacaatccgtacctgcggtataaccacgccgacgccgagtttcaggagcgtctgcaagaagatacgtcttttgggggcaacctcgggcgagcagtcttccaggccaagaagcgggttctcgaacctctcggtctggttgaggaagctgctaagacggctcctggaaagaagagaccggtagaaccgtcacctcagcgttcccccgactcctccacgggcatcggcaagaaaggccagcagcccgctaaaaagagactgaactttggtcagactggcgactcagagtcagtccccgaccctcaaccaatcggagaaccaccagcaggcccctctggtctgggatctggtacaatggctgcaggcggtggcgctccaatggcagacaataacgaaggcgccgacggagtgggtagttcctcaggaaattggcattgcgattccacatggctgggcgacagagtcatcaccaccagcacccgaacctgggccctgcccacctacaacaaccacctctacaagcaaatatccaatgggacatcgggaggaagcaccaacgacaacacctacttcggctacagcaccccctgggggtattttgacttcaacagattccactgccacttctcaccacgtgactggcagcgactcatcaacaacaactggggattccggccaaaaagactcagcttcaagctcttcaacatccaggtcaaggaggtcacgcaggatgaaggcaccaagaccatcgccaataaccttaccagcacgattcaggtatttacggactcggaataccagctgccgtacgtcctcggctccgcgcaccagggctgcctgcctccgttcccggcggacgtcttcatgattccccagtacggctaccttacactgaacaatggaagtcaagccgtaggccgttcctccttctactgcctggaatattttccatctcaaatgctgcgaactggaaacaattttgaattcagctacaccttcgaggacgtgcctttccacagcagctacgcacacagccagagcttggaccgactgatgaatcctctcatcgaccagtacctgtactacttatccagaactcagtccacaggaggaactcaaggtacccagcaattgttattttctcaagctgggcctgcaaacatgtcggctcgggctaagaactggctacctggaccttgctaccggcagcagcgagtctctacgacactgtcgcaaaacaacaacagcaactttgcttggactggtgccaccaaatatcacctgaacggaagagactctttggtaaatcccggtgttgctatggcaacgcataaggacgacgaggaacgtttctttccatcgagcggagtcctgatgtttggaaaacagggtgctggaagagacaatgtggactatagcagcgttatgctaaccagcgaggaagaaattaaaaccactaaccctgtagccacagaacaatacggtgtggtggctgacaacttgcagcaagccaatacagggcctattgtgggaaatgtcaacagccaaggagccttacctggcatggtctggcagaaccgagacgtgtacctgcagggtcccatctgggccaaaattcctcacacggacggcaattttcacccgtctcctctgatgggcggctttggactgaagcacccacctccccagatcctgatcaagaatacgccggtacctgcggatcctccaacgacgttcagccaggcaaaattggcttccttcatcacgcagtacagcaccggccaggtcagcgtggagatcgagtgggagctgcagaaggagaacagcaagcgatggaacccagaaattcagtacacttccaactactacaaatctacaaatgtggactttgctgtcaattctgagggtacatattcagagcctcgccccattggtactcgttatctgacacgtaatctgtaa

SEQ ID NO: 441 - DNA, 2211 bp, Adeno-associated virus
atggctgccgatggttatcttccagattggctcgaggacaacctctctgagggcattcgcgagtggtgggacttgaaacctggagccccgaaacccaaagccaaccagcaaaagcaggacgacggccggggcctggtgcttcctggctacaagtacctcggacccttcaacggactcgacaagggggagcccgtcaacgcggcggacgcagcggccctcgagcacgacaaggcctacgaccagcagctcgaagcgggtgacaatccgtacctgcggtataaccacgccgacgccgagtttcaggagcgtctgcaagaagatacgtcttttgggggcaacctcgggcgagcagtcttccaggccaagaagcgggttctcgaacctctcggtctggttgaggaaggcgctaagacggctcctggaaagaagagaccagtagagcagtcaccccaagaaccagactcctcctcgggcatcggcaagaaaggccaacagcccgccagaaaaagactcaattttggccagactggcgactcagagtcagttccagaccctcaacctctcggagaacctccagcagcgccctctggtgtgggacctaatacaatggctgcaggcggtggcgcaccaatggcagacaataacgaaggcgccgacggagtgggtagttcctcgggaaattggcattgcgattccacatggctgggcgacagagtcatcaccaccagcacccgaacctgggccctgcccacctacaacaaccacctctacaagcaaatctccaacgggacatcgggaggagccaccaacgacaacacctacttcggctacagcaccccctgggggtattttgactttaacagattccactgccacttttcaccacgtgactggcagcgactcatcaacaacaactggggattccggcccaagagactcagcttcaagctcttcaacatccaggtcaaggaggtcacgcagaatgaaggcaccaagaccatcgccaataacctcaccagcaccatccaggtgtttacggactcggagtaccagctgccgtacgttctcggctctgcccaccagggctgcctgcctccgttcccggcggacgtgttcatgattccccagtacggctacctaacactcaacaacggtagtcaggccgtgggacgctcctccttctactgcctggaatactttccttcgcagatgctgagaaccggcaacaacttccagtttacttacaccttcgaggacgtgcctttccacagcagctacgcccacagccagagcttggaccggctgatgaatcctctgattgaccagtacctgtactacttgtctcggactcaaacaacaggaggcacggcaaatacgcagactctgggcttcagccaaggtgggcctaatacaatggccaatcaggcaaagaactggctgccaggaccctgttaccgccaacaacgcgtctcaacgacaaccgggcaaaacaacaatagcaactttgcctggactgctgggaccaaataccatctgaatggaagaaattcattggctaatcctggcatcgctatggcaacacacaaagacgacgaggagcgttttttcccagtaacgggatcctgtttttggcaacaaaatgctgccagagacaatgcggattacagcgatgtcatgctcaccagcgaggaagaaatcaaaaccactaaccctgtggctacagaggaatacggtatcgtggcagataacttgcagcagcaaaacacggctcctcaaattggaactgtcaacagccagggggccttacccggtatggtctggcagaaccgggacgtgtacctgcagggtcccatctgggccaagattcctcacacggacggcaacttccacccgtctccgctgatgggcggctttggcctgaaacatcctccgcctcagatcctgatcaagaacacgcctgtacctgcggatcctccgaccaccttcaaccagtcaaagctgaactctttcatcacgcaatacagcaccggacaggtcagcgtggaaattgaatgggagctacagaaggaaaacagcaagcgctggaaccccgagatccagtacacctccaactactacaaatctacaagtgtggactttgctgttaatacagaaggcgtgtactctgaaccccgccccattggcacccgttacctcacccgtaatctgtaa

SEQ ID NO: 442 - protein, 736 aa, Adeno-associated virus
MAADGYLPDWLEDNLSEGIREWWDLKPGAPKPKANQQKQDDGRGLVLPGYKYLGPFNGLDKGEPVNAADAAALEHDKAYDQQLEAGDNPYLRYNHADAEFQERLQEDTSFGGNLGRAVFQAKKRVLEPLGLVEEGAKTAPGKKRPVEQSPQEPDSSSGIGKKGQQPARKRLNFGQTGDSESVPDPQPLGEPPAAPSGVGPNTMAAGGGAPMADNNEGADGVGSSSGNWHCDSTWLGDRVITTSTRTWALPTYNNHLYKQISNGTSGGATNDNTYFGYSTPWGYFDFNRFHCHFSPRDWQRLINNNWGFRPKRLSFKLFNIQVKEVTQNEGTKTIANNLTSTIQVFTDSEYQLPYVLGSAHQGCLPPFPADVFMIPQYGYLTLNNGSQAVGRSSFYCLEYFPSQMLRTGNNFQFTYTFEDVPFHSSYAHSQSLDRLMNPLIDQYLYYLSRTQTTGGTANTQTLGFSQGGPNTMANQAKNWLPGPCYRQQRVSTTTGQNNNSNFAWTAGTKYHLNGRNSLANPGIAMATHKDDEERFFPVTGSCFWQQNAARDNADYSDVMLTSEEEIKTTNPVATEEYGIVADNLQQQNTAPQIGTVNSQGALPGMVWQNRDVYLQGPIWAKIPHTDGNFHPSPLMGGFGLKHPPPQILIKNTPVPADPPTTFNQSKLNSFITQYSTGQVSVEIEWELQKENSKRWNPEIQYTSNYYKSTSVDFAVNTEGVYSEPRPIGTRYLTRNL

SEQ ID NO: 443 - DNA, 2214 bp, Adeno-associated virus
atggctgctgacggttatcttccagattggctcgaggacaacctctctgagggcattcgcgagtggtgggacctgaaacctggagcccccaagcccaaggccaaccagcagaagcaggacgacggccggggtctggtgcttcctggctacaagtacctcggacccttcaacggactcgacaagggggagcccgtcagcgcggcggacgcagcggccctcgagcacgacaaggcctgcgaccagcggctcaaagcgggtgacaatccgtacctgcggtataaccacgccgacgccgagtttcaggagcgtctgcaagaagatacgtcttttgggggcaacctcgggcgagcagtcttccaggccaagaagcgggttctcgaacctctcggtctggttgaggaagctgctaagacggctcctggaaagaagggaccggtagaaccgtcacctcagcgttcccccgactcctccacgggcatcggcaagaaaggccagcagcccgctagaaagagactgaactttgggcagactggcgactcagagtcagtccccgaccctcaaccaatcggagaaccaccagcaggcccctctggtctgggatctggtacaatggctgcaggcggtggcgcaccaatggctgacaataacgagggcgccgacggagtgggtaatgcctcaggaaattggcattgcgattccacatggctgggcgacagagtcatcaccaccagcacccgaacctgggctttgcccacctacaacaatcacctctacaagcaaatctccagtcagtcagcaggtagcaccaacgacaacgtctacttcggctacagcaccccctgggggtattttgacttcaacagattccactgtcacttctcaccacgtgactggcagcggctcatcaacaacaactggggattccggcccaagaagctcaacttcaagctgttcaacatccaggtcaaggaggtcacaacgaatgacggcgtcacgaccatcgccaataaccttaccagcacggttcaggtcttttcggactcggaataccagctgccctacgtcctcggctccgcacaccagggctgcctgcctccgttcccggcggacgtcttcatgattccccagtacggctacctgactctgaacaatggcagccaatcggtgggtcgttcctctttctactgcctggaatatttcccttctcaaatgctgagaacgggcaacaacttcaccttcagctacaccttcgaggacgttcccttccacagcagctacgcacacagccagagcctggaccggctgatgaatcctcttatcgaccagtacctgtattacctggccagaacacagagcaacgcaggaggcacagctggcaatcgggaactgcagttttatcagggcgggcctaccaccatggccgaacaagccaaaaactggctgcctggaccttgcttccggcaacaaagagtctccaagacgctggatcaaaacaacaacagcaactttgcttggactggtgccaccaaataccatctaaatggaagaaattcattggttaatcccggtgtcgccatggcaacccacaaggacgacgaggaacgcttcttcccttcgagcggagtcctgatttttggaaaaactggagcagctaataagactacactggaaaatgtgttaatgacaaatgaagaggaaattcgtcctaccaacccggtagccaccgaggaatacgggactgttagcagcaacctgcaggcggctaacactgcagcccagacacaagttgtcaacaaccagggagccttacctggtatggtctggcagaaccgggacgtgtacctgcagggtcccatctgggccaagattcctcacacggacggcaactttcacccgtctccgctgatgggcggctttggactgaagcatccgcctcctcagatcctgatcaaaaacactcctgttcctgctaatcccccggaggtgtttacgcctgccaagtttgcttctttcatcacacagtacagcaccggccaggtcagcgtggagatcgagtgggagctgcagaaggagaacagcaagcgctggaacccagagattcagtatacctccaattttgacgaacagactggtgtggactttgccgttgacagccagggtgtttattctgagcctcgccccattggtactcgttacctcacccgtaatctgtaa

SEQ ID NO: 444 - protein, 737 aa, Adeno-associated virus
MAADGYLPDWLEDNLSEGIREWWDLKPGAPKPKANQQKQDDGRGLVLPGYKYLGPFNGLDKGEPVSAADAAALEHDKACDQRLKAGDNPYLRYNHADAEFQERLQEDTSFGGNLGRAVFQAKKRVLEPLGLVEEAAKTAPGKKGPVEPSPQRSPDSSTGIGKKGQQPARKRLNFGQTGDSESVPDPQPIGEPPAGPSGLGSGTMAAGGGAPMADNNEGADGVGNASGNWHCDSTWLGDRVITTSTRTWALPTYNNHLYKQISSQSAGSTNDNVYFGYSTPWGYFDFNRFHCHFSPRDWQRLINNNWGFRPKKLNFKLFNIQVKEVTTNDGVTTIANNLTSTVQVFSDSEYQLPYVLGSAHQGCLPPFPADVFMIPQYGYLTLNNGSQSVGRSSFYCLEYFPSQMLRTGNNFTFSYTFEDVPFHSSYAHSQSLDRLMNPLIDQYLYYLARTQSNAGGTAGNRELQFYQGGPTTMAEQAKNWLPGPCFRQQRVSKTLDQNNNSNFAWTGATKYHLNGRNSLVNPGVAMATHKDDEERFFPSSGVLIFGKTGAANKTTLENVLMTNEEEIRPTNPVATEEYGTVSSNLQAANTAAQTQVVNNQGALPGMVWQNRDVYLQGPIWAKIPHTDGNFHPSPLMGGFGLKHPPPQILIKNTPVPANPPEVFTPAKFASFITQYSTGQVSVEIEWELQKENSKRWNPEIQYTSNFDEQTGVDFAVDSQGVYSEPRPIGTRYLTRNL

SEQ ID NO: 445 - DNA, 2214 bp, Adeno-associated virus
atggctgccgatggttatcttccagattggctcgaggacaacctctctgagggcattcgcgagtggtgggacctgaaacctggagccccgaaacccaaagccaaccagcaaaagcaggacgacggccggggtctggtgcttcctggctacaagtacctcggacccttcaacggactcgacaagggggagcccgtcaacgcggcggacgcagcggccctcgagcacgacaaggcctacgaccagcagctcaaagcgggtgacaatccgtacctgcggtataaccacgccgacgccgagtttcaggagcgtctgcaagaagatacgtcttttgggggcaacctcgggcgagcagtcttccaggccaagaagcgggttctcgaacctctcggtctggttgaggaagctgctaagacggctcctggaaagaagagaccggtagaaccgtcacctcagcgttcccccgactcctccacgggcatcggcaagaaaggccagcagcccgctagaaagagactgaactttgggcagactggcgactcagagtcagtccccgaccctcaaccaatcggagaaccaccagcaggcccctctggtctgggatctggtacaatggctgcaggcggtggcgctccaatggcagacaataacgaaggcgccgacggagtgggtaatgcctcaggaaattggcattgcgattccacatggctgggcgacagagtcatcaccaccagcacccgaacctgggctttgcccacctacaacaaccacctctacaagcaaatctccagtcagtcagcaggtagcaccaacgacaacgtctacttcggctacagcaccccctgggggtattttgacttcaacagattccactgtcacttctcaccacgtgactggcagcggctcatcaacaacaactggggattccggcccaagaagctcaacttcaagctgttcaacatccaggtcaaggaggtcacaacgaatgacggcgtcacgaccatcgccaataaccttaccagcacggttcaggtcttttcggactcggaataccagctgccctacgtcctcggctccgcacaccagggctgcctgcctccgttcccggcggacgtcttcatgattcctcagtacggctacctgactctcaacaacggtagtcaggccgtgggacgttcctccttctactgcctggagtacttcccctctcagatgctgagaacgggcaacaacttttccttcagctacactttcgaggacgtgcctttccacagcagctacgcgcacagccagagtttggacaggctgatgaatcctctcatcgaccagtacctgtactacctgtcaagaacccagtctacgggaggcacagcgggaacccagcagttgctgttttctcaggccgggcctagcaacatgtcgactcaggccagaaactggctgcctggaccctgctacagacagcagcgcgtctccacgacactgtcgcaaaacaacaacagcaactttgcctggactggtgccaccaagtatcatctgaacggcagagactctctggtgaatccgggcgtcgccatggcaaccaacaaggacgacgaggaccgcttcttcccatccagcggcatcctcatgtttggcaagcagggagctggaaaagacaacgtggactatagcaacgtgatgctaaccagcgaggaagaaatcaagaccaccaaccccgtggccacagaacagtatggcgtggtggctgataacctacagcagcaaaacaccgctcctattgtgggggccgtcaacagccagggagccttacctggcatggtctggcagaaccgggacgtgtacctgcagggtcctatttgggccaagattcctcacacagatggcaactttcacccgtctcctttaatgggcggctttggacttaaacatccgcctcctcagatccttatcaaaaacactcctgttcctgcggatcctccaacagcgttcaaccaggccaagctgaattctttcatcacgcagtacagcaccggacaagtcagcgtggagatcgagtgggagctgcagaaggagaacagcaagcgctggaacccagagattcagtatacttccaactactacaaatctacaaatgtggactttgctgttaatactgagggtgcttactctgagcctcgccccattggcactcgttacctcacccgtaatctgtaa

SEQ ID NO: 446 - protein, 737 aa, Adeno-associated virus
MAADGYLPDWLEDNLSEGIREWWDLKPGAPKPKANQQKQDDGRGLVLPGYKYLGPFNGLDKGEPVNAADAAALEHDKAYDQQLKAGDNPYLRYNHADAEFQERLQEDTSFGGNLGRAVFQAKKRVLEPLGLVEEAAKTAPGKKRPVEPSPQRSPDSSTGIGKKGQQPARKRLNFGQTGDSESVPDPQPIGEPPAGPSGLGSGTMAAGGGAPMADNNEGADGVGNASGNWHCDSTWLGDRVITTSTRTWALPTYNNHLYKQISSQSAGSTNDNVYFGYSTPWGYFDFNRFHCHFSPRDWQRLINNNWGFRPKKLNFKLFNIQVKEVTTNDGVTTIANNLTSTVQVFSDSEYQLPYVLGSAHQGCLPPFPADVFMIPQYGYLTLNNGSQAVGRSSFYCLEYFPSQMLRTGNNFSFSYTFEDVPFHSSYAHSQSLDRLMNPLIDQYLYYLSRTQSTGGTAGTQQLLFSQAGPSNMSTQARNWLPGPCYRQQRVSTTLSQNNNSNFAWTGATKYHLNGRDSLVNPGVAMATNKDDEDRFFPSSGILMFGKQGAGKDNVDYSNVMLTSEEEIKTTNPVATEQYGVVADNLQQQNTAPIVGAVNSQGALPGMVWQNRDVYLQGPIWAKIPHTDGNFHPSPLMGGFGLKHPPPQILIKNTPVPADPPTAFNQAKLNSFITQYSTGQVSVEIEWELQKENSKRWNPEIQYTSNYYKSTNVDFAVNTEGAYSEPRPIGTRYLTRNL

SEQ ID NO: 447 - DNA, 2217 bp, Adeno-associated virus
atggctgccgatggttatcttccagattggctcgaggacaacctctctgagggcattcgcgagtggtgggacctgaaacctggagccccgaaacccaaagccaaccagcaaaagcaggacgacggccggggtctggtgcttcctggctacaagtacctcggacccttcaacggactcgacaagggggagcccgtcaacgcggcggacgcagcggccctcgagcacgacaaggcctacgaccagcagctcaaagcgggtgacaatccgtacctgcggtataatcacgccgacgccgagtttcaggagcgtctgcaagaagatacgtcttttgggggcaacctcgggcgagcagtcttccaggccaagaagcgggttctcgaacctctcggtctggttgaggaaggcgctaagacggctcctggaaagaagagaccggtagagccgtcaccacagcgttcccccgactcctccacgggcatcggcaagaaaggccagcagcccgccagaaagagactcaatttcggtcagactggcgactcagagtcagtccccgaccctcaacctatcggagaacctccagcagcgccctctagtgtgggatctggtacaatggctgcaggcggtggcgcaccaatggcagacaataacgaaggtgccgacggagtgggtagttcctcgggaaattggcattgcgattccacatggctgggcgacagagtcatcaccaccagcacccgaacctgggccctgcccacctacaacaaccacctctacaagcaaatctccaacgggacctcgggaggcagcaccaacgacaacacctactttggctacagcaccccctgggggtattttgactttaacagattccactgccacttctcaccacgtgactggcagcgactcatcaacaacaactggggattccggcccaagagactcagcttcaagctcttcaacatccaggtcaaagaggtcacgcagaatgaaggcaccaagaccatcgccaataacctcaccagcaccatccaggtgtttacggactcggaataccagctgccgtacgtcctcggctctgcccaccagggctgcctgcctccgttcccggcggacgtcttcatgattcctcagtacggctacctgactctcaacaacggtagtcaggccgtgggacgttcctccttctactgcctggagtacttcccctctcagatgctgagaacgggcaacaacttttccttcagctacactttcgaggacgtgcctttccacagcagctacgcgcacagccagagtttggacaggctgatgaatcctctcatcgaccagtacctgtactacctgtcaagaacccagtctacgggaggcacagcgggaacccagcagttgctgttttctcaggccgggcctagcaacatgtcggctcaggccagaaactggctgcctggaccctgctacagacagcagcgcgtctccacgacactgtcgcaaaacaacaacagcaactttgcctggactggtgccaccaagtatcatctgaacggcagagactctctggtgaatccgggcgtcgccatggcaaccaacaaggacgacgaggaccgcttcttcccatccagcggcatcctcatgtttggcaagcagggagctggaaaagacaacgtggactatagcaacgtgatgctaaccagcgaggaagaaatcaaggccaccaaccccgtggccacagaacagtatggcgtggtggctgataacctacagcagcaaaacaccgctcctattgtgggggccgtcaacagccagggagccttacctggcatggtctggcagaaccgggacgtgtacctgcagggtcctatttgggccaagattcctcacacagatggcaactttcacccgtctcctttaatgggcggctttggacttaaacatccgcctcctcagatcctcatcaaaaacactcctgttcctgcggatcctccaacagcgttcaaccaggccaagctgaattctttcatcacgcagtacagcaccggacaagtcagcgtggagatcgagtgggagctgcagaaggagaacagcaagcgctggaacccagagattcagtatacttccaactactacaaatctacaaatgtggactttgctgttaatactgagggtgtttactctgagcctcgccccattggcactcgttacctcacccgtaatctgtaa

SEQ ID NO: 448 - protein, 738 aa, Adeno-associated virus
MAADGYLPDWLEDNLSEGIREWWDLKPGAPKPKANQQKQDDGRGLVLPGYKYLGPFNGLDKGEPVNAADAAALEHDKAYDQQLKAGDNPYLRYNHADAEFQERLQEDTSFGGNLGRAVFQAKKRVLEPLGLVEEGAKTAPGKKRPVEPSPQRSPDSSTGIGKKGQQPARKRLNFGQTGDSESVPDPQPIGEPPAAPSSVGSGTMAAGGGAPMADNNEGADGVGSSSGNWHCDSTWLGDRVITTSTRTWALPTYNNHLYKQISNGTSGGSTNDNTYFGYSTPWGYFDFNRFHCHFSPRDWQRLINNNWGFRPKRLSFKLFNIQVKEVTQNEGTKTIANNLTSTIQVFTDSEYQLPYVLGSAHQGCLPPFPADVFMIPQYGYLTLNNGSQAVGRSSFYCLEYFPSQMLRTGNNFSFSYTFEDVPFHSSYAHSQSLDRLMNPLIDQYLYYLSRTQSTGGTAGTQQLLFSQAGPSNMSAQARNWLPGPCYRQQRVSTTLSQNNNSNFAWTGATKYHLNGRDSLVNPGVAMATNKDDEDRFFPSSGILMFGKQGAGKDNVDYSNVMLTSEEEIKATNPVATEQYGVVADNLQQQNTAPIVGAVNSQGALPGMVWQNRDVYLQGPIWAKIPHTDGNFHPSPLMGGFGLKHPPPQILIKNTPVPADPPTAFNQAKLNSFITQYSTGQVSVEIEWELQKENSKRWNPEIQYTSNYYKSTNVDFAVNTEGVYSEPRPIGTRYLTRNL

SEQ ID NO: 449 - DNA, 2217 bp, Adeno-associated virus
atggctgccgatggttatcttccagattggctcgaggacaacctctctgagggcattcgcgagtggtgggacctgaaacctggagccccgaaacccaaagccaaccagcaaaagcaggacgacggccggggtctggtgcttcctggctacaagcacctcggacccttcaacggactcgacaagggggagcccgtcaacgcggcggacgcagcggccctcgagcacgacaaggcctacgaccagcagctcaaagcgggtgacaatccgtacctgcggtataatcacgctgacgccgagtttcaggagcgtctgcaagaagatacgtcttttgggggcaacctcgggcgagcagtcttccaggccaagaagcgggttctcgaacctctcggtctggttgaggaaggcgctaagacggctcctggaaagaagagaccggtagagccgtcaccacagcgttcccccgactcctccacgggcatcggcaagaaaggccagcagcccgccagaaagagactcaatttcggtcagactggcgactcagagtcagtccccgaccctcaacctatcggagaacctccagcagcgccctctagtgtgggatctggtacaatggctgcaggcggtggcgcaccaatggcagacaataacgaaggtgccgacggagtgggtagttcctcgggaaattggcattgcgattccacatggctgggcgacagagtcatcaccaccagcacccgaacctgggccctgcccacctacaacaaccacctctacaagcaaatctccaacgggacctcgggaggcagcaccaacgacaacacctactttggctacagcaccccctgggggtattttgactttaacagattccactgccacttctcaccacgtgactggcagcgactcatcaacaacaactggggattccggcccaagagactcagcttcaagctcttcaacatccaggtcaaagaggtcacgcagaatgaaggcaccaagaccatcgccaataaccttaccagcacggttcaggtcttttcggactcggaataccagctgccctacgtcctcggctccgcacaccagggctgcctgcctccgttcccggcggacgtcttcatgattccccagtacggctacctgactctgaacaatggcagccaatcggtgggtcgttcctctttctactgcctggaatatttcccttctcaaatgctgagaacgggcaacaacttcaccttcagctacaccttcgaggacgttcccttccacagcagctacgcacacagccagagcctggaccggctgatgaatcctcttatcgaccagtacctgtattacctggccagaacacagagcaacgcaggaggcacagctggcaatcgggaactgcagttttatcagggcgggcctaccaccatggccgaacaagccaaaaactggctgcctggaccttgcttccggcaacaaagagtctccaagacgctggatcaaaacaacaacagcaactttgcttggactggtgccaccaaataccatctaaatggaagaaattcattggttaatcccggtgtcgccatggcaacccacaaggacgacgaggaacgcttcttcccttcgagcggagtcctgatttttggaaaaactggagcagctaataagactacactggaaaatgtgttaatgacaaatgaagaggaaattcgtcctaccaacccggtagccaccgaggaatacgggactgttagcagcaacctgcaggcggctaacactgcagcccagacacaagttgtcaacaaccagggagccttacctggtatggtctggcagaaccgggacgtgtacctgcagggtcccatctgggccaagattcctcacacggacggcaactttcacccgtctccgctgatgggcggctttggactgaagcatccgcctcctcagatcctgatcaaaaacactcctgttcctgctaatcccccggaggtgtttacgcctgccaagtttgcttctttcatcacacagtacagcaccggccaggtcagcgtggagatcgagtgggagctgcagaaggagaacagcaagcgctggaacccagagattcagtatacctccaattttgacaaacagactggtgtggactttgccgttgacagccagggtgtttattctgagcctcgccccattggtactcgttacctcacccgtaatctgtaa

SEQ ID NO: 450 - protein, 738 aa, Adeno-associated virus
MAADGYLPDWLEDNLSEGIREWWDLKPGAPKPKANQQKQDDGRGLVLPGYKHLGPFNGLDKGEPVNAADAAALEHDKAYDQQLKAGDNPYLRYNHADAEFQERLQEDTSFGGNLGRAVFQAKKRVLEPLGLVEEGAKTAPGKKRPVEPSPQRSPDSSTGIGKKGQQPARKRLNFGQTGDSESVPDPQPIGEPPAAPSSVGSGTMAAGGGAPMADNNEGADGVGSSSGNWHCDSTWLGDRVITTSTRTWALPTYNNHLYKQISNGTSGGSTNDNTYFGYSTPWGYFDFNRFHCHFSPRDWQRLINNNWGFRPKRLSFKLFNIQVKEVTQNEGTKTIANNLTSTVQVFSDSEYQLPYVLGSAHQGCLPPFPADVFMIPQYGYLTLNNGSQSVGRSSFYCLEYFPSQMLRTGNNFTFSYTFEDVPFHSSYAHSQSLDRLMNPLIDQYLYYLARTQSNAGGTAGNRELQFYQGGPTTMAEQAKNWLPGPCFRQQRVSKTLDQNNNSNFAWTGATKYHLNGRNSLVNPGVAMATHKDDEERFFPSSGVLIFGKTGAANKTTLENVLMTNEEEIRPTNPVATEEYGTVSSNLQAANTAAQTQVVNNQGALPGMVWQNRDVYLQGPIWAKIPHTDGNFHPSPLMGGFGLKHPPPQILIKNTPVPANPPEVFTPAKFASFITQYSTGQVSVEIEWELQKENSKRWNPEIQYTSNFDKQTGVDFAVDSQGVYSEPRPIGTRYLTRNL

SEQ ID NO: 451 - protein, 737 aa, Adeno-associated virus
MAADGYLPDWLEDNLSEGIREWWDLKPGAPKPKANQQKQDDGRGLVLPGYKYLGPFNGLDKGEPVNAADAAALEHDKAYDQQLKAGDNPYLRYNHADAEFQERLQEDTSFGGNLGRAVFQAKKRVLEPLGLVEEAAKTAPGKKRPVEPSPQRSPDSSTGIGKKGQQPARKRLNFGQTGDSESVPDPQPIGEPPAGPSGLGSGTMAAGGGAPMADNNKGADGVGNASGNWHCDSTWLGDRVITTSTRTWALPTYNNHLYKQISSQSAGSTNDNVYFGYSTPWGYFDFNRFHCHFSPRDWQRLINSNWGFRPKKLNFKLFNIQVKEVTTNDGVTTIANNLTSTVQVFSDSEYQLPYVLGSAHQGCLPPFPADVFMIPQYGYLTLNNGSQSVGRSSFYCLEYFPSQMLRTGNNFTFSYTFEDVPFHSSYAHSQSLDRLMNPLIDQYLYYLARTQSNAGGTAGNRELQFYQGGPTTMAEQAKNWLPGPCFRQQRVSKTLDQNNNSNFAWTGATKYHLNGRNSLVNPGVAMATHKDDEERFFPSSGVLIFGKTGAANKTTLENVLMTNEEEIRPTNPVATEEYGTVSSNLQAANTAAQTQVVNNQGALPGMVWQNRDVYLQGPIWAKIPHTDGNFHPSPLMGGFGLKHPPPQILIKNTPVPANPPEVFTPAKFASFITQYSTGQVSVEIEWELQKENSKRWNPEIQYTSNFDKQTGVDFAVDSQGVYSEPRPIGTRYLTRNL

SEQ ID NO: 452 - protein, 737 aa, Adeno-associated virus
MAADGYLPDWLEDNLSEGIREWWDLKPGAPKPKANQQKQDDGRGLVLPGYKYLGPFNGLDKGEPVNAADAAALEHDKAYDQQLKAGDNPYLRYNHADAEFQERLQEDTSFGGNLGRAVFQAKKRVLEPLGLVEEAAKTAPGKKRPVEPSPQRSPDSSTGIGKKGQQPARKRLNFGQTGDSESVPDPQPIGEPPAGPSGLGSGTMAAGGGAPMADNNEGADGVGNASGNWHCDSTWLGDRVITTSTRTWALPTYNNHLYKQISSQSAGSTNDNVYFGYSTPWGYFDFNRFHCHFSPRDWQRLINSNWGFRPKKLNFKLFNIQVKEVTTNDGVTTIANNLTSTVQVFSDSEYQLPYVLGSAHQGCLPPFPADVFMIPQYGYLTLNNGSQSVGRSSFYCLEYFPSQMLRTGNNFTFSYTFEDVPFHSSYAHSQSLDRLMNPLIDQYLYYLARTQSNAGGTAGNRELQFYQGGPTTMAEQAKNWLPGPCFRQQRVSKTLDQNNNSNFAWTGATKYHLNGRNSLVNPGVAMATHKDDEERFFPSSGVLIFGKTGAANKTTLENVLMTNEEEIRPTNPVATEEYGTVSSNLQAANTAAQTQVVNNQGALPGMVWQNRDVYLQGPIWAKIPHTDGNFHPSPLMGGFGLKHPPPQILIKNTPVPANPPEVFTPAKFASFITQYSTGQVSVEIEWELQKENSKRWNPEIQYTSNFDKQTGVDFAVDSQGVYSEPRPIGTRYLTRNL

SEQ ID NO: 453 - protein, 737 aa, Adeno-associated virus
MAADGYLPDWLEDNLSEGIREWWDLKPGAPKPKANQQKQDDGRGLVLPGYKYLGPFNGLDKGEPVNAADAAALEHDKAYDQQLKAGDNPYLRYNHADAEFQERLQEDTSFGGNLGRAVFQAKKRVLEPLGLVEEAAKTAPGKKRPVEPSPQRSPDSSTGIGKKGQQPARKRLNFGQTGDSESVPDPQPIGEPPAGPSGLGSGTMAAGGGAPMADNNEGADGVGNASGNWHCDSTWLGDRVITTSTRTWALPTYNNHLYKQISSQSAGSTNDNVYFGYSTPWGYFDFNRFHCHFSPRDWQRLINNNWGFRPKKLNFKLFNIQVKEVTTNDGVTTIANNLTSTVQVFSDSEYQLPYVLGSAHQGCLPPFPADVFMIPQYGYLTLNNGSQSVGRSSFYCLEYFPSQMLRTGNNFTFSYTFEDVPFHSSYAHSQSLDRLMNPLIDQYLYYLARTQSNAGGTAGNRELQFYQGGPTTMAEQAKNWLPGPCFRQQRVSKTLDQNNNSNFAWTGATKYHLNGRNSLVNPGVAMATHKDDEERFFPSSGVLIFGKTGAANKTTLENVLMTNEEEIRPTNPVATEEYGTVSSNLQAANTAAQTQVVNNQGALPGMVWQNRDVYLQGPIWAKIPHTDGNFHPSPLMGGFGLKHPPPQILIKNTPVPANPPEVFTPAKFASFITQYSTGQVSVEIEWELQKENSKRWNPEIQYTSNFDKQTGVDFAVDSQGVYSEPRPIGTRYLTRNL

SEQ ID NO: 454 - protein, 737 aa, Adeno-associated virus
MAADGYLPDWLEDNLSEGIREWWDLKPGAPKPKANQQKQDDGRGLVLPGYKYLGPFNGLDKGEPVNAADAAALEHDKAYDQQLKAGDNPYLRYNHADAEFQERLQEDTSFGGNLGRAVFQAKKRVLEPLGLVEEAAKTAPGKKRPVEPSPQRSPDSSTGIGKKGQQPARKRLNFGQTGDSESVPDPQPIGEPPAGPSGLGSGTMAAGGGAPMADNNKGADGVGNASGNWHCDSTWLGDRVITTSTRTWALPTYNNHLYKQISSQSAGSTNDNVYFGYSTPWGYFDFNRFHCHFSPRDWQRLINNNWGFRPKKLNFKLFNIQVKEVTTNDGVTTIANNLTSTVQVFSDSEYQLPYVLGSAHQGCLPPFPADVFMIPQYGYLTLNNGSQSVGRSSFYCLEYFPSQMLRTGNNFTFSYTFEDVPFHSSYAHSQSLDRLMNPLIDQYLYYLARTQSNAGGTAGNRELQFYQGGPTTMAEQAKNWLPGPCFRQQRVSKTLDQNNNSNFAWTGATKYHLNGRNSLVNPGVAMATHKDDEERFFPSSGVLIFGKTGAANKTTLENVLMTNEEEIRPTNPVATEEYGTVSSNLQAANTAAQTQVVNNQGALPGMVWQNRDVYLQGPIWAKIPHTDGNFHPSPLMGGFGLKHPPPQILIKNTPVPANPPEVFTPAKFASFITQYSTGQVSVEIEWELQKENSKRWNPEIQYTSNFDKQTGVDFAVDSQGVYSEPRPIGTRYLTRNL

SEQ ID NO: 455 - DNA, 2214 bp, Adeno-associated virus
atggctgctgacggttatcttccagattggctcgaggacaacctctctgagggcattcgcgagtggtgggacctgaaacctggagcccccaagcccaaggccaaccagcagaagcaggacgacggccggggtctggtgcttcctggctacaagtacctcggacccttcaacggactcgacaagggggagcccgtcaacgcggcggacgcagcggccctcgagcacgacaaggcctacgaccagcagctcaaagcgggtgacaatccgtacctgcggtataaccacgccgacgccgagtttcaggagcgtctgcaagaagatacgtcttttgggggcaacctcgggcgagcagtcttccaggccaagaagcgggttctcgaacctctcggtctggttgaggaagctgctaagacggctcctggaaagaagagaccggtagaaccgtcacctcagcgttcccccgactcctccacgggcatcggcaagaaaggccagcagcccgctagaaagagactgaactttgggcagactggcgactcagagtcagtccccgaccctcaaccaatcggagaaccaccagcaggcccctctggtctgggatctggtacaatggctgcaggcggtggcgcaccaatggctgacaataacaagggcgccgacggagtgggtaatgcctcaggaaattggcattgcgattccacatggctgggcgacagagtcatcaccaccagcacccgaacctgggctttgcccacctacaacaaccacctctacaagcaaatctccagtcagtcagcaggtagcaccaacgacaacgtctacttcggctacagcaccccctgggggtattttgacttcaacagattccactgtcacttctcaccacgtgactggcagcggctcatcaacagcaactggggattccggcccaagaagctcaacttcaagctgttcaacatccaggtcaaggaggtcacaacgaatgacggcgtcacgaccatcgccaataaccttaccagcacggttcaggtcttttcggactcggaataccagctgccctacgtcctcggctccgcacaccagggctgcctgcctccgttcccggcggacgtcttcatgattccccagtacggctacctgactctgaacaatggcagccaatcggtgggtcgttcctctttctactgcctggaatatttcccttctcaaatgctgagaacgggcaacaacttcaccttcagctacaccttcgaggacgttcccttccacagcagctacgcacacagccagagcctggaccggctgatgaatcctcttatcgaccagtacctgtattacctggccagaacacagagcaacgcaggaggcacagctggcaatcgggaactgcagttttatcagggcgggcctaccaccatggccgaacaagccaaaaactggctgcctggaccttgcttccggcaacaaagagtctccaagacgctggatcaaaacaacaacagcaactttgcttggactggtgccaccaaataccatctaaatggaagaaattcattggttaatcccggtgtcgccatggcaacccacaaggacgacgaggaacgcttcttcccttcgagcggagtcctgatttttggaaaaactggagcagctaataagactacactggaaaatgtgttaatgacaaatgaagaggaaattcgtcctaccaacccggtagccaccgaggaatacgggactgttagcagcaacctgcaggcggctaacactgcagcccagacacaagttgtcaacaaccagggagccttacctggtatggtctggcagaaccgggacgtgtacctgcagggtcccatctgggccaagattcctcacacggacggcaactttcacccgtctccgctgatgggcggctttggactgaagcatccgcctcctcagatcctgatcaaaaacactcctgttcctgctaatcccccggaggtgtttacgcctgccaagtttgcttctttcatcacacagtacagcaccggccaggtcagcgtggagatcgagtgggagctgcagaaggagaacagcaagcgctggaacccagagattcagtatacctccaattttgacaaacagactggtgtggactttgccgttgacagccagggtgtttattctgagcctcgccccattggtactcgttacctcacccgtaatctgtaa

SEQ ID NO: 456 - DNA, 2217 bp, Adeno-associated virus
atggctgccgatggttatcttccagattggctcgaggacaacctctctgagggcattcgcgagtggtgggacctgaaacctggagccccgaaacccaaagccaaccagcaaaagcaggacgacggccggggtctggtgcttcctggctacaagtacctcggacccttcaacggactcgacaagggggagcccgtcaacgcggcggacgcagcggccctcgagcacgacaaggcctacgaccagcagctcaaagcgggtgacaatccgcacctgcggtataatcacgccgacgccgagtttcaggagcgtctgcaagaagatacgtcttttgggggcaacctcgggcgagcagtcttccaggccaagaagcgggttctcgaacctctcggtctggttgaggaaggcgctaagacggctcctggaaagaagagaccggtagagccgtcaccacagcgttcccccgactcctccacgggcatcggcaagaaaggccagcagcccgccagaaagagactcaatttcggtcagactggcgactcagagtcagtccccgaccctcaacttatcggagaacctccagcagcgccctctagtgtgggatctggtacaatggctgcaggcggtggcgcaccaatggcagacaataacgaaggtgccgacggagtgggtagttcctcgggaaattggcattgcgattccacatggctgggcgacagagtcatcaccaccagcacccgaacctgggccctgcccacctacaacaaccacctctacaagcaaatctccaacgggacctcgggaggcagcaccaacgacaacacctactttggctacagcaccccctgggggtattttgactttaacagattccactgccacttctcaccacgtgactggcagcgactcatcaacaacaactggggattccggcccaagagactcagcttcaagctcttcaacatccaggtcaaagaggtcacgcagaatgaaggcaccaagaccatcgccaataacctcaccagcaccatccaggtgtttacggactcggagtaccagctgccgtacgtcctcggctctgcccaccagggctgcctgcctccgttcccggcggacgtcttcatgattcctcagtacggcaacctgactctcaacaacggtagtcaggccgtgggacgttcctccttctactgcctggagtacttcccctctcagatgctgagaacgggcaacaacttttccttcagctacactttcgaggacgtgcctttccacagcagctacgcgcacagccagagtttggacaggctgatgaatcctctcatcgaccagtacctgtactacctgtcaagaacccagtctacgggaggcacagcgggaacccagcagttgctgttttctcaggccgggcctagcaacatgtcggctcaggccagaaactggctgcctggaccctgctacagacagcagcgcgtctccacgacactgtcgcaaaacaacaacagcaactttgcctggactggtgccaccaagtatcatctgaacggcagagactctctggtgaatccgggcgtcgccatggcaaccaacaaggacgacgaggaccgcttcttcccatccagcggcatcctcatgtttggcaagcagggagctggaaaagacaacatgggctatagcaacgtgatgctaaccagcgaggaagaaatcaagaccaccaaccccgtggccacagaacagtatggcgtggtggctgataacctacagcagcaaaacaccgctcctattgtgggggccgtcaacagccagggagccttacctggcatggtctggcagaaccgggacgtgtacctgcagggtcctatttgggccaagattcctcacacagatggcaactttcacccgtctcctttaatgggcggctttggacttaaacatccgcctcctcagatcctcatcaaaaacactcctgttcctgcggatcctccaacagcgttcaaccaggccaagctgaattctttcatcacgcagtacggcaccggacaagtcagcgtggagatcgagtgggagctgcagaaggagaacagcaagcgctggaacccagagattcagtatacttccaactactacaaatctacaaatgtggactttgctgttaatactgagggtgtttactctgagcctcgccccattggcactcgttacctcacccgtaatctgtaa

SEQ ID NO: 457 - protein, 738 aa, Adeno-associated virus
MAADGYLPDWLEDNLSEGIREWWDLKPGAPKPKANQQKQDDGRGLVLPGYKYLGPFNGLDKGEPVNAADAAALEHDKAYDQQLKAGDNPHLRYNHADAEFQERLQEDTSFGGNLGRAVFQAKKRVLEPLGLVEEGAKTAPGKKRPVEPSPQRSPDSSTGIGKKGQQPARKRLNFGQTGDSESVPDPQLIGEPPAAPSSVGSGTMAAGGGAPMADNNEGADGVGSSSGNWHCDSTWLGDRVITTSTRTWALPTYNNHLYKQISNGTSGGSTNDNTYFGYSTPWGYFDFNRFHCHFSPRDWQRLINNNWGFRPKRLSFKLFNIQVKEVTQNEGTKTIANNLTSTIQVFTDSEYQLPYVLGSAHQGCLPPFPADVFMIPQYGNLTLNNGSQAVGRSSFYCLEYFPSQMLRTGNNFSFSYTFEDVPFHSSYAHSQSLDRLMNPLIDQYLYYLSRTQSTGGTAGTQQLLFSQAGPSNMSAQARNWLPGPCYRQQRVSTTLSQNNNSNFAWTGATKYHLNGRDSLVNPGVAMATNKDDEDRFFPSSGILMFGKQGAGKDNMGYSNVMLTSEEEIKTTNPVATEQYGVVADNLQQQNTAPIVGAVNSQGALPGMVWQNRDVYLQGPIWAKIPHTDGNFHPSPLMGGFGLKHPPPQILIKNTPVPADPPTAFNQAKLNSFITQYGTGQVSVEIEWELQKENSKRWNPEIQYTSNYYKSTNVDFAVNTEGVYSEPRPIGTRYLTRNL

SEQ ID NO: 458 - DNA, 2217 bp, Adeno-associated virus
atggctgccgatggttatcttccagattggctcgaggacaacctctctgagggcattcgcgagtggtgggacctgaaacctggagccccgaaacccaaagccaaccagcaaaagcaggacgacggccggggtctggtgcttcctggctacaagtacctcggacccttcaacggactcgacaagggggagcccgtcaacgcggcggacgcagcggccctcgagcacgacaaggcctacgaccagcagctcaaagcgggtgacaatccgtacctgcggtataatcacgccgacgccgagtttcaggagcgtctgcaagaagatacgtcttttgggggcaacctcgggcgagcagtcttccaggccaagaagcgggttctcgaacctctcggtctggttgaggaaggcgctaagacggctcctggaaagaagagaccggtagagccgtcaccacagcgttcccccgactcctccacgggcatcggcaagaaaggccagcagcccgccggaaagagactcaatttcggtcagactggcgactcagagtcagtccccgaccctcaacctatcggagaacctccagcagcgccctctagtgtgggatctggtacaatggctgcaggcggtggcgcaccaatggcagacaataacgaaggtgccgacggagtgggtagttcctcgggaaattggcattgcgattccacatggctgggcgacagagtcatcaccaccagcacccgaacctgggccctgcccacctacaacaaccacctctacaagcaaatctccaacgggacctcgggaggcagcaccaacgacaacacctactttggctacagcaccccctgggggtattttgactttaacagattccactgccacttctcaccacgtgactggcagcgactcatcaacaacaactggggattccggcccaagagactcagcttcaagctcttcaacatccaggtcaaagaggtcacgcagaatgaaggcaccaagaccatcgccaataacctcaccagcaccatccaggtgtttacggactcggaataccagctgccgtacgtcctcggctctgcccaccagggctgcctgcctccgttcccggcggacgtcttcatgattcctcagtacggctacctgactctcaacaacggtagtcaggccgtgggacgttcctccttctactgcctggagtacttcccctctcagatgctgagaacgggcaacaacttttccttcagctacactttcgaggacgtgcctttccacagcagctacgcgcacagccagagtttggacaggctgatgaatcctctcgtcgaccagtacctgtactacctgtcaagaacccagtctacgggaggcacagcgggaacccagcagttgctgttttctcaggccgggcctagcaacatgtcggctcaggccagaaactggctgcctggaccctgctacagacagcagcgcgtctccacgacactgtcgcaaaacaacaacagcaactttgcctggactggtgccaccaagtatcatctgaacggcagagactctctggtgaatccgggcgtcgccatggcaaccaacaaggacgacgaggaccgcttcttcccatccagcggcatcctcatgtttggcaagcagggagctggaaaagacaacgtggactatagcaacgtgatgctaaccagcgaggaagaaatcaagaccaccaaccccgtggccacagaacagtatggcgtggtggctgataacctacagcagcaaaacaccgctcctattgtgggggccgtcaacagccagggagccttacctggcatggtctggcagaaccgggacgtgtacctgcagggtcctatttgggccaagattcctcacacagatggcaactttcacccgtctcctttaatgggcggctttggacttaaacatccgcctcctcagatcctcatcaaaaacactcctgttcctgcggatcctccaacagcgttcaaccaggccaagctgaattctttcatcacgcagtacagcaccggacaagtcagcgtggagatcgagtgggagctgcagaaggagaacagcaagcgctggagcccagagattcagtatacttccaactactacaaatctacaaatgtggactttgctgttaatactgagggtgtttactctgagcctcgccccattggcactcgttacctcacccgtaatctgtaa

SEQ ID NO: 459 - protein, 738 aa, Adeno-associated virus
MAADGYLPDWLEDNLSEGIREWWDLKPGAPKPKANQQKQDDGRGLVLPGYKYLGPFNGLDKGEPVNAADAAALEHDKAYDQQLKAGDNPYLRYNHADAEFQERLQEDTSFGGNLGRAVFQAKKRVLEPLGLVEEGAKTAPGKKRPVEPSPQRSPDSSTGIGKKGQQPAGKRLNFGQTGDSESVPDPQPIGEPPAAPSSVGSGTMAAGGGAPMADNNEGADGVGSSSGNWHCDSTWLGDRVITTSTRTWALPTYNNHLYKQISNGTSGGSTNDNTYFGYSTPWGYFDFNRFHCHFSPRDWQRLINNNWGFRPKRLSFKLFNIQVKEVTQNEGTKTIANNLTSTIQVFTDSEYQLPYVLGSAHQGCLPPFPADVFMIPQYGYLTLNNGSQAVGRSSFYCLEYFPSQMLRTGNNFSFSYTFEDVPFHSSYAHSQSLDRLMNPLVDQYLYYLSRTQSTGGTAGTQQLLFSQAGPSNMSAQARNWLPGPCYRQQRVSTTLSQNNNSNFAWTGATKYHLNGRDSLVNPGVAMATNKDDEDRFFPSSGILMFGKQGAGKDNVDYSNVMLTSEEEIKTTNPVATEQYGVVADNLQQQNTAPIVGAVNSQGALPGMVWQNRDVYLQGPIWAKIPHTDGNFHPSPLMGGFGLKHPPPQILIKNTPVPADPPTAFNQAKLNSFITQYSTGQVSVEIEWELQKENSKRWSPEIQYTSNYYKSTNVDFAVNTEGVYSEPRPIGTRYLTRNL

SEQ ID NO: 460 - DNA, 2217 bp, Adeno-associated virus
atggttgccgatggttatcttccagattggctcgaggacaacctctctgagggcattcgcgagtggtgggacctgaaacctggagccccgaaacccaaagccaaccagcaaaagcagggcgacggccggggtctggtgcttcctggctacaagtacctcggacccttcaacggactcgacaagggggagcccgtcaacgcggcggacgcagcggccctcgagcacgacaaggcctacgaccagcagcttaaagcgggtgacaatccgtacctgcggtataatcacgccgacgccgagcttcaggagcgtctgcaagaagatacgtcttttgggggcaacctcgggcgagcagtcttccaggccaagaagcgggttctcgaacctctcggtctggttgaggaaggcgctaagacggctcctggaaagaagagaccggtagagccgtcaccacagcgttcccccgactcctccacgggcatcggcaagaaaggccagcagcccgccagaaagagactcaatttcggtcagactggcgactcagagtcagtccccgaccctcaacctatcggagaacctccagcagcgccctctagtgtgggatctggtacaatggctgcaggcggtggcgcgccaatggcagacaataacgaaggtgccgacggagtgggtagttcctcgggaaattggcattgcgattccacatggctgggcgacagagtcatcaccaccagcacccgaacctgggccctgcccacctacaacaaccacctctacaagcaaatctccaacgggacctcgggaggcagcaccaacgacaacacctactttggctacagcaccccctgggggtattttgactttaacagattccactgccacttctcaccacgtgactggcagcgactcatcaacaacaactggggattccggcccaagagactcagcttcaagctcttcaacatccaggtcaaagaggtcacgcagaatgaaggcaccaagaccatcgccaataacctcaccagcaccatccaggtgtttacggactcggaataccagctgccgtacgtcctcggctctgcccaccagggctgccagcctccgttcccggcggacgtcttcatgattcctcagtacggctacctgactctcaacaacggtagtcaggccgtgggacgttcctccttctactgcctggagtacttcccctctcagatgctgagaacgggcaacaacttttccttcagctacactttcgaggacgtgcctttccacagcagctacgcgcacagccagagtttggacaggctgatgaatcctctcatcgaccagtacctgtactacctgtcaagaacccagtctacgggaggcacagcgggaacccagcagttgctgttttctcaggccgggcctagcaacatgtcggctcaggccagaaactggctgcctggaccctgctacagacagcagcgcgtctccacgacactgtcgcaaaacaacaacagcaactttgcctggactggtgccaccaagtatcatctgaacggcagagactctctggtgaatccgggcgtcgccatggcaaccaacaaggacgacgaggaccgcttcttcccatccagcggcatcctcatgtttggcaagcagggagctggaaaagacaacgtggactatagcaacgtgatgctaaccagcgaggaagaaatcaagaccaccaaccccgtggccacagaacagtatggcgtggtggctgataacctacagcagcaaaacaccgctcctattgtgggggccgtcaacagccagggagccttacctggcatggtctggcagaaccgggacgtgtacctgcagggtcctatttgggccaagattcctcacacagatggcaactttcacccgtctcctttaatgggcggctttggacttaaacatccgcctcctcagatcctcatcaaaaacactcctgttcctgcggatcctccaacagcgttcaaccaggccaagctgaattctttcatcacgcagtacagcaccggacaagtcagcgtggagatcgagtgggagccgcagaaggagaacagcaagcgctggaacccagagattcagtatacttccaactactacaaatctacaaatgtggactttgctgttaatactgagggtgtttactctgagcctcgccccattggcactcgttacctcacccgtaatctgtaa

SEQ ID NO: 461 - protein, 738 aa, Adeno-associated virus
MVADGYLPDWLEDNLSEGIREWWDLKPGAPKPKANQQKQGDGRGLVLPGYKYLGPFNGLDKGEPVNAADAAALEHDKAYDQQLKAGDNPYLRYNHADAELQERLQEDTSFGGNLGRAVFQAKKRVLEPLGLVEEGAKTAPGKKRPVEPSPQRSPDSSTGIGKKGQQPARKRLNFGQTGDSESVPDPQPIGEPPAAPSSVGSGTMAAGGGAPMADNNEGADGVGSSSGNWHCDSTWLGDRVITTSTRTWALPTYNNHLYKQISNGTSGGSTNDNTYFGYSTPWGYFDFNRFHCHFSPRDWQRLINNNWGFRPKRLSFKLFNIQVKEVTQNEGTKTIANNLTSTIQVFTDSEYQLPYVLGSAHQGCQPPFPADVFMIPQYGYLTLNNGSQAVGRSSFYCLEYFPSQMLRTGNNFSFSYTFEDVPFHSSYAHSQSLDRLMNPLIDQYLYYLSRTQSTGGTAGTQQLLFSQAGPSNMSAQARNWLPGPCYRQQRVSTTLSQNNNSNFAWTGATKYHLNGRDSLVNPGVAMATNKDDEDRFFPSSGILMFGKQGAGKDNVDYSNVMLTSEEEIKTTNPVATEQYGVVADNLQQQNTAPIVGAVNSQGALPGMVWQNRDVYLQGPIWAKIPHTDGNFHPSPLMGGFGLKHPPPQILIKNTPVPADPPTAFNQAKLNSFITQYSTGQVSVEIEWEPQKENSKRWNPEIQYTSNYYKSTNVDFAVNTEGVYSEPRPIGTRYLTRNL

SEQ ID NO: 462 - DNA, 2217 bp, Adeno-associated virus
atggctgccgatggttatcttccagattggctcgaggacaacctctctgagggcattcgcgagtggtgggacctgaaacctggagccccgaaacccaaagccaaccagcaaaagcaggacgacggccggggtctggtgcttcctggctacaagtacctcggacccttcaacggactcgacaagggggagcccgtcaacgcggcggacgcagcggccctcgagcacgacaaggcctacgaccagcagctcaaagcgggtgacaatccgtacctgcggtataatcacgccgacgccgagtttcaggagcgtctgcaagaagatacgtcttttgggggcaacctcgggcgagcagtcttccaggccaagaagcgggttctcgaacctctcggtctggttgaggaaggcgctaagacggctcctggaaagaagagaccggtagagccgtcaccacagcgttcccccgactcctccacgggcatcggcaagaaaggccagcagcccgccagaaagagactcaatttcggtcagactggcgactcagagtcagtccccgaccctcaacctatcggagaacctccagcagcgccctctagtgtgggatctggtacaatggctgcaggcggtggcgcaccaatggcagacaataacgaaggtgccgacggagtgggtagttcctcgggaaattggcattgcgattccacatggctgggcgacagagtcatcaccaccagcacccgaacctgggccctgcccacctacaacaaccacctctacaagcaaatctccaacgggacctcgggaggcagcaccaacgacaacacctactttggctacagcaccccctgggggtattttgactttaacagattccactgccacttctcaccacgtgactggcagcgactcatcaacaacaactggggattccggcccaagagactcagcttcaagctcttcaacatccaggtcaaagaggtcacgcagaatgaaggcaccaagaccatcgccaatagcctcaccagcaccatccaggtgtttacggactcggaataccagctgccgtacgtcctcggctctgcccaccagggctgcctgcctccgttcccggcggacgtcttcatgattcctcagtacggctacctgactcccaacaacggtagtcaggccgtgggacgttcctccttctactgcctggagtacttcccctctcagatgctgagaacgggcaacaacttttccttcagctacactttcgaggacgtgcctttccacagcagctacgcgcacagccagagtttggacaggctgatgaatcctctcatcgaccagtacctgtactacctgtcaagaacccagtctacgggaggcacagcgggaacccagcagttgctgtcttctcaggccgggcctagcaacatgtcggctcaggccagaaactggctgcctggaccctgctacagacagcagcgcgtctccacgacactgtcgcaaaacaacaacagcaactttgcctggactggtgccaccaagtatcatctgaacggcagagactctctggtgaatccgggcgtcgccatggcaaccaacaaggacgacgaggaccgcttcttcccatccagcggcatcctcatgtttggcaagcagggagctggaaaagacaacgtggactatagcaacgtgatgctaaccagcgaggaagaaatcaagaccaccaaccccgtggccacagaacagtatggcgtggtggctgataacctacagcagcaaaacaccgctcctattgtgggggccgtcaacagccagggagccttacctggcatggtctggcagaaccgggacgtgtacttgcagggtcctatttgggccaagattcctcacacagatggcaactttcacccgtctcctttaatgggcggctttggacttaaacatccgcctcctcagatcctcatcaaaaacactcctgttcctgcggatcctccaacagcgttcaaccaggccaagctgaattctttcatcacgcagtacagcaccggacaagtcagcgtggagatcgagtgggagctgcagaaggagaacagcaagcgctggaacccagagattcagtatacttccaactactacaaatctacaaatgtggactttgctgttaatactgagggtgtttactctgagcctcgccccattggcactcgttacctcacccgtaatctgtaa

SEQ ID NO: 463 - protein, 738 aa, Adeno-associated virus
MAADGYLPDWLEDNLSEGIREWWDLKPGAPKPKANQQKQDDGRGLVLPGYKYLGPFNGLDKGEPVNAADAAALEHDKAYDQQLKAGDNPYLRYNHADAEFQERLQEDTSFGGNLGRAVFQAKKRVLEPLGLVEEGAKTAPGKKRPVEPSPQRSPDSSTGIGKKGQQPARKRLNFGQTGDSESVPDPQPIGEPPAAPSSVGSGTMAAGGGAPMADNNEGADGVGSSSGNWHCDSTWLGDRVITTSTRTWALPTYNNHLYKQISNGTSGGSTNDNTYFGYSTPWGYFDFNRFHCHFSPRDWQRLINNNWGFRPKRLSFKLFNIQVKEVTQNEGTKTIANSLTSTIQVFTDSEYQLPYVLGSAHQGCLPPFPADVFMIPQYGYLTPNNGSQAVGRSSFYCLEYFPSQMLRTGNNFSFSYTFEDVPFHSSYAHSQSLDRLMNPLIDQYLYYLSRTQSTGGTAGTQQLLSSQAGPSNMSAQARNWLPGPCYRQQRVSTTLSQNNNSNFAWTGATKYHLNGRDSLVNPGVAMATNKDDEDRFFPSSGILMFGKQGAGKDNVDYSNVMLTSEEEIKTTNPVATEQYGVVADNLQQQNTAPIVGAVNSQGALPGMVWQNRDVYLQGPIWAKIPHTDGNFHPSPLMGGFGLKHPPPQILIKNTPVPADPPTAFNQAKLNSFITQYSTGQVSVEIEWELQKENSKRWNPEIQYTSNYYKSTNVDFAVNTEGVYSEPRPIGTRYLTRNL

SEQ ID NO: 464 - protein, 738 aa, Adeno-associated virus
MAADGYLPDWLEDNLSEGIREWWDLKPGAPKPKANQQKQDDGRGLVLPGYKYLGPFNGLDKGEPVNAADAAALEHDKAYDQQLKAGDNPYLRYNHADAEFQERLQEDTSFGGNLGRAVFQAKKRVLEPLGLVEEGAKTAPGKKRPVEPSPQRSPDSSTGIGKKGQQPARKRLNFGQTGDSESVPDPQPIGEPPAAPSSVGSGTMAAGGGAPMADNNEGADGVGSSSGNWHCDSTWLGDRVITTSTRTWALPTYNNHLYKQISNGTSGGSTNDNTYFGYSTPWGYFDFNRFHCHFSPRDWQRLINNNWGFRPKRLSFKLFNIQVKEVTQNEGTKTIANNLTSTIQVFTDSEYQLPYVLGSAHQGCLPPFPADVFMIPQYGYLTLNNGSQAVGRSSFYCLEYFPSQMLRTGNNFSFSYTFEDVPFHSSYVHSQSLDRLMNPLIDQYLYYLSRTQSTGGTAGTQQLLFSQAGPSNMSAQARNWLPGPCYRQQRVSTTLSQNNNSNFAWTGATKYHLNGRDSLVNSGVAMATNKDDEDRFFPSSGILMFGKQGAGKDNVDYSNVMLTSEEEIKTTNPVATEQYGVVADNLQQQNTAPIVGAVNSQGALPGMVWQNRDVYLQGPIWAKIPHTDGNFHPSPLMGGFGLKHPPPQILIKNTPVPADPPTAFNQAKLNSFITQYSTGQVSVEIEWELQKENSKRWNPEIQYTSNYYKSTNVDFAVNTEGVYSEPRPIGTRYPTRNL

SEQ ID NO: 465 - DNA, 2217 bp, Adeno-associated virus
atggctgccgatggttatcttccagattggctcgaggacaacctctctgagggcattcgcgagtggtgggacctgaaacctggagccccgaaacccaaagccaaccagcaaaagcaggacgacggccggggtctggtgcttcctggctacaagtacctcggacccttcaacggactcgacaagggggagcccgtcaacgcggcggacgcagcggccctcgagcacgacaaggcctacgaccagcagctcaaagcgggtgacaatccgtacctgcggtataatcacgccgacgccgagtttcaggagcgtctgcaagaagatacgtcttttgggggcaacctcgggcgagcagtcttccaggccaagaagcgggttctcgaacctctcggtctggttgaggaaggcgctaagacggctcctggaaagaagagaccggtagagccgtcaccacagcgttcccccgactcctccacgggcatcggcaagaaaggccagcagcccgccagaaagagactcaatttcggtcagactggcgactcagagtcagtccccgaccctcaacctatcggagaacctccagcagcgccctctagtgtgggatctggtacaatggctgcaggcggtggcgcaccaatggcagacaataacgaaggtgccgacggagtgggtagttcctcgggaaattggcattgcgattccacatggctgggcgacagagtcatcaccaccagcacccgaacctgggccctgcccacctacaacaaccacctctacaagcaaatctccaacgggacctcgggaggcagcaccaacgacaacacctactttggctacagcaccccctgggggtattttgactttaacagattccactgccacttctcaccacgtgactggcagcgactcatcaacaacaactggggattccggcccaagagactcagcttcaagctcttcaacatccaggtcaaagaggtcacgcagaatgaaggcaccaagaccatcgccaataacctcaccagcaccatccaggtgtttacggactcggaataccagctgccgtacgtcctcggctctgcccaccagggctgcctgcctccgttcccggcggacgtcttcatgattcctcagtacggctacctgactctcaacaacggtagtcaggccgtgggacgttcctccttctactgcctggagtacttcccctctcagatgctgagaacgggcaacaacttttccttcagctacactttcgaggacgtgcctttccacagcagctacgtgcacagccagagtttggacaggctgatgaatcctctcatcgaccagtacctgtactacctgtcaagaacccagtctacgggaggcacagcgggaacccagcagttgctgttttctcaggccgggcctagcaacatgtcggctcaggccagaaactggctgcctggaccctgctacagacagcagcgcgtctccacgacactgtcgcaaaacaacaacagcaactttgcctggactggtgccaccaagtatcatctgaacggcagagactctctggtgaattcgggcgtcgccatggcaaccaacaaggacgacgaggaccgcttcttcccatccagcggcatcctcatgtttggcaagcagggagctggaaaagacaacgtggactatagcaacgtgatgctaaccagcgaggaagaaatcaagaccaccaaccccgtggccacagaacagtatggcgtggtggctgataacctacagcagcaaaacaccgctcctattgtgggggccgtcaacagccagggagccttacctggcatggtctggcagaaccgggacgtgtacctgcagggtcctatttgggccaagattcctcacacagatggcaactttcacccgtctcctttaatgggcggctttggacttaaacatccgcctcctcagatcctcatcaaaaacactcctgttcctgcggatcctccaacagcgttcaaccaggccaagctgaattctttcatcacgcagtacagcaccggacaagtcagcgtggagatcgagtgggagctgcagaaggagaacagcaagcgctggaacccagagattcagtatacttccaactactacaaatctacaaatgtggactttgctgttaatactgagggtgtttactctgagcctcgccccattggcactcgttaccccacccgtaatctgtaa

SEQ ID NO: 466 - protein, 734 aa, Adeno-associated virus; identical to SEQ ID NO: 291

SEQ ID NO: 467 - DNA, 2214 bp, Adeno-associated virus
atggctgctgacggttatcttccagattggctcgaggacaacctctctgagggcattcgcgagtggtgggacctgaaacctggagccccgaaacccaaagccaaccagcagaagcaggacgacggccggggtctggtgcttcctggctacaagtacctcggacccttcaacggactcgacaagggggagcccgtcaacgcggcggacgcagcggccctcgagcacgacaaggcctacgaccagcagctcaaagcgggtgacaatccgtacctgcggtataaccacgccgacgccgagtttcaggagcgtctgcaagaagatacgtcttttgggggcaacctcgggcgagcagtcttccaggccaagaagcgggttctcgaacctctcggtctggttgaggaagctgctaagacggctcctggaaagaagagaccggtagaaccgtcacctcagcgttcccccgactcctccacgggcatcggcaagaaaggccagcagcccgctagaaagagactgaactttgggcagactggcgactcagagtcagtccccgaccctcaacctctcggagaaccaccagcaggcccctctggtctgggatctggtacaatggctgcaggcggtggcgctccaatggcagacaataacgaaggcgccgacggagtgggtaatgcctcaggaaattggcattgcgattccacatggctgggcgacagagtcatcaccaccagcacccgaacctgggctttgcccacctacaacaaccacctctacaagcaaatctccagtcagtcagcaggtagcaccaacgacaacgtctacttcggctacagcaccccctgggggtattttgacttcaacagattccactgtcacttctcaccacgtgactggcagcgactcatcaacaacaactggggattccggcccaagaagctcaacttcaagctcttcaacatccaagtcaaggaggtcacgacgaatgacggcgtcacgaccatcgctaataaccttaccagcacggttcaggtcttttcggactcggagtaccagctgccgtacgtcctcggctctgcccaccagggctgcctgcctccgttcccggcggacgtcttcatgattcctcagtacggctacctgactctgaacaatggcagccaatcggtgggacgttcatccttctactgcctggaatacttcccttctcaggtgctgagaacgggtaacaacttcaccttcagttacaccttcgaggacgtgcctttccacagcagctacgcgcacagccagagcctagaccggctgatgaatcccctcatcgaccagtacctgtattacctggctagaacacagagtaacccaggaggcacatctggcaatcgggaactgcagttttaccagggcgggccttccaccatggccgaacaagccaagaactggttacctggaccttgcttccggcaacaaagagtttccaaaacactggatcaaaacaacaacagcaactttgcttggactggtgccaccaaatatcacctgaacggcagaaactcattggtgaatcctggtgtcgccatggcaactcacaaggacgacgaggaccgctttttcccatccagcggagtcctgatttttggaaaaactggagcaaccaacaagactacattggaaaacgtgttaatgacaaatgaagaagaaattcgtcctactaatcctgtggccacagaagaatacgggatagtcagcagcaatttacaagcggccaatactgcagcccagacacaagttgtcaacaaccagggagccttacctggcatggtctggcagaaccgggacgtgtacctgcagggtcccatctgggccaaaattcctcacacagacggcaactttcacccgtctccgctgatgggcggctttggactgaagcatccgcctcctcagatcctgatcaaaaacactcctgttcctgctaatcccccggaggtgtttacgcctgccaagtttgcttctttcatcacacagtacagcaccggccaggtcagcgtggagatcgagtgggagctgcagaaggagaacagcaagcgctggaacccagagattcagtatacctccaattttgacaaacagactggtgtggactttgccgttgacagccagggtgtttattctgagcctcgccccattggtactcgttacctcacccgtaatctgtaa

SEQ ID NO: 468 - protein, 737 aa, Adeno-associated virus
MAADGYLPDWLEDNLSEGIREWWDLKPGAPKPKANQQKQDDGRGLVLPGYKYLGPFNGLDKGEPVNAADAAALEHDKAYDQQLKAGDNPYLRYNHADAEFQERLQEDTSFGGNLGRAVFQAKKRVLEPLGLVEEAAKTAPGKKRPVEPSPQRSPDSSTGIGKKGQQPARKRLNFGQTGDSESVPDPQPLGEPPAGPSGLGSGTMAAGGGAPMADNNEGADGVGNASGNWHCDSTWLGDRVITTSTRTWALPTYNNHLYKQISSQSAGSTNDNVYFGYSTPWGYFDFNRFHCHFSPRDWQRLINNNWGFRPKKLNFKLFNIQVKEVTTNDGVTTIANNLTSTVQVFSDSEYQLPYVLGSAHQGCLPPFPADVFMIPQYGYLTLNNGSQSVGRSSFYCLEYFPSQVLRTGNNFTFSYTFEDVPFHSSYAHSQSLDRLMNPLIDQYLYYLARTQSNPGGTSGNRELQFYQGGPSTMAEQAKNWLPGPCFRQQRVSKTLDQNNNSNFAWTGATKYHLNGRNSLVNPGVAMATHKDDEDRFFPSSGVLIFGKTGATNKTTLENVLMTNEEEIRPTNPVATEEYGIVSSNLQAANTAAQTQVVNNQGALPGMVWQNRDVYLQGPIWAKIPHTDGNFHPSPLMGGFGLKHPPPQILIKNTPVPANPPEVFTPAKFASFITQYSTGQVSVEIEWELQKENSKRWNPEIQYTSNFDKQTGVDFAVDSQGVYSEPRPIGTRYLTRNL

SEQ ID NO: 469 - DNA, 2214 bp, Adeno-associated virus
atggctgccgatggttatcttccagattggctcgaggacaacctctctgagggcattcgcgagtggtgggacctgaaacctggagccccgaaacccaaagccaaccagcaaaagcaggacgacggccggggtctggtgcttcctggctacaagtacctcggacccttcaacggactcgacaagggggagcccgtcaacgcggcggacgcagcggccctcgagcacgacaaggcctacgaccagcagctcaaagcgggtgacaatccgtacctgcggtataatcacgccgacgccgagtttcaggagcgtctgcaagaagatacgtcttttgggggcaacctcgggcgagcagtcttccaggccaagaagcgggttctcgaacctctcggtctggttgaggaaggcgctaagacggctcctggaaagaagagaccggtagagccgtcaccacagcgttcccccgactcctccacgggcatcggcaagaaaggccagcagcccgccagaaagagactcaatttcggtcagactggcgactcagagtcagtccccgaccctcaacctatcggagaacctccagcagcgccctctagtgtgggatctggtacaatggctgcaggcggtggcgcaccaatggcagacaataacgaaggtgccgacggagtgggtagttcctcgggaaattggcattgcgattccacacggctgggcgacagagtcatcaccaccagcacccggacctgggctttgcccacctacaacaaccacctctacaagcaaatctccagtcagtcagcaggtagcaccaacgacaacgtctacttcggctacagcaccccctgggggtattttgacttcaacagattccactgtcacttctcaccacgtgactggcagcggctcatcaacaacaactggggattccggcccaagaagctcaacttcaagctgttcaacatccaggtcaaggaggtcacaacgaatgacggcgtcacgaccatcgccaataaccttaccagcacggttcaggtcttttcggactcggaataccagctgccctacgtcctcggctccgcacaccagggctgcctgcctccgttcccggcggacgtcttcatgattccccagtacggctacctgactctgaacaatggcagccaatcggtgggtcgttcctctttctactgcctggaatatttcccttctcaaatgctgagaacgggcaacaacttcaccttcagctacaccttcgaggacgttcccttccacagcagctacgcacacagccagagcctggaccggctgatgaatcctcttatcgaccagtacctgtattacctggccagaacacagagcaacgcaggaggcacagctggcaatcgggaactgcagttttatcagggcgggcctaccaccatggccgaacaagccaaaaactggctgcctggaccttgcttccggcaacgaagagtctccaagacgctggatcaaaacaacaacagcaactttgcttggactggtgccaccaaataccatctaaatggaagaaattcattggttaatcccggtgtcgccatggcaacccacaaggacgacgaggaacgcttcttcccttcgagcggagtcctgatttttggaaaaactggagcagctaataagactacactggaaaatgtgttaatgacaaatgaagaggaaattcgtcctaccaacccggtagccaccgaggaatacgggactgttagcagcaacctgcaggcggctaacactgcagcccagacacaagttgtcaacaaccagggagccttacctggtatggtctggcagaaccgggacgtgtacctgcagggtcccatctgggccaagattcctcacacggacggcaactttcacccgtctccgctgatgggcggctttggactgaagcatccgcctcctcagatcctgatcaaaaacactcctgttcctgctaatcccccggaggtgtttacgcctgccaagtttgcttctttcatcacacagtacagcaccggccaggtcagcgtggagatcgagtgggagctgcagaaggagaacagcaagcgctggaacccagagattcagtatacctccaattttgacaaacagactggtgtggactttgccgttgacagccagggtgtttattctgagcctcgccccattggtactcgttacctcacccgtaatctgtaa

SEQ ID NO: 470 - protein, 737 aa, Adeno-associated virus
MAADGYLPDWLEDNLSEGIREWWDLKPGAPKPKANQQKQDDGRGLVLPGYKYLGPFNGLDKGEPVNAADAAALEHDKAYDQQLKAGDNPYLRYNHADAEFQERLQEDTSFGGNLGRAVFQAKKRVLEPLGLVEEGAKTAPGKKRPVEPSPQRSPDSSTGIGKKGQQPARKRLNFGQTGDSESVPDPQPIGEPPAAPSSVGSGTMAAGGGAPMADNNEGADGVGSSSGNWHCDSTRLGDRVITTSTRTWALPTYNNHLYKQISSQSAGSTNDNVYFGYSTPWGYFDFNRFHCHFSPRDWQRLINNNWGFRPKKLNFKLFNIQVKEVTTNDGVTTIANNLTSTVQVFSDSEYQLPYVLGSAHQGCLPPFPADVFMIPQYGYLTLNNGSQSVGRSSFYCLEYFPSQMLRTGNNFTFSYTFEDVPFHSSYAHSQSLDRLMNPLIDQYLYYLARTQSNAGGTAGNRELQFYQGGPTTMAEQAKNWLPGPCFRQRRVSKTLDQNNNSNFAWTGATKYHLNGRNSLVNPGVAMATHKDDEERFFPSSGVLIFGKTGAANKTTLENVLMTNEEEIRPTNPVATEEYGTVSSNLQAANTAAQTQVVNNQGALPGMVWQNRDVYLQGPIWAKIPHTDGNFHPSPLMGGFGLKHPPPQILIKNTPVPANPPEVFTPAKFASFITQYSTGQVSVEIEWELQKENSKRWNPEIQYTSNFDKQTGVDFAVDSQGVYSEPRPIGTRYLTRNL

SEQ ID NO: 471 - DNA, 2208 bp, Adeno-associated virus
atggctgccgatggttatcttccagattggctcgaggacactctctctgaaggaataagacagtggtggaagctcaaacctggcccaccaccaccaaagcccgcagagcggcataaggacgacagcaggggtcttgtgcttcctgggtacaagtacctcggacccttcaacggactcgacaagggggagccggtcaacgaggcagacgccgcggccctcgagcacgacaaggcctacgaccggcagctcgacagcggagacaacccgtacctcaagtacaaccacgccgacgcggagtttcaggagcgtcttaaagaagatacgtcttttgggggcaacctcggacgagcagtcttccaggcgaaaaagagggttcttgaacctctgggcctggttgaggaacctgttaagacggctccgggaaaaaagaggccggtagagcactctcctgcggagccagactcctcctcgggaaccggaaaagcgggccagcagcctgcaagaaaaagattgaattttggtcagactggagacgcagactccgtacctgacccccagcctctcggacagccaccagcagccccctctggtttgggatctactacaatggctacaggcagtggcgcaccaatggcagacaataacgagggtgccgatggagtgggtaattcttcaggaaattggcattgcgattcccaatggctgggcgacagagtcatcaccaccagcacccgaacctgggcccagcccacctacaacaaccacctctacaagcaaatctcaagccaatcaggagcctcaaacgacaaccactactttggctacagcaccccttgggggtattttgacttcaacagattccactgccacttttcaccacgtgactggcaaagactcatcaacaacaactggggattccgacccaagagactcaacttcaagctctttaacattcaagtcaaagaggtcacgcagaatgacggtacgacgacgattgccaataaccttaccagcacggttcaggtgtttactgactcggagtaccagctcccgtacgtcctcgggtcggcgcatcaaggatgcctcccgccgtttccagcggacgtcttcatggtcccacagtatggatacctcaccctgaacaacgggagtcaggcggtaggacgctcttccttttactgcctggagtactttccttctcagatgcttcgtactggaaacaactttcagttcagctacacctttgaagacgttcctttccacagcagctacgctcacagccagagtctggatcggctgatgaatcctctgatcgaccagtacctgtattatctgaacaaaacacaatcaaatagtggagctcttcagcagtctcggctactgtttagtcaagctggacccaccagcatgtctcttcaagctaaaaactggctacctggaccttgctacagacagcagcgtctgtcaaagcaggcaaacgacaacaacaacagcaactttccctggactgcggctacaaagtaccacctaaatggccgggactcgttggttaatccaggaccagctatggccagtcacaaagacgatgaagaaaagtttttccccatgcatggaaccctgatatttggtaaacaaggaacaaatgctaacgacgcggatttggacaatgtcatgattacagatgaagaagaaatccgcaccaccaatcccgtggctacggagcagtacggatatgtgtcaaataatttgcaaaactcaaatactggtccaactactggaactgtcaatcaccgaggagcgttacctggcatggtgtggcaggatcgagacgtgtacctgcagggacccatttgggccaagattcctcacaccgatggacactttcatccttctccactgatgggaggttttgggctcaaacacccgcctcctcagatcatgatcaaaaacactcccgttccagccaatcctcccacaaacttcagttctgccaagtttgcttctttcatcacacagtattccacggggcaggtcagcgtggagatcgagtgggagctgcagaaagagaacagcaaacgctggaatcccgaaattcagtacacttccaactacaacaaatctgttaatgtggactttactgtggacactaatggcgtgtattcagagcctcgccccattggcaccagatacctgactcgtaatctgtaa

SEQ ID NO: 472 - protein, 735 aa, Adeno-associated virus
MAADGYLPDWLEDTLSEGIRQWWKLKPGPPPPKPAERHKDDSRGLVLPGYKYLGPFNGLDKGEPVNEADAAALEHDKAYDRQLDSGDNPYLKYNHADAEFQERLKEDTSFGGNLGRAVFQAKKRVLEPLGLVEEPVKTAPGKKRPVEHSPAEPDSSSGTGKAGQQPARKRLNFGQTGDADSVPDPQPLGQPPAAPSGLGSTTMATGSGAPMADNNEGADGVGNSSGNWHCDSQWLGDRVITTSTRTWAQPTYNNHLYKQISSQSGASNDNHYFGYSTPWGYFDFNRFHCHFSPRDWQRLINNNWGFRPKRLNFKLFNIQVKEVTQNDGTTTIANNLTSTVQVFTDSEYQLPYVLGSAHQGCLPPFPADVFMVPQYGYLTLNNGSQAVGRSSFYCLEYFPSQMLRTGNNFQFSYTFEDVPFHSSYAHSQSLDRLMNPLIDQYLYYLNKTQSNSGALQQSRLLFSQAGPTSMSLQAKNWLPGPCYRQQRLSKQANDNNNSNFPWTAATKYHLNGRDSLVNPGPAMASHKDDEEKFFPMHGTLIFGKQGTNANDADLDNVMITDEEEIRTTNPVATEQYGYVSNNLQNSNTGPTTGTVNHRGALPGMVWQDRDVYLQGPIWAKIPHTDGHFHPSPLMGGFGLKHPPPQIMIKNTPVPANPPTNFSSAKFASFITQYSTGQVSVEIEWELQKENSKRWNPEIQYTSNYNKSVNVDFTVDTNGVYSEPRPIGTRYLTRNL

SEQ ID NO: 473 - DNA, 2217 bp, Adeno-associated virus
atggctgccgatggttatcttccagattggctcgaggacaacctctctgagggcattcgcgagtggtgggcgctgaaacctggagccccgaagcccaaagccaaccagcaaaagcaggacgacggccggggtctggtgcttcctggctacaagtacctcggacccttcaacggactcgacaagggggagcccgtcaacgcggcggacgcagcggccctcgagcacgacaaggcctacgaccagcagctgcaggcgggtgacaatccgtacctgcggtataatcacgccgacgccgagtttcaggagcgtctgcaagaagatacgtcttttgggggcaacctcgggcgagcagtcttccaggccaagaagcgggttctcgaacctctcggtctggttgaggaaggcgctaagacggctcctggaaagaagagaccggtagagccgtcaccacagcgttcccccgactcctccacgggcatcggcaagaaaggccagcagcccgccagaaagagactcaatttcggtcagactggcgactcagagtcagtccccgaccctcaacctatcggagaacctccagcagcgccctctagtgtgggatctggtacaatggctgcaggcggtggcgcgccaatggcagacaataacgaaggtgccgacggagtgggtagttcctcgggaaattggcattgcgattccacatggctgggcgacagagtcatcaccaccagcacccgaacctgggccctgcccacctacaacaaccacctctacaagcaaacctccaacgggacctcgggaggcagcaccaacgacaacacctactttggctacagcaccccctgggggtattttgactttaacagattccactgccacttctcaccacgtgactggcagcgactcatcaacaacaactggggattccggcccaagagactcagcttcaagctcttcaacatccaggtcaaagaggtcacgcagaatgaaggcaccaagaccatcgccaataacctcaccagcaccatccaggtgtttacggactcggaataccagctgccgtacgtcctcggctctgcccaccagggctgcctgcctccgttcccggcggacgtcttcatgattcctcagtacggctacctgactctcaacaacggtagtcaggccgtgggacgttcctccttctactgcctggagtacttcccctctcagatgctgagaacgggcaacaacttttccttcagctacactttcgaggacgtgcctttccacagcagctacgcgcacagccagagtttggacaggctgatgaatcctctcatcgaccagtacctgtactacctgtcaagaacccagtctacgggaggcacagcgggaacccagcagttgctgttttctcaggccgggcctagcaacatgtcggctcaggccagaaactggctgcctggaccctgctacagacagcagcgcgtctccacgacactgtcgcaaaacaacaacagcaactttgcctggactggtgccaccaagtatcatctgaacggcagagactctctggtgaatccgggcgtcgccatggcaaccaacaaggacgacgaggaccgcttcttcccatccagcggcatcctcatgtttggcaagcagggagctggaaaagacaacgtggactatagcaacgtgatgctaaccagcgaggaagaaatcaagaccaccaaccccgtggccacagaacagtatggcgtggtggctgataacctacagcagcaaaacaccgctcctattgtgggggccgtcaacagccagggagccttacctggcatggtctggcagaaccgggacgtgtacctgcagggtcctatttgggccaagattcctcacacagatggcaactttcacccgtctcctttaatgggcggctttggacttaaacatccgcctcctcagatcctcatcaaaaacactcctgttcctgcggatcctccaacagcgttcaaccaggccaagctgaattctttcatcacgcagtacagcaccggacaagtcagcgcggagatcgagtgggagctgcagaaggagaacagcaagcgctggaacccagagattcagtatacttccaactactacaaatctacaaatgtggactttgctgttaatactgagggtgtttactctgagcctcgccccattggcactcgttacctcacccgtaatctgtaa

SEQ ID NO: 474 - protein, 738 aa, Adeno-associated virus
MAADGYLPDWLEDNLSEGIREWWALKPGAPKPKANQQKQDDGRGLVLPGYKYLGPFNGLDKGEPVNAADAAALEHDKAYDQQLQAGDNPYLRYNHADAEFQERLQEDTSFGGNLGRAVFQAKKRVLEPLGLVEEGAKTAPGKKRPVEPSPQRSPDSSTGIGKKGQQPARKRLNFGQTGDSESVPDPQPIGEPPAAPSSVGSGTMAAGGGAPMADNNEGADGVGSSSGNWHCDSTWLGDRVITTSTRTWALPTYNNHLYKQTSNGTSGGSTNDNTYFGYSTPWGYFDFNRFHCHFSPRDWQRLINNNWGFRPKRLSFKLFNIQVKEVTQNEGTKTIANNLTSTIQVFTDSEYQLPYVLGSAHQGCLPPFPADVFMIPQYGYLTLNNGSQAVGRSSFYCLEYFPSQMLRTGNNFSFSYTFEDVPFHSSYAHSQSLDRLMNPLIDQYLYYLSRTQSTGGTAGTQQLLFSQAGPSNMSAQARNWLPGPCYRQQRVSTTLSQNNNSNFAWTGATKYHLNGRDSLVNPGVAMATNKDDEDRFFPSSGILMFGKQGAGKDNVDYSNVMLTSEEEIKTTNPVATEQYGVVADNLQQQNTAPIVGAVNSQGALPGMVWQNRDVYLQGPIWAKIPHTDGNFHPSPLMGGFGLKHPPPQILIKNTPVPADPPTAFNQAKLNSFITQYSTGQVSAEIEWELQKENSKRWNPEIQYTSNYYKSTNVDFAVNTEGVYSEPRPIGTRYLTRNL

SEQ ID NO: 475 - DNA, 2217 bp, Adeno-associated virus
atggctgctgacggttatcttccagattggctcgaggacaacctctctgagggcattcgcgagtggtgggacctgaaacctggagcccccaagcccaaggccaaccagcagaagcaggacgacggccggggtctggtgcttcctggctacaagtacctcggacccttcaacggactcgacaagggggagcccgtcaacgcggcggacgcagcggccctcgagcacgacaaggcctacgaccagcagctcaaagcgggtgacaatccgtacctgcggtataatcacgccgacgccgagtttcaggagcgtctgcaagaagatacgtcttttgggggcaacctcgggcgagcagtcttccaggccaagaagcgggttctcgaacctctcggtctggttgaggaagctgctaagacggctcctggaaagaagagaccggtagaaccgtcacctcagcgttcccccgactcctccacgggcatcggcaagaaaggccagcagcccgctagaaagagactgaactttgggcagactggcgactcagagtcagtccccgaccctcaaccaatcggagaacctccagcagcgccctctagtgtgggatctggtacaatggccgcaggcggtggcgcaccaatggcagacaataacgaaggtgccgacggagtgggtagttcctcgggaaattggcattgcgattccacatggctgggcgacagagtcatcaccaccagcacccgaacctgggccctgcccacctacaacaaccacctctacaagcaaatctccaacgggacctcgggaggcagcaccaacgacaacacctactttggctacagcaccccctgggggtattttgactttaacagattccactgccacttctcaccacgtgactggcagcgactcatcaacaacaactggggattccggcccaagagactcagcttcaagctcttcaacatccaggtcaaagaggtcacgcagaatgaaggcaccaagaccatcgccaataacctcaccagcaccatccaggtgtttacggactcggaataccagctgccgtacgtcctcggctctgcccaccagggctgcctgcctccgttcccggcggacgtcttcatgattcctcagtacggctacctgactctcaacaacggtagtcaggccgtgggacgttcctccttctactgcctggagtacttcccctctcagatgctgagaacgggcaacaacttttccttcagctacactttcgaggacgtgcctttccacagcagctacgcgcacagccagagtttggacaggctgatgaatcctctcatcgaccagtacctgtactacctgtcaagaacccagtctacgggaggcacagcgggaacccagcagctgctgttttctcaggccgggcctagcaacatgtcggctcaggccagaaactggctgcctggaccctgctacagacagcagcgcgtctccacgacactgtcgcaaaacaacaacagcaactttgcctggactggtgccaccaagtatcatctgaacggcagagactctctggtgaatccgggcgtcgccatggcaaccaacaaggacgacgaggaccgcttcttcccatccagcggcatcctcatgtttggcaagcagggagctggaaaagacaacgtggactatagcaacgtgatgctaaccagcgaggaagaaatcaagaccaccaaccccgtggccacagaacagtatggcgtggtggctgataacctacagcagcaaaacaccgctcctattgtgggggccgtcaacagccagggagccttacctggcatggtctggcagaaccgggacgtgtacctgcagggtcctatttgggccaagattcctcacacagatggcaactttcacccgtctcctttaatgggcggctttggacttaaacatccgcctcctcagatcctcatcaaaagcactcctgttcctgcggatcctccaacagcgttcaaccaggccaagctgaattctttcatcacgcagtacagcaccggacaagtcagcgtggagatcgagtgggagctgcagaaggagaacagcaagtgctggaacccagagattcagtatacttccaactactacaaatctacaaatgtggactttgctgttaatactgagggtgtttactctgagcctcgccccattggcactcgttacctcacccgtaatctgtaa

SEQ ID NO: 476 - protein, 738 aa, Adeno-associated virus
MAADGYLPDWLEDNLSEGIREWWDLKPGAPKPKANQQKQDDGRGLVLPGYKYLGPFNGLDKGEPVNAADAAALEHDKAYDQQLKAGDNPYLRYNHADAEFQERLQEDTSFGGNLGRAVFQAKKRVLEPLGLVEEAAKTAPGKKRPVEPSPQRSPDSSTGIGKKGQQPARKRLNFGQTGDSESVPDPQPIGEPPAAPSSVGSGTMAAGGGAPMADNNEGADGVGSSSGNWHCDSTWLGDRVITTSTRTWALPTYNNHLYKQISNGTSGGSTNDNTYFGYSTPWGYFDFNRFHCHFSPRDWQRLINNNWGFRPKRLSFKLFNIQVKEVTQNEGTKTIANNLTSTIQVFTDSEYQLPYVLGSAHQGCLPPFPADVFMIPQYGYLTLNNGSQAVGRSSFYCLEYFPSQMLRTGNNFSFSYTFEDVPFHSSYAHSQSLDRLMNPLIDQYLYYLSRTQSTGGTAGTQQLLFSQAGPSNMSAQARNWLPGPCYRQQRVSTTLSQNNNSNFAWTGATKYHLNGRDSLVNPGVAMATNKDDEDRFFPSSGILMFGKQGAGKDNVDYSNVMLTSEEEIKTTNPVATEQYGVVADNLQQQNTAPIVGAVNSQGALPGMVWQNRDVYLQGPIWAKIPHTDGNFHPSPLMGGFGLKHPPPQILIKSTPVPADPPTAFNQAKLNSFITQYSTGQVSVEIEWELQKENSKCWNPEIQYTSNYYKSTNVDFAVNTEGVYSEPRPIGTRYLTRNL

SEQ ID NO: 477 - protein, 738 aa, Adeno-associated virus
MAADGYLPDWLEDNLSEGIREWWDLKPGAPKPKANQQKQDDGRGLVLPGYKYLGPFNGLDKGEPVNAADAAALEHDKAYDQQLKAGDNPYLRYNHADAEFQERLQEDTSFGGNLGRAVFQAKKRVLEPLGLVEEAAKTAPGKKRPVEPSPQRSPDSSTGIGKKGQQPARKRLNFGQTGDSESVPDPQPIGEPPAAPSSVGSGTMAAGGGAPMADNNEGADGVGSSSGNWHCDSTWLGDRVITTSTRTWALPTYNNHLYKQISNGTSGGSTNDNTYFGYSTPWGYFDFNRFHCHFSPRDWQRLINNNWGFRPKRLSFKLFNIQVKEVTQNEGTKTIANNLTSTIQVFTDSEYQLPYVLGSAHQGCLPPFPADVFMIPQYGYLTLNNGSQAVGRSSFYCLEYFPSQMLRTGNNFSFSYTFEDVPFHSSYAHSQSLDRLMNPLIDQYLYYLSRTQSTGGTAGTQQLLFSQAGPSNMSAQARNWLPGPCYRQQRVSTTLSQNNNSNFAWTGATKYHLNGRDSLVNPGVAMATNKDDEDRFFPSSGILMFGKQGAGKDNVDYSNVMLTSEEEIKTTNPVATEQYGVVADNLQQQNTAPIVGAVNSQGALPGMVWQNRDVYLQGPIWAKIPHTDGNFHPSPLMGGFGLKHPPPQILIKSTPVPADPPTAFNQAKLNSFITQYSTGQVSVEIEWELQKENSKRWNPEIQYTSNYYKSTNVDFAVNTEGVYSEPRPIGTRYLTRNL

SEQ ID NO: 478 - DNA, 2217 bp, Adeno-associated virus
atggctgctgacggttatcttccagattggctcgaggacaacctctctgagggcattcgcgagtggtgggacctgaaacctggagcccccaagcccaaggccaaccagcagaagcaggacgacggccggggtctggtgcttcctggctacaagtacctcggacccttcaacggactcgacaagggggagcccgtcaacgcggcggacgcagcggccctcgagcacgacaaggcctacgaccagcagctcaaagcgggtgacaatccgtacctgcggtataaccacgccgacgccgagtttcaggagcgtctgcaagaagatacgtcttttgggggcaacctcgggcgagcagtcttccaggccaagaagcgggttctcgaacctctcggtctggttgaggaagctgctaagacggctcctggaaagaagagaccggtagaaccgtcacctcagcgttcccccgactcctccacgggcatcggcaagaaaggccagcagcccgctagaaagagactgaactttgggcagactggcgactcagagtcagtccccgaccctcaaccaatcggagaaccaccagcaggcccctctggtctgggatctggtacaatggctgcaggcggtggcgcaccaatggctgacaataacgagggcgccgacggagtgggtaatgcctcaggaaattggcattgcgattccacatggctgggcgacagagtcatcaccaccagcacccgaacctgggctttgcccacctacaacaaccacctctacaagcaaatctccagtcagtcagcaggtagcaccaacgacaacgtctacttcggctacagcaccccctgggggtattttgacttcaacagattccactgtcacttctcaccacgtgactggcagcggctcatcaacaacaactggggattccggcccaagaagctcaacttcaagctgttcaacatccaggtcaaggaggtcacaacgaatgacggcgtcacgaccatcgccaataaccctaccagcacggttcaggtcttttcggactcggaataccagctgccctacgtcctcggctccgcacaccagggctgcctgcctccgttcccggcggacgtcttcatgattccccagtacggctacctgactctgaacaatggcagccaatcggtgggtcgttcctctttctactgcctggaatatttcccttctcaaatgctgagaacgggcaacaacttcaccttcagctacaccttcgaggacgttcccttccacagcagctacgcacacagccagagcctggaccggctgatgaatcctcttatcgaccagtacctgtattacctggccagaacacagagcaacgcaggaggcacagctggcaatcgggaactgcagttttatcagggcgggcctaccaccatggccgaacaagccaaaaactggctgcctggaccctgctacagacagcagcgcgtctccacgacactgtcgcaaaacaacaacagcaactttgcctggactggtgccaccaagtatcatctgaacggcagagactctctggtgaatccgggcgtcgccatggcaaccaacaaggacgacgaggaccgcttcttcccatccagcggcatcctcatgtttggcaagcagggagctggaaaagacaacgtggactatagcaacgtgatgctaaccagcgaggaagaaatcaagaccaccaaccccgtggccacagaacagtatggcgtggtggctgataacctacagcagcaaaacaccgctcctattgtgggggccgtcaacagccagggagccttacctggcatggtctggcagaaccgggacgtgtacctgcagggtcctatttgggccaagattcctcacacagatggcaactttcacccgtctcctttaatgggcggctttggacttaaacatccgcctcctcagatcctcatcaaaaacactcctgttcctgcggatcctccaacagcgttcaaccaggccaagctgaattctttcatcacgcagtacagcaccggacaagtcagcgtggagatcgagtgggagctgcagaaggagaacagcaagcgctggaacccagagattcagtatacttccaactactacaaatctacaaatgtggactttgctgttaatactgagggtgtttactctgagcctcgccccattggcactcgttacctcacccgtaatctgtaa

SEQ ID NO: 479 - protein, 738 aa, Adeno-associated virus
MAADGYLPDWLEDNLSEGIREWWDLKPGAPKPKANQQKQDDGRGLVLPGYKYLGPFNGLDKGEPVNAADAAALEHDKAYDQQLKAGDNPYLRYNHADAEFQERLQEDTSFGGNLGRAVFQAKKRVLEPLGLVEEAAKTAPGKKRPVEPSPQRSPDSSTGIGKKGQQPARKRLNFGQTGDSESVPDPQPIGEPPAGPSGLGSGTMAAGGGAPMADNNEGADGVGNASGNWHCDSTWLGDRVITTSTRTWALPTYNNHLYKQISSQSAGSTNDNVYFGYSTPWGYFDFNRFHCHFSPRDWQRLINNNWGFRPKKLNFKLFNIQVKEVTTNDGVTTIANNPTSTVQVFSDSEYQLPYVLGSAHQGCLPPFPADVFMIPQYGYLTLNNGSQSVGRSSFYCLEYFPSQMLRTGNNFTFSYTFEDVPFHSSYAHSQSLDRLMNPLIDQYLYYLARTQSNAGGTAGNRELQFYQGGPTTMAEQAKNWLPGPCYRQQRVSTTLSQNNNSNFAWTGATKYHLNGRDSLVNPGVAMATNKDDEDRFFPSSGILMFGKQGAGKDNVDYSNVMLTSEEEIKTTNPVATEQYGVVADNLQQQNTAPIVGAVNSQGALPGMVWQNRDVYLQGPIWAKIPHTDGNFHPSPLMGGFGLKHPPPQILIKNTPVPADPPTAFNQAKLNSFITQYSTGQVSVEIEWELQKENSKRWNPEIQYTSNYYKSTNVDFAVNTEGVYSEPRPIGTRYLTRNL

SEQ ID NO: 480 - DNA, 2208 bp, Adeno-associated virus
atggctgccgatggttatcttccagattggctcgaggacaacctctctgagggcattcacgagtggtgggacccgaaacctggagccccgaaacccaaagccaaccagcaaaagcaggacgacggccggggtctggtgcttcctggctacaagtacctcggacccttcaacggactcgacaagggggagcccgtcaacgcggcggacgcagcggccctcgagcacgacaaggcctacgaccagcagctcaaagcgggtgacaatccgtacctgcggtataatcacgccgacgccgagtttcaggagcgtctgcaagaagatacgtcttttgggggcaacctcgggcgagcagtcttccaggccaagaagcgggttctcgaacctctcggtctggttgaggaaggcgctaagacggctcctggaaagaagagaccggtagagccgtcaccacagcgttcccccgactcctccacgggcatcggcaagaaaggccagcagcccgccagaaagagactcaatttcggtcagactggcgactcagagtcagtccccgaccctcaacctatcggagaacctccagcagcgccctctagtgtgggatctggtacaatggctgcaggcggtggcgcaccaatggcagacaataacgaaggtgccgacggagtgggtagttcctcgggaaattggcattgcgattccacatggctgggcgacagagtcatcaccaccagcacccgaacctgggccctgcccacccacaacaaccacctctacaagcaaatctccaacgggacctcgggaggcagcaccaacgacaacgtctacttcggctacagcaccccctgggggtattttgacttcaacagattccactgtcacttctcaccacgtgaccggcagcgactcatcaacaacaactggggattccggcccaagagactcagcttcaagctcttcaacatccaggtcaaagaggtcacgcagaatgaaggcaccaagaccatcgccaataacctcaccagcaccatccaggtgtttacggactcggaataccagctgccgtacgtcctcggctctgcccaccagggctgcctgcctccgttcccggcggacgtcttcatgattcctcagtacggctacctgactctcaacaacggtagtcaggccgtgggacgttcctccttctactgcctggagtacttcccctctcagatgctgagaacgggcaacaacttttccttcagctacactttcgaggacgtgcctttccacagcagctacgcgcacagccagagtttggacaggctgatgaatcctctcatcgaccagtacctgtactacctgtcaagaacccagtctacggaaggcacagcgggaacccagcagttgctgttttctcaggccgggcctagcaacatgtcggctcaggccagaaactggctgcctggaccctgctacagacagcagcgcgtctccacgacactgtcgcaaaacaacaacagcaactttgcctggactggtgccaccaagtatcatctgaacggcagagactctctggtgaatccgggcgtcgccatggcaacccacaaggacgacgaggaacgcttcttcccttcgagcggagtcctgatttttggaaaaactggagcagctaataagactacactggaaaatgtgttaatgacaaatgaagaggaaattcgtcctaccaacccggtagccaccgaggaatacgggactgttagcagcaacctgcaggcggctaacactgcagcccagacacaagttgtcaacaaccagggagccttacctggtatggtctggcagaaccgggacgtgtacctgcagggtcccatctgggccaagattcctcacacggacggcaactttcacccgtctccgctgatgggcggctttggactgaagcatcctcagatcctgatcaaaaacactcctgttcctgctaatcccccggaggtgtttacgcctgccaagtttgcttctttcatcacacagtacagcaccggccaggtcagcgtggagatcgagtgggagctgcagaaggagaacagcaagcgctggaacccagagattcagtatacctccaattttgacaaacagactggtgtggactttgccgttgacagccagggtgtttattctgagcctcgccccattggtactcgttacctcacccgtaatctgtaa

SEQ ID NO: 481 - protein, 735 aa, Adeno-associated virus
MAADGYLPDWLEDNLSEGIHEWWDPKPGAPKPKANQQKQDDGRGLVLPGYKYLGPFNGLDKGEPVNAADAAALEHDKAYDQQLKAGDNPYLRYNHADAEFQERLQEDTSFGGNLGRAVFQAKKRVLEPLGLVEEGAKTAPGKKRPVEPSPQRSPDSSTGIGKKGQQPARKRLNFGQTGDSESVPDPQPIGEPPAAPSSVGSGTMAAGGGAPMADNNEGADGVGSSSGNWHCDSTWLGDRVITTSTRTWALPTHNNHLYKQISNGTSGGSTNDNVYFGYSTPWGYFDFNRFHCHFSPRDRQRLINNNWGFRPKRLSFKLFNIQVKEVTQNEGTKTIANNLTSTIQVFTDSEYQLPYVLGSAHQGCLPPFPADVFMIPQYGYLTLNNGSQAVGRSSFYCLEYFPSQMLRTGNNFSFSYTFEDVPFHSSYAHSQSLDRLMNPLIDQYLYYLSRTQSTEGTAGTQQLLFSQAGPSNMSAQARNWLPGPCYRQQRVSTTLSQNNNSNFAWTGATKYHLNGRDSLVNPGVAMATHKDDEERFFPSSGVLIFGKTGAANKTTLENVLMTNEEEIRPTNPVATEEYGTVSSNLQAANTAAQTQVVNNQGALPGMVWQNRDVYLQGPIWAKIPHTDGNFHPSPLMGGFGLKHPQILIKNTPVPANPPEVFTPAKFASFITQYSTGQVSVEIEWELQKENSKRWNPEIQYTSNFDKQTGVDFAVDSQGVYSEPRPIGTRYLTRNL

SEQ ID NO: 482 - protein, 738 aa, Adeno-associated virus
MAADGYLPDWLEDNLSEGIREWWDLKPGAPKPKANQQKQDDGRGLVLPGYKYLGPFNGLDKGEPVNAADAAALEHDKAYDQQLKAGDNPYLRYNHADAEFQERLQEDTSFGGNLGRAVFQAKKRVLEPLGLVEEGAKTAPGKKRPVEPSPQRSPDSSTGIGKKGQQPARKRLNFGQTGDSESVPDPQPIGEPPAAPSSVGSGTMAAGGGAPMADNNEGADGVGSSSGNWHCDSTWLGDRVITTSTRTWALPTYNNHLYKQISNGTSGGSTNDNTYFGYSTPWGYFDFNRFHCHFSPRDWQRPINNNWGFRPKRLSFKLFNIQVKEVTQNEGTKTIANNLTSTIQVFTDSEYQLPYVLGSAHQGCLPPFPADVFMIPQYGYLTLNNGSQAVGRSSFYCLEYFPSQMLRTGNNFSFSYPFEDVPFHSSYAHSQSLDRLMNPLIDQYLYYLSRTQSTGGTAGTQQLLFSQAGPSNMSAQARNWLPGPCYRQQRVSTTLSQNNNSNFAWTGATKYHLNGRDSLVNPGVAMATNKDDEDRFFPSSGILMFGKQGAGKDNVDYSNVMLTSEEEIKTTNPVATEQYGVVADNLQQQDTAPIVGAVNSQGALPGMVWQNRDVYLQGPIWAKIPHTDGNFHPSPLMGGFGLKHPPPQVLIKNTPVPADPPTAFNQAKLNSFITQYSTGQVSVEIEWELQKENSKRWNPEIQYTSNYYKSTNVDFAVNTEGVYSEPRPIGTRYLTRNL

SEQ ID NO: 483 - DNA, 2217 bp, Adeno-associated virus
atggctgccgatggttatcttccagattggctcgaggacaacctctctgagggcattcgcgagtggtgggacctgaaacctggagccccgaaacccaaggccaaccagcaaaagcaggacgacggccggggtctggtgcttcctggctacaagtacctcggacccttcaacggactcgacaagggggagcccgtcaacgcggcggacgcagcggccctcgagcacgacaaggcctacgaccagcagctcaaagcgggtgacaatccgtacctgcggtataatcacgccgacgccgagtttcaggagcgtctgcaagaagatacgtcttttgggggcaacctcgggcgagcagtcttccaggccaagaagcgggttctcgaacctctcggtctggttgaggaaggcgctaagacggctcctggaaagaagagaccggtagagccgtcaccacagcgttcccccgactcctccacgggcatcggcaagaaaggccagcagcccgccagaaagagactcaatttcggtcagactggcgactcagagtcagtccccgaccctcaacctatcggagaacctccagcagcgccctctagtgtgggatctggtacaatggctgcaggcggtggcgcaccaatggcagacaataacgaaggtgccgacggagtgggtagttcctcgggaaattggcattgcgattccacatggctgggcgacagagtcatcaccaccagcacccgaacctgggccctgcccacctacaacaaccacctctacaagcaaatctccaacgggacctcgggaggcagcaccaacgacaacacctactttggctacagcaccccctgggggtattttgactttaacagattccactgccacttctcaccacgtgactggcagcgacccatcaacaacaactggggattccggcccaagagactcagcttcaagctcttcaacatccaggtcaaagaggtcacgcagaatgaaggcaccaagaccatcgccaataacctcaccagcaccatccaggtgtttacggactcggaataccagctgccgtacgtcctcggctctgcccaccagggctgcctgcctccgttcccggcggacgtcttcatgattcctcagtacggctacctgactctcaacaacggtagtcaggccgtgggacgttcctccttctactgcctggagtacttcccctctcagatgctgagaacgggcaacaacttttccttcagctaccctttcgaggacgtgcctttccacagcagctacgcgcacagccagagtttggacaggctgatgaatcctctcatcgaccagtacctgtactacctgtcaagaacccagtctacgggaggcacagcgggaacccagcagttgctgttttctcaggccgggcctagcaacatgtcggctcaggccagaaactggctgcctggaccctgctacagacagcagcgcgtctccacgacactgtcgcaaaacaacaacagcaactttgcctggactggtgccaccaagtatcatctgaacggcagagactctctggtgaatccgggcgtcgccatggcaaccaacaaggacgacgaggaccgcttcttcccatccagcggcatcctcatgtttggcaagcagggagctggaaaagacaacgtggactatagcaacgtgatgctaaccagcgaggaagaaatcaagaccaccaaccccgtggccacagaacagtatggcgtggtggctgataacctacagcagcaagacaccgctcctattgtgggggccgtcaacagccagggagccttacctggcatggtctggcagaaccgggacgtgtacctgcagggtcctatttgggccaagattcctcacacagatggcaactttcacccgtctcctttaatgggcggctttggacttaaacatccgcctcctcaggtcctcatcaaaaacactcctgttcctgcggatcctccaacagcgttcaaccaggccaagctgaattctttcatcacgcagtacagcaccggacaagtcagcgtggagatcgagtgggagctgcagaaggagaacagcaagcgctggaacccagagattcagtatacttccaactactacaaatctacaaatgtggactttgctgttaatactgagggtgtttactctgagcctcgccccattggcactcgttacctcacccgtaatctgtaa

SEQ ID NO: 484 - DNA, 2214 bp, Adeno-associated virus
atggctgctgacggttatcttccagattggctcgaggacaacctctctgagggcattcgcgagtggtgggacctgaaacctggagcccccaagcccaaggccaaccagcagaagcaggacgacggccggggtctggtgcttcctggctacaagtacctcggacccttcaacggactcgacaagggggagcccgtcaacgcggcggacgcagcggccctcgagcacgacaaggcctacgaccagcagctcaaagcgggtgacaatccgtacctgcggtataaccacgccgacgccgagttccaggagcgtctgcaagaagatacgtcttttgggggcaacctcgggcgagcagtcttccaggccaagaagcgggttctcgaacctctcggtctggctgaggaagctgctaagacggctcctggaaagaagagaccggtagaaccgtcacctcagcgttcccccgactcctccacgggcatcggcaagaaaggccagcagcccgctagaaagagactgaactttgggcagactggcgactcagagtcagtccccgaccctcaaccaatcggagagccaccagcaggcccctctggtctgggatctggtacaatggctgcaggcggtggcgcaccaatggctgacaataacaagggcgccgacggagtgggtaatgcctcaggaaattggcattgcgattccacatggctgggcgacagagtcatcaccaccagcacccgaacctgggctttgcccacctacaacaaccacctctacaagcaaatctccagtcagtcagcaggtagcaccaacgacaacgtctacttcggctacagcaccccctgggggtattttgacttcaacagattccactgtcacttctcaccacgtgactggcagcggctcatcaacaacaactggggattccggcccaagaagctcaacttcaagctgttcaacatccaggtcaaggaggtcacaacgggtgacggcgtcacgaccatcgccaataaccttaccagcacggttcaggtcttttcggactcggaataccagctgccctacgtcctcggctccgcacaccagggctgcctgcctccgttcccggcggacgtcttcatgattccccagtacggctacctgactctgaacaatgacagccaatcggtgggtcgttcctctttctactgcctggaatatttcccttctcaaatgctgagaacgggcaacaacttcaccttcagctacaccttcgaggacgttcccttccacagcagctacgcacacagccagagcctggaccggctgatgaatcctcttatcgaccagtacctgtattacctggccagaacacagagcaacgcaggaggcacagctggcaatcgggaactgcagttttatcagggcgggcctaccaccatggccgaacaagccaaaaactggctgcctggaccttgcttccggcaacaaagagtctccaagacgctggatcaaaacaacaacagcaactttgcttggactggtgccaccaaataccatctaaatggaagaaattcattggttaatcccggtgtcgccatggcaacccacaaggacgacgaggaacgcttcttcccttcgagcggagtcctgatttttggaaaaactggagcagctaataagactacactggaaaatgtgttaatgacaaatgaagaggaaattcgtcctaccaacccggtagccaccgaggaatacgggactgttagcagcaacctgcaggcggctaacactgcagcccagacacaagttgtcaacaaccagggagccttacctggtatggtctggcagaaccgggacgtgtacctgcagggtcccatctgggccaagattcctcacacggacggcaactttcacccgtctccgctgatgggcggctttggactgaagcatccgcctcctcagatcctgatcaaaaacactcctgttcctgctaatcccccggaggtgtttacgcctgccaagtttgcttctttcatcacacagtacagcaccggccaggtcagcgtggagatcgagtgggagctgcagaaggagaacagcaagcgctggaacccagagattcagtatacctccaattttgacaaacagactggtgtggactttgccgttgacagccagggtgtttattctgagcctcgccccattggtactcgttacctcacccgtaatctgtaa

SEQ ID NO: 485 - protein, 737 aa, Adeno-associated virus
MAADGYLPDWLEDNLSEGIREWWDLKPGAPKPKANQQKQDDGRGLVLPGYKYLGPFNGLDKGEPVNAADAAALEHDKAYDQQLKAGDNPYLRYNHADAEFQERLQEDTSFGGNLGRAVFQAKKRVLEPLGLAEEAAKTAPGKKRPVEPSPQRSPDSSTGIGKKGQQPARKRLNFGQTGDSESVPDPQPIGEPPAGPSGLGSGTMAAGGGAPMADNNKGADGVGNASGNWHCDSTWLGDRVITTSTRTWALPTYNNHLYKQISSQSAGSTNDNVYFGYSTPWGYFDFNRFHCHFSPRDWQRLINNNWGFRPKKLNFKLFNIQVKEVTTGDGVTTIANNLTSTVQVFSDSEYQLPYVLGSAHQGCLPPFPADVFMIPQYGYLTLNNDSQSVGRSSFYCLEYFPSQMLRTGNNFTFSYTFEDVPFHSSYAHSQSLDRLMNPLIDQYLYYLARTQSNAGGTAGNRELQFYQGGPTTMAEQAKNWLPGPCFRQQRVSKTLDQNNNSNFAWTGATKYHLNGRNSLVNPGVAMATHKDDEERFFPSSGVLIFGKTGAANKTTLENVLMTNEEEIRPTNPVATEEYGTVSSNLQAANTAAQTQVVNNQGALPGMVWQNRDVYLQGPIWAKIPHTDGNFHPSPLMGGFGLKHPPPQILIKNTPVPANPPEVFTPAKFASFITQYSTGQVSVEIEWELQKENSKRWNPEIQYTSNFDKQTGVDFAVDSQGVYSEPRPIGTRYLTRNL

SEQ ID NO: 486 - DNA, 2217 bp, Adeno-associated virus
atggctgccgatggttatcttccagattggctcgaggacaacctctctgagggcattcgcgagtggtgggacctgaaacctggagccccgaaacccaaagccaaccagcaaaagcaggacgacggccggggtctggtgcttcctggctacaagtacctcggacccttcaacggactcgacaagggggagcccgtcaacgcggcggacgcagcggccctcgagcacgacaaggcctacgaccagcagctcaaagcgggtgacaatccgtacctgcggtataatcacgccgacgccgagtttcaggagcgtctgcaagaagatacgtcttttgggggcaacctcgggcgagcagtcttccaggccaagaagcgggttctcgaacctctcggtctggttgaggaaggcgctaagacggctcctggaaagaagagaccggtagagccgtcaccacagcgttcccccgactcctccacgggcatcggcaagaaaggccagcagcccgccagaaagagactcaatttcggtcagactggcgactcagagtcagtccccgaccctcaacctatcggagaacctccagcagcgccctctagtgtgggatctggtacaatggctgcaggcggtggcgcaccaatggcagacaataacgaaggtgccgacggagtgggtagttcctcgggaaattggcattgcgattccacatggctgggcgacagagtcatcaccaccagcacccgaacctgggccctgcccacctacaacaaccacctctacaagcaaatctccaacgggacctcgggaggcagcaccaacgacaacacctactttggctacagcaccccctgggggtattttgactttaacagattccactgccacttctcaccacgtgactggcagcgactcatcaacaacaactggggattccggcccaagagactcagcttcaagctcttcaacatccaggtcaaagaggtcacgcagaatgaaggcaccaagaccatcgccaataacctcaccagcaccatccaggtgtttacggactcggaataccagctgccgtacgtcctcggctctgcccaccagggctgcctgcctccgttcccggcggacgtcttcatgattcctcagtacggctacctgactctcaacaacggtagtcaggccgtgggacgttcctccttctactgcctggagtacttcccctctcagatgctgagaacgggcaacaacttttccttcagctacactttcgaggacgtgcctttccacagcagctacgcgcacagccagagtttggacaggctgatgaatcctctcatcgaccagtacctgtactacctgtcaagaacccagtctacgggaggcacagcgggaacccagcagttgctgttttctcaggccgggcctagcaacatgtcggctcaggccagaaactggctgcctggaccctgctacagacagcagcgcgtctccacgacactgtcgcaaaacaacaacagcaactttgcctggactggtgccaccaagtatcatctgaacggcagagactctctggtgaatccgggcgtcgccatggcaaccaacaaggacgacgaggaccgcttcttcccatccagcggcatcctcatgtttggcaagcagggagctggaaaagacaacgtggactatagcaacgtgatgctaaccagcgaggaagaaatcaagaccaccaaccccgtggccacagaacagtatggcgtggtggctgataacctacagcagcaaaacaccgctcctattgtgggggccgtcaacagccagggagccttacctggcatggtctggcagaaccgggacgtgtacctgcagggtcctatttgggccaagattcctcacacagatggcaactttcacccgtctcctttaatgggcggctttggacttaaacatccgcctcctcagatcctcatcaaaaacactcctgttcctgcggatcctccaacagcgttcaaccaggccaagctgaattctttcatcacgcagtacagcaccggacaagtcagcgtggagatcgtgtgggagctgcagaaggagaacagcaagcgcaggaacccagagattcagtatacttccaactactacaaatctacaaatgtggactttgctgttaatactgagggtgtttactctgagcctcgccccattggcactcgttacctcacccgtaatctgtaa

SEQ ID NO: 487 - protein, 738 aa, Adeno-associated virus
MAADGYLPDWLEDNLSEGIREWWDLKPGAPKPKANQQKQDDGRGLVLPGYKYLGPFNGLDKGEPVNAADAAALEHDKAYDQQLKAGDNPYLRYNHADAEFQERLQEDTSFGGNLGRAVFQAKKRVLEPLGLVEEGAKTAPGKKRPVEPSPQRSPDSSTGIGKKGQQPARKRLNFGQTGDSESVPDPQPIGEPPAAPSSVGSGTMAAGGGAPMADNNEGADGVGSSSGNWHCDSTWLGDRVITTSTRTWALPTYNNHLYKQISNGTSGGSTNDNTYFGYSTPWGYFDFNRFHCHFSPRDWQRLINNNWGFRPKRLSFKLFNIQVKEVTQNEGTKTIANNLTSTIQVFTDSEYQLPYVLGSAHQGCLPPFPADVFMIPQYGYLTLNNGSQAVGRSSFYCLEYFPSQMLRTGNNFSFSYTFEDVPFHSSYAHSQSLDRLMNPLIDQYLYYLSRTQSTGGTAGTQQLLFSQAGPSNMSAQARNWLPGPCYRQQRVSTTLSQNNNSNFAWTGATKYHLNGRDSLVNPGVAMATNKDDEDRFFPSSGILMFGKQGAGKDNVDYSNVMLTSEEEIKTTNPVATEQYGVVADNLQQQNTAPIVGAVNSQGALPGMVWQNRDVYLQGPIWAKIPHTDGNFHPSPLMGGFGLKHPPPQILIKNTPVPADPPTAFNQAKLNSFITQYSTGQVSVEIVWELQKENSKRRNPEIQYTSNYYKSTNVDFAVNTEGVYSEPRPIGTRYLTRNL

SEQ ID NO: 488 - protein, 738 aa, Adeno-associated virus
MAADGYLPDWLEDNLSEGIREWWDLKPGAPKPKANQQKQDDGRGLVLPGYKYLGPFNGLDKGEPVNAADAAALEHDKAYDQQLKAGDNPYLRYNHADAEFQERLQEDTSFGGNLGRAVFQAKKRVLEPLGLVEEGAKTAPGKKRPVEPSPQRSPDSSTGIGKKGQQPARKRLNFGQTGDSESVPDPQPIGEPPAAPSSVGSGTMAAGGGAPMADNNEGADGVGSSSGNWHCDSTWLGDRVITTSTRTWALPTYNNHLYKQISNGTSGGSTNDNTYFGYSTPWGYFDFNRFHCHFSPRDWQRLINNNWGFRPKRLSFKLFNIQVKEVTQNEGTKTIANNLTSTIQVFTDSEYQLPYVLGSAHQGCLPPFPADVFMIPQYGYLTLNNGSQAVGRSSFYCLEYFPSQMLRTGNNFSFSYTFEDVPFHSSYAHSQSLDRLMNPLIDQYLYYLSRTQSTGGTAGTQQLLFSQAGPSNMSAQARNWLPGPCYRQQRVSTTLSQNNNSNFAWTGATKYHLNGRDSLVNPGVAMATNKDDEDRFFPSSGILMFGKQGAGKDNVDYSNVMLTSEEEIKTTNPVATEQYGVVADNLQQQNTAPIVGAVNSQGALPGMVWQNRDVYLQGPIWAKIPHTDGNFHPSPLMGGFGLKHPPPQILIKNTPVPADPPTAFNQAKLNSFITQYSTGQVSVEIEWELQKENSKRWNPEIQYTSNYYKSTNVDFAVNTEGVYSEPRPIGTRYLTRNL

SEQ ID NO: 489 - protein, 738 aa, Adeno-associated virus
MAADGYLPDWLEDNLSEGIREWWDLKPGAPKPKANQQKQDDGRGLVLPGYKYLGPFNGLDKGEPVNAADAAALEHDKAYDQQLKAGDNPYLRYNHADAEFQERLQEDTSFGGNLGRAVFQAKKRVLEPLGLVEEGAKTAPGKKRPVEPSPQRSPDSSTGIGKKGQQPARKRLNFGQTGDSESVPDPQPIGEPPAAPSSVGSGTMAAGGGAPMADNNEGADGVGSSSGNWHCDSTWLGDRVITTSTRTWALPTYNNHLYKQISNGTSGGSTNDNTYFGYSTPWGYFDFNRFHCHFSPRDWQRLINNNWGFRPKRLSFKLFNIQVKEVTQNEGTKTIANNLTSTIQVFTDSEYQLPYVLGSAHQGCLPPFPADVFMIPQYGYLTLNNGSQAVGRSSFYCLEYFPSQMLRTGNNFSFSYTFEDVPFHSSYAHSQSLDRLMNPLIDQYLYYLSRTQSTGGTAGTQQLLFSQAGPSNMSAQARNWLPGPCYRQQRVSTTLSQNNNSNFAWTGATKYHLNGRDSLVNPGVAMATNKDDEDRFFPSSGILMFGKQGAGKDNVDYSNVMLTSEEEIKTTNPVATEQYGVVADNLQQQNTAPIVGAVNSQGALPGMVWQNRDVYLQGPIWAKIPHTDGNFHPSPLMGGFGLKHPPPQILIKNTPVPADPPTAFNQAKLNSFITQYSTGQVSVEIVWELQKENSKRWNPEIQYTSNYYKSTNVDFAVNTEGVYSEPRPIGTRYLTRNL

SEQ ID NO: 490 - protein, 738 aa, Adeno-associated virus; identical to SEQ ID NO: 488

SEQ ID NO: 491 - DNA, 2214 bp, Adeno-associated virus
atggctgctgacggttatcttccagattggctcgaggacaacctctctgagggcattcgcgagtggtgggacctgaaacctggagcccccaagcccaaggccaaccagcagaagcaggacgacggccggggtctggtgcttcctggctacaagtacctcggacccttcaacggactcgacaagggggagcccgtcaacgcggcggacgcagcggccctcgagcacgacaaggcctacgaccagcagctcaaagcgggtgacaatccgtacctgcggtataaccacgccgacgccgagtttcaggagcgtctgcaagaagatacgtcttttgggggcaacctcgggcgagcagtcttccaggccaagaagcgggttctcgaacctctcggtctggttgaggaagctgctaagacggctcctggaaagaagagaccggtagaaccgtcacctcagcgttcccccgactcctccacgggcatcggcaagaaaggccagcagcccgctagaaagagactgaactttgggcagactggcgactcagagtcagtccccgaccctcaaccaatcggagaaccaccagcaggcccctctggtctgggatctggtacaatggctgcaggcggtggcgctccaatggcagacaataacgaaggcgccgacggagtgggtaatgcctcaggaaattggcattgcgattccacatggctgggcgacagagtcatcaccaccagcacccgaacctgggctttgcccacctacaacaaccacctctacaagcaaatctccagtcagtcagcaggtagcaccaacgacaacgtctacttcggctacagcaccccctgggggtattttgacttcaacagattccactgtcacttctcaccacgtgactggcagcggctcatcaacaacaactggggattccggcccaagaagctcaacttcaagctgttcaacatccaggtcaaggaggtcacaacgaatgacggcgtcacgaccatcgccaataaccttaccagcacggttcaggtcttttcggactcggaataccagctgccctacgtcctcggctccgcacaccagggctgcctgcctccgttcccggcggacgtcttcatgattccccagtacggctacctgactctgaacaatggcagccaatcggtgggtcgttcctctttctactgcctggaatatttcccttctcaaatgctgagaacgggcaacaacttcaccttcagctacaccttcgaggacgttcccttccacagcagctacgcacacagccagagcctggaccggctgatgaatcctcttatcgaccagtacctgtattacctggccagaacacagagcaacgcaggaggcacagctggcaatcgggaactgcagttttatcagggcgggcctaccaccatggccgaacaagccaaaaactggctgcctagaccttgcttccggcaacaaagagtctccaagacgctggatcaaaacaacaacagcaactttgcttggactggtgccaccaaataccatctaaatggaagaaattcattggttaatcccggtgtcgccatggcaacccacaaggacgacgaggaacgcttcttcccttcgagcggagtcctgatttttggaaaaactggagcagctaataagactacactggaaaatgtgttaatgacaaatgaagaggaaattcgtcctaccaacccggtagccaccgaggaatacgggactgttagcagcaacctgcaggcggctaacactgcagcccagacacaagttgtcaacaaccagggagccttacctggtatggtctggcagaaccgggacgtgtacctgcagggtcccatctgggccaagattcctcacacggacggcaactttcacccgtctccgctgatgggcggctttggactgaagcatccgcctcctcagatcctgatcaaaaacactcctgttcctgctaatcccccggaggtgtttacgcctgccaagtttgcttctttcatcacacagtacagcaccggccaggtcagcgtggagatcgagtgggagctgcagaaggagaacagcaagcgctggaacccagagattcagtatacctccaattttgacaaacagactggtgtggactttgccgttgacagccagggtgtttattctgagcctcgccccattggtactcgttacctcacccgtaatctgtaa

SEQ ID NO: 492 - protein, 737 aa, Adeno-associated virus
MAADGYLPDWLEDNLSEGIREWWDLKPGAPKPKANQQKQDDGRGLVLPGYKYLGPFNGLDKGEPVNAADAAALEHDKAYDQQLKAGDNPYLRYNHADAEFQERLQEDTSFGGNLGRAVFQAKKRVLEPLGLVEEAAKTAPGKKRPVEPSPQRSPDSSTGIGKKGQQPARKRLNFGQTGDSESVPDPQPIGEPPAGPSGLGSGTMAAGGGAPMADNNEGADGVGNASGNWHCDSTWLGDRVITTSTRTWALPTYNNHLYKQISSQSAGSTNDNVYFGYSTPWGYFDFNRFHCHFSPRDWQRLINNNWGFRPKKLNFKLFNIQVKEVTTNDGVTTIANNLTSTVQVFSDSEYQLPYVLGSAHQGCLPPFPADVFMIPQYGYLTLNNGSQSVGRSSFYCLEYFPSQMLRTGNNFTFSYTFEDVPFHSSYAHSQSLDRLMNPLIDQYLYYLARTQSNAGGTAGNRELQFYQGGPTTMAEQAKNWLPRPCFRQQRVSKTLDQNNNSNFAWTGATKYHLNGRNSLVNPGVAMATHKDDEERFFPSSGVLIFGKTGAANKTTLENVLMTNEEEIRPTNPVATEEYGTVSSNLQAANTAAQTQVVNNQGALPGMVWQNRDVYLQGPIWAKIPHTDGNFHPSPLMGGFGLKHPPPQILIKNTPVPANPPEVFTPAKFASFITQYSTGQVSVEIEWELQKENSKRWNPEIQYTSNFDKQTGVDFAVDSQGVYSEPRPIGTRYLTRNL

SEQ ID NO: 493 - DNA, 2214 bp, Adeno-associated virus
atggctgctgacggttatcttccagattggctcgaggacaacctctctgagggcattcgcgagtggtgggacctgaaacctggagcccccaagcccaaggccaaccagcagaagcaggacgacggccggggtctggtgcttcctggctacaagtacctcggacccttcaacggactcgacaagggggagcccgtcaacgcggcggacgcagcggccctcgagcacgacaaggcctacgaccagcagctcaaagcgggtgacaatccgtacctgcggtataaccatgccgacgccgagtttcaggagcgtctgcaagaagatacgtcttttgggggcaacctcgggcgagcagtcctccaggccaagaagcgggttctcgaacctctcggtctggttgaggaagctgctaagacggctcctggaaagaagagaccggtagaaccgtcacctcagcgttcccccgactcctccacgggcatcggcaagaaaggccagcagcccgctagaaagagactgaactttgggcagactggcgactcagagtcagtccccgaccctcaaccaatcggagaaccaccagcaggcccctctggtctgggatctggtacaatggctgcaggcggtggcgctccaatggcagacaataacgaaggcgccgacggagtgggtaatgcctcaggaaattggcattgcgattccacatggctgggcgacagagtcatcaccaccagcacccgaacctgggctttgcccacctacaacaaccacctctacaagcaaatctccagtcagtcagcaggtagcaccaacgacaacgtctacttcggctacagcaccccctgggggtattttgacttcaacagattccactgtcacttctcaccacgtgactggcagcggctcatcaacaacaactggggattccggcccaagaagctcaacttcaagctgttcaacatccaggtcaaggaggtcacaacgaatgacggcgtcacgaccatcgccaataaccttaccagcacggttcaggtcttttcggactcggaataccagctgccctacgtcctcggctccgcacaccagggctgcctgcctccgttcccggcggacgtcttcatgattccccagtacggctacctgactctgaacaatggcagccaatcggtgggtcgttcctctttctactgcctggaatatttcccttctcaaatgctgagaacgggcaacaacttcaccttcagctacaccttcgaggacgttcccttccacagcagctacgcacacagccagagcctggaccggctgatgaatcctcttatcgaccagtacctgtattacctggccagaacacagagcaacgcaggaggcacagctggcaatcgggaactgcagttttatcagggcgggcctaccaccatggccgaacaagccaaaaactggctgcctggaccttgcttccggcaacaaagagtctccaagacgctggatcaaaacaacaacagcaactttgcttggactggtgccaccaaataccatctaaatggaagaaattcattggttaatcccggtgtcgccatggcaacccacaaggacgacgaggaacgcttcttcccttcgagcggagtcctgatttttggaaaaactggagcagctaataagactacactggaaaatgtgttaatgacaaatgaagaggaaattcgtcctaccaacccggtagccaccgaggaatacgggactgttagcagcaacctgcaggcggctaacactgcagcccagacacaagttgtcaacaaccagggagccttacctggtatggtctggcagaaccgggacgtgtacctgcagggtcccatctgggccaagattcctcacacggacggcaactttcacccgtctccgctgatgggcggctttggactgaagcatccgcctcctcagatcctgatcaaaaacactcctgttcctgctaatcccccggaggtgtttacgcctgccaagtttgcttctttcatcacacagtacagcaccggccaggtcagcgtggagatcgagtgggagctgcagaaggagaacagcaagcgctggaacccagagattcagtatacctccaattttgacaaacagactggtgtggactttgccgttgacagccagggtgtttattctgagcctcgccccattggtactcgttacctcacccgtaatctgtaa

SEQ ID NO: 494 - protein, 737 aa, Adeno-associated virus; identical to SEQ ID NO: 453

SEQ ID NO: 495 - protein, 737 aa, Adeno-associated virus
MAADGYLPDWLEDNLSEGIREWWDLKPGAPKPKANQQKQDDGRGLVLPGYKYLGPFNGLDKGEPVNAADAAALEHDKAYDQQLKAGDNPYLRYNHADAEFQERLQEDTSFGGNLGRAVLQAKKRVLEPLGLVEEAAKTAPGKKRPVEPSPQRSPDSSTGIGKKGQQPARKRLNFGQTGDSESVPDPQPIGEPPAGPSGLGSGTMAAGGGAPMADNNEGADGVGNASGNWHCDSTWLGDRVITTSTRTWALPTYNNHLYKQISSQSAGSTNDNVYFGYSTPWGYFDFNRFHCHFSPRDWQRLINNNWGFRPKKLNFKLFNIQVKEVTTNDGVTTIANNLTSTVQVFSDSEYQLPYVLGSAHQGCLPPFPADVFMIPQYGYLTLNNGSQSVGRSSFYCLEYFPSQMLRTGNNFTFSYTFEDVPFHSSYAHSQSLDRLMNPLIDQYLYYLARTQSNAGGTAGNRELQFYQGGPTTMAEQAKNWLPGPCFRQQRVSKTLDQNNNSNFAWTGATKYHLNGRNSLVNPGVAMATHKDDEERFFPSSGVLIFGKTGAANKTTLENVLMTNEEEIRPTNPVATEEYGTVSSNLQAANTAAQTQVVNNQGALPGMVWQNRDVYLQGPIWAKIPHTDGNFHPSPLMGGFGLKHPPPQILIKNTPVPANPPEVFTPAKFASFITQYSTGQVSVEIEWELQKENSKRWNPEIQYTSNFDKQTGVDFAVDSQGVYSEPRPIGTRYLTRNL

SEQ ID NO: 496 - DNA, 2217 bp, Adeno-associated virus
atggctgccgatggttatcttccagattggctcgaggacaacctctctgagggcattcgcgagtggtgggacctgaaacctggagccccgaaacccaaagccaaccagcaaaagcaggacgacggccggggtctggtgcttcctggctacaagtacctcggacccttcaacggactcgacaagggggagcccgtcaacgcggcggacgcagcggccctcgagcacgacaaggcctacgaccagcagctcaaagcgggtgacaatccgtacctgcggtataatcacgccgacgccgagtttcaggagcgtctgcaagaagatacgtcttttgggggcaacctcgggcgagcagtcttccaggccaagaagcgggttctcgaacctctcggtctggttgaggaaggcgctaagacggctcctggaaagaagagaccggtagagccgtcaccacagcgttcccccgactcctccacgggcatcggcaagaaaggccagcagcccgccagaaagagactcaatttcggtcagactggcgactcagagtcagtccccgaccctcaacctatcggagaacctccagcagcgccctctagtgtgggatctggtacaatggctgcaggcggtggcgcaccaatggcagacaataacgaaggtgccgacggagtgggtagttcctcgggaaattggcattgcgattccacatggctgggcgacagagtcatcaccaccagcacccgaacctgggccctgcccacctacaacaaccacctctacaagcaaatctccaacgggacctcgggaggcagcaccaacgacaacacctactttggctacagcaccccctgggggtattttgactttaacagattccactgccacttctcaccacgtgactggcagcgactcatcaacaacaactggggattccggcccaagagactcagcttcaagctcttcaacatccaggtcaaagaggtcacgcagaatgaaggcaccaagaccatcgccaataacctcaccagcaccatccaggtgtttacggactcggaataccagctgccgtacgtcctcggctctgcccaccagggctgcctgcctccgttcccggcggacgtcttcatgattcctcagtacggctacctgactctcaacaacggtagtcaggccgtgggacgttcctccttctactgcctggagtacttcccctctcagatgctgagaacgggcaacaacttttccttcagctacactttcgaggacgtgcctttccacagcagctacgcgcacagccagagtttggacaggctgatgaatcctctcatcgaccagtacctgtactacctgtcaagaacccagtctacgggaggcacagcgggaacccagcagttgctgttttctcaggccgggcctagcaacatgtcggctcaggccagaaactggctgcctggaccctgctacagacagcagcgcgtctccacgacactgtcgcaaaacaacaacagcaactttgcctggactggtgccaccaagtatcatctgaacggcagagactctctggtgaatccgggcgtcgccatggcaaccaacaaggacgacgaggaccgcttcttcccacccagcggcatcctcatgtttggcaagcagggagctggaaaagacaacgtggactatagcaacgtgatgctaaccagcgaggaagaaatcaagaccaccaaccccgtggccacagaacagtatggcgtggtggctgataacctacagcagcaaaacaccgctcctattgtgggggccgtcaacagccagggagccttacctggcatggtctggcagaaccgggacgtgtacctgcagggtcctatttgggccaagattcctcacacagatggcaactttcacccgtctcctttaatgggcggctttggacttaaacatccgcctcctcagatcctcatcaaaaacactcctgttcctgcggatcctccaacagcgttcaaccaggccaagctgaattctttcatcacgcagtacagcaccggacaagtcagcgtggtgatcgagtgggagctgcagaaggagaacagcaagcgctggaacccagagattcagtatacttccaactactacaaatctacaaatgtggactttgctgttaatactgagggtgtttactctgagcttcgccccattggcactcgttacctcacccgtaatctgtaa

SEQ ID NO: 497 - protein, 738 aa, Adeno-associated virus
MAADGYLPDWLEDNLSEGIREWWDLKPGAPKPKANQQKQDDGRGLVLPGYKYLGPFNGLDKGEPVNAADAAALEHDKAYDQQLKAGDNPYLRYNHADAEFQERLQEDTSFGGNLGRAVFQAKKRVLEPLGLVEEGAKTAPGKKRPVEPSPQRSPDSSTGIGKKGQQPARKRLNFGQTGDSESVPDPQPIGEPPAAPSSVGSGTMAAGGGAPMADNNEGADGVGSSSGNWHCDSTWLGDRVITTSTRTWALPTYNNHLYKQISNGTSGGSTNDNTYFGYSTPWGYFDFNRFHCHFSPRDWQRLINNNWGFRPKRLSFKLFNIQVKEVTQNEGTKTIANNLTSTIQVFTDSEYQLPYVLGSAHQGCLPPFPADVFMIPQYGYLTLNNGSQAVGRSSFYCLEYFPSQMLRTGNNFSFSYTFEDVPFHSSYAHSQSLDRLMNPLIDQYLYYLSRTQSTGGTAGTQQLLFSQAGPSNMSAQARNWLPGPCYRQQRVSTTLSQNNNSNFAWTGATKYHLNGRDSLVNPGVAMATNKDDEDRFFPPSGILMFGKQGAGKDNVDYSNVMLTSEEEIKTTNPVATEQYGVVADNLQQQNTAPIVGAVNSQGALPGMVWQNRDVYLQGPIWAKIPHTDGNFHPSPLMGGFGLKHPPPQILIKNTPVPADPPTAFNQAKLNSFITQYSTGQVSVVIEWELQKENSKRWNPEIQYTSNYYKSTNVDFAVNTEGVYSELRPIGTRYLTRNL

SEQ ID NO: 498 - DNA, 2214 bp, Adeno-associated virus
atggctgctgacggttatcttccagattggctcgaggacaacctctctgagggcattcgcgagtggtgggacctgaaacctggagcccccaagcccaaggccaaccagcagaagcaggacgacggccggggtctggtgcttcctggctacaagtacctcggacccttcaacggactcgacaagggggagcccgtcaacgcggcggacgcagcggccctcgagcacgacaaggcctacgaccagcagctcaaagcgggtgacaatccgtacctgcggtataaccacgccgacgccgagtttcaggagcgtctgcaagaagatacgtcttttgggggcaacctcgggcgagcagtcttccaggccaagaagcgggttctcgaacctctcggtctggttgaggaagctgctaagacggctcctggaaagaagagaccggtagaaccgtcacctcagcgttcccccgactcctccacgggcatcggcaagaaaggccagcagcccgctagaaagagactgaactttgggcagactggcgactcagagtcagtccccgaccctcaaccaatcggagaaccaccagcaggcccctctggtctgggatctggtacaatggctgcaggcggtggcgccccaatggcagacaataacgaaggcgccgacggagtgggtaatgcctcaggaaattggcattgcgattccacatggctgggcgacagagtcatcaccaccagcacccgaacctgggctttgcccacctacaacaaccacctctacaagcaaatctccagtcagtcagcaggtagcaccaacgacaacgtctacttcggctacagcaccccctgggggtattttgacttcaacagattccactgtcacttctcaccacgtgactggcagcggctcatcaacaacaactggggattccggcccaagaagctcaacttcaagctgttcaacatccaggtcaaggaggtcacaacgaatgacggcgtcacgaccatcgccaataaccttaccagcacggttcaggtcttttcggactcggaataccagctgccctacgtcctcggctccgcacaccagggctgcctgcctccgttcccggcggacgtcttcatgattccccagtacggctacctgactctgaacaatggcagccaatcggtgggtcgttcctctttctactgcctggaatatttcccttctcaaatgctgagaacgggcaacaacttcaccatcagctacaccttcgaggacgttcccttccacagcagctacgcacacagccagagcctggaccggctgatgaatcctcttatcgaccagtacctgtattacctggccagaacacagagcaacgcaggaggcacagctggcaatcaggaactgcagttttatcagggcgggcctaccaccatggccgaacaagccaaaaactggctgcctggaccttgcttccggcaacaaagagtctccaagacgctggatcaaaacaacaacagcaactttgcttggactggtgccaccaaataccatctaaatggaagaaattcattggttaatcccggtgtcgccatggcaacccacaaggacgacgaggaacgcttcttcccttcgagcggagtcctgatttttggaaaaactggagcagctaataagactacactggaaaatgtgttaatgacaaatgaagaggaaattcgtcctaccaacccggtagccaccgaggaatacgggactgttagcagcaacctgcaggcggctaacactgcagcccagacacaagttgtcaacaaccagggagccttacctggtatggtctggcagaaccgggacgtgtacctgcagggtcccatctgggccaagattcctcacacagatggcaactttcacccgtctcctttaatgggcggctttggacttaaacatccgcctcctcagatcctcatcaaaaacactcctgttcctgcggatcctccaacagcgttcaaccaggccaagctgaattctttcatcacgcagtacagcaccggacaagtcagcgtggagatcgagtgggagctgcagaaggagaacagcaagcgctggaacccagagattcagtatacttccaactactacaaatctacaaatgtggactttgctgttaatactgagggtgtttactctgagcctcgccccattggcactcgttacctcacccgtaatctgtaa

SEQ ID NO: 499 - protein, 737 aa, Adeno-associated virus
MAADGYLPDWLEDNLSEGIREWWDLKPGAPKPKANQQKQDDGRGLVLPGYKYLGPFNGLDKGEPVNAADAAALEHDKAYDQQLKAGDNPYLRYNHADAEFQERLQEDTSFGGNLGRAVFQAKKRVLEPLGLVEEAAKTAPGKKRPVEPSPQRSPDSSTGIGKKGQQPARKRLNFGQTGDSESVPDPQPIGEPPAGPSGLGSGTMAAGGGAPMADNNEGADGVGNASGNWHCDSTWLGDRVITTSTRTWALPTYNNHLYKQISSQSAGSTNDNVYFGYSTPWGYFDFNRFHCHFSPRDWQRLINNNWGFRPKKLNFKLFNIQVKEVTTNDGVTTIANNLTSTVQVFSDSEYQLPYVLGSAHQGCLPPFPADVFMIPQYGYLTLNNGSQSVGRSSFYCLEYFPSQMLRTGNNFTISYTFEDVPFHSSYAHSQSLDRLMNPLIDQYLYYLARTQSNAGGTAGNQELQFYQGGPTTMAEQAKNWLPGPCFRQQRVSKTLDQNNNSNFAWTGATKYHLNGRNSLVNPGVAMATHKDDEERFFPSSGVLIFGKTGAANKTTLENVLMTNEEEIRPTNPVATEEYGTVSSNLQAANTAAQTQVVNNQGALPGMVWQNRDVYLQGPIWAKIPHTDGNFHPSPLMGGFGLKHPPPQILIKNTPVPADPPTAFNQAKLNSFITQYSTGQVSVEIEWELQKENSKRWNPEIQYTSNYYKSTNVDFAVNTEGVYSEPRPIGTRYLTRNL

SEQ ID NO: 500 - DNA, 2217 bp, Adeno-associated virus
atggctgccgatggttatcttccagattggctcgaggacaacctctctgagggcattcgcgagtggtgggacctgaaacctggagccccgaaacccaaagccaaccagcaaaagcaggacgacggccggggtctggtgcttcctggctacaagtacctcggacccttcaacggactcgacaagggggagcccgtcaacgcggcggacgcagcggccctcgagcacgacaaggcctacgaccagcagctcaaagcgggtgacaatccgtacctgcggtataatcacgccgacgccgagtttcaggagcgtctgcaagaagatacgtcttttgggggcaacctcgggcgagcagtcttccaggccaagaagcgggttctcgaacctctcggtctggttgaggaaggcgctaagacggctcctggaaagaagagaccggtagagccgtcaccacagcgttcccccgactcctccacgggcatcggcaagaaaggccagcagcccgccagaaagagactcaatttcggtcagactggcgactcagagtcagtccccgaccctcaacctatcggagaacctccagcagcgccctctagtgtgggatctggtacaatggctgcaggcggtggcgcaccaatggcagacaataacgaaggtgccgacggagtgggtagttcctcgggaaattggcattgcgattccacatggctgggcgacagagtcatcaccaccagcacccgaacctgggccctgcccgcctacaacaaccacctctacaagcaaatctccaacgggacctcgggaggcagcaccaacgacaacacctactttggctacagcaccccctgggggtattttgactttaacagattccactgccacttctcaccacgtgactggcagcgactcatcaacaacaactggggattccggcccaagagactcagcttcaagctcttcaacatccaggtcaaagaggtcacgcagaatgaaggcaccaagaccatcgccaataacctcaccagcaccatccaggtgtttacggactcggaataccagctgccgtacgtcctcggctctgcccaccagggctgcctgcctccgttcccggcggatgtcttcatgattcctcagtacggctacctgactctcaacaacggtagtcaggccgtgggacgttcctccttctactgcctggagtacttcccctctcagatgctgagaacgggcaacaacttttccttcagctacactttcgaggacgtgcctttccacagcagctacgcgcacagccagagtttggacaggctgatgaatcctctcatcgaccagtacctgtactacctgtcaagaacccagtctacgggaggcacagcgggaacccagcagttgctgttttctcaggccgggcctagcaacatgtcggctcaggccagaaactggctgcctggaccctgctacagacagcagcgcgtctccacgacactgtcgcaaaacaacaacagcaactttgcctggactggtgccaccaagtatcatctgagcggcagagactctctggtgaatccgggcgtcgccatggcaaccaacaaggacgacgaggaccgcttcttcccatccagcggcatcctcatgtttggcaagcagggagctggaaaagacaacgtggactatagcaacgtgatgctaaccagcgaggaagaaatcaagaccaccaaccccgtggccacagaacagtatggcgtggtggctgataacctacagcagcaaaacaccgctcctattgtgggggccgtcaacagccagggagccttacctggcatggtctggcagaaccgggacgtgtacctgcagggtcctatttgggccaagattcctcacacagatggcaactttcacccgtctcctttaatgggcggctttggacttaaacatccgcctcctcagatcctcatcaaaaacactcctgttcctgcggatcctccaacagcgttcaaccaggccaagctgaattcttccatcacgcagtacagcaccggacaagtcagcgtggagatcgagtgggagctgcagaaggagaacagcaagcgctggaacccagagattcagtatacttccaactactacaaatctacaaatgtggactttgctgttaatactgagggtgtttactctgagcctcgccccattggcactcgttacctcacccgtaatttgtaa

SEQ ID NO: 501 - protein, 738 aa, Adeno-associated virus
MAADGYLPDWLEDNLSEGIREWWDLKPGAPKPKANQQKQDDGRGLVLPGYKYLGPFNGLDKGEPVNAADAAALEHDKAYDQQLKAGDNPYLRYNHADAEFQERLQEDTSFGGNLGRAVFQAKKRVLEPLGLVEEGAKTAPGKKRPVEPSPQRSPDSSTGIGKKGQQPARKRLNFGQTGDSESVPDPQPIGEPPAAPSSVGSGTMAAGGGAPMADNNEGADGVGSSSGNWHCDSTWLGDRVITTSTRTWALPAYNNHLYKQISNGTSGGSTNDNTYFGYSTPWGYFDFNRFHCHFSPRDWQRLINNNWGFRPKRLSFKLFNIQVKEVTQNEGTKTIANNLTSTIQVFTDSEYQLPYVLGSAHQGCLPPFPADVFMIPQYGYLTLNNGSQAVGRSSFYCLEYFPSQMLRTGNNFSFSYTFEDVPFHSSYAHSQSLDRLMNPLIDQYLYYLSRTQSTGGTAGTQQLLFSQAGPSNMSAQARNWLPGPCYRQQRVSTTLSQNNNSNFAWTGATKYHLSGRDSLVNPGVAMATNKDDEDRFFPSSGILMFGKQGAGKDNVDYSNVMLTSEEEIKTTNPVATEQYGVVADNLQQQNTAPIVGAVNSQGALPGMVWQNRDVYLQGPIWAKIPHTDGNFHPSPLMGGFGLKHPPPQILIKNTPVPADPPTAFNQAKLNSSITQYSTGQVSVEIEWELQKENSKRWNPEIQYTSNYYKSTNVDFAVNTEGVYSEPRPIGTRYLTRNL

SEQ ID NO: 502 - protein, 736 aa, Adeno-associated virus; identical to SEQ ID NO: 2

SEQ ID NO: 503 - DNA, 2217 bp, Adeno-associated virus
atggctgctgacggttatcttccagattggctcgaggacaacctctctgagggcattcgcgagtggtgggacctgaaacctggagcccccaagcccaaggccaaccagcagaagcaggacgacggccggggtctggtgcttcctggctacaagtacctcggacccttcaacggactcgacaagggggagcccgtcaacgcggcggacgcagcggccctcgagcacgacaaggcctacgaccagcagctcaaagcgggtgacaatccgtacctgcggtataaccacgccgacgccgagtttcaggagcgtctgcaagaagatacgtcttttgggggcaacctcgggcgagcagtcttccaggccaagaagcgggttctcgaacctctcggtctggttgaggaagctgctaagacggctcctggaaagaagagaccggtagaaccgtcacctcagcgttcccccgactcctccacgggcatcggcaagaaaggccagcagcccgctaaaaagagactgaactttggtcagactggcgactcagagtcagtccccgaccctcaaccaatcggagaaccaccagcaggcccctctggtctgggatctggtacaatggctgcaggcggtggcgctccaatggcagacaataacgaaggcgccgacggagtgggtagttcctcaggaaattggcattgcgattccacatggctgggcgacagagtcatcaccaccagcacccgaacctgggccctgcccacctacaacaaccacctctacaagcaaatatccaatgggacatcgggaggaagcaccaacgacaacacctacttcggctacagcaccccctgggggtattttgacttcaacagattccactgccacttctcaccacgtgactggcagcgactcatcaacaacaactggggattccggccaaaaagactcagcttcaagctcttcaacatccaggtcaaggaggtcacgcagaatgaaggcaccaagaccatcgccaataaccttaccagcacgattcaggtatttacggactcggaataccagctgccgtacgtcctcggctccgcgcaccagggctgcctgcctccgttcccggcggacgtcttcatgattccccagtacggctaccttacactgaacaatggaagtcaagccgtaggccgttcctccttctactgcctggaatattttccatctcaaatgctgcgaactggaaacaattttgaattcagctacaccttcgaggacgtgcctttccacagcagctacgcacacagccagagcttggaccgactgatgaatcctctcatcgaccagtacctgtactacttatccagaactcagtccacaggaggaactcaaggtacccagcaattgttattttctcaagctgggcctgcaaacatgtcggctcaggctaagaactggctacctggaccttgctaccggcagcagcgagtctctacgacactgtcgcaaaacaacaacagcaactttgcttggactggtgccaccaaatatcacctgaacggaagagactctttggtaaatcccggtgtcgccatggcaacccacaaggacgacgaggaacgcttcttcccgtcgagtggagtcctgatgtttggaaaacagggtgctggaagagacaatgtggactacagcagcgttatgctaaccagcgaagaagaaattaaaaccactaaccctgtagccacagaacaatacggtgtggtggctgacaacttgcagcaaaccaatacagggcctattgtgggaaatgtcaacagccaaggagccttacctggcatggtctggcagaaccgagacgtgtacctgcagggtcccatctgggccaagattcctcacacggacggcaacttccacccttcaccgctaatgggaggatttggactgaagcacccacctcctcagatcctgatcaagaacacgccggtacctgcggatcctccaacaacgttcagccaggcgaaattggcttccttcattacgcagtacagcaccggacaggtcagcgtggaaatcgagtgggagctgcagaaggagaacagcaaacgctggaacccagagattcagtacacttcaaactactacaaatctacaaatgtggactttgctgtcaatacagagggaacttattctgagcctcgccccattggtactcgttacctcacccgtaatctgtaa

SEQ ID NO: 504 - protein, 738 aa, Adeno-associated virus
MAADGYLPDWLEDNLSEGIREWWDLKPGAPKPKANQQKQDDGRGLVLPGYKYLGPFNGLDKGEPVNAADAAALEHDKAYDQQLKAGDNPYLRYNHADAEFQERLQEDTSFGGNLGRAVFQAKKRVLEPLGLVEEGAKTAPGKKRPVEPSPQRSPDSSTGIGKKGQQPARKRLNFGQTGDSESVPDPQPLGEPPAAPSSVGSGTMAAGGGAPMADNNEGADGVGSSSGNWHCDSTWLGDRVITTSTRTWALPTYNNHLYKQISNGTSGGSTNDNTYFGYSTPWGYFDFNRFHCHFSPRDWQRLINNNWGFRPKRLSFKLFNIQVKEVTQNEGTKTIANNLTSTIQVFTDSEYQLPYVLGSAHQGCLPPFPADVFMIPQYGYLTLNNGSQAVGRSSFYCLEYFPSQMLRTGNNFSFSYTFEDVPFHSSYAHSQSLDRLMNPLIDQYLYYLSRTQSTGGTAGTQQLLFSQAGPSNMSAQARNWLPGPCYRQQRVSTTLSQNNNSNFAWTGATKYHLNGRDSLVNPGVAMATNKDDEDRFFPSSGILMFGKQGAGKDNVDYSNVMLTSEEEIKTTNPVATEQYGVVADNLQRQNTAPIVGAVNSQGALPGMVWQNRDVYLQGPIWAKIPHTDGNFHPSPLMGGFGLKHPPPQILIKNTPVPADPPTAFNQAKLNSFITQYSTGQVSVEIEWELQKENSKRWNPEIQYTSNYYKSTNVDFAVNTEGVYSEPRPIGTRYLTRNL

SEQ ID NO: 505 - protein, 736 aa, Adeno-associated virus
MAADGYLPDWLEDNLSEGIREWLNLKPGAPQPKANQQKQDNARGLVLPGYKYLGPFNGLDKGDPVNEADAAALEHDKAYGQQLKAGDNPYLKYNHADAEFQERLQKDTSFGGNLGKAVFQAKKRILEPLGLVETPAKTAPGKKRPVDPSPQRSPDSSSGIGKKSPHPARKRLNFGQTGEAESVPDPQPIGEPPSDPSSVGSGTMAAGGGAPMADNNEGADGVGNSSGNWHCDSTWLGDRVITTSTRTWALPTYNNHLYKQISSQSGATNDNHYFGYSTPWGYFDFNRFHCHFSPRDWQRLINNNWGFRPKRLSFKLFNIQVKEVTQNDGTTTIANNLTSTVQVFTDSEYQLPYVLGSAHQGCLPPFPADVFMIPQYGYLTLNNGSQAVGRSSFYCLEYFPSQMLRTGNNFQFSYTFEDVPFHSSYAHSQSLDRLMNPLIDQYLYYLSKTQGTNATVQGAKLQFSQAGPSNMRDQARNWLPGPCYRQQRVSKTANDNNNSEYAWTGATKYHLNGRDSLVNPGPAMASHKDDEEKFFPMNGTLVFGKNGAGNSNVDIENVMITDEEEIRTTNPVATEQYGVVSDNLQSSNTRPITGDVDSQGVLPGMVWQDRDVYLQGPIWAKIPHTDGHFHPSPLMGGFGLKHPPPQILIKNTPVPANPATTFTPGKFASFITQYSTGQVSVQIEWELQKENSKRWNPEIQYTSNYNKSVNVDFTVDTNGVYSEPRPIGTRYLTRNL

SEQ ID NO: 506 - protein, 736 aa, Adeno-associated virus; identical to SEQ ID NO: 81

SEQ ID NO: 507 - protein, 736 aa, Adeno-associated virus
MAADGYLPDWLEDNLSEGIREWWDLKPGAPKPKANQQKQDDGRGLVLPGYKYLGPFNGLDKGEPVNAADAAALEHDKAYDQQLKAGDNPYLRYNHADAEFQERLQEDTSFGGNLGRAVFQAKKRVLEPLGLVEEGAKTAPGKKRPVEQSPQEPDSSSGIGKTGQQPAKKRLNFGQTGDSESVPDPQPLGEPPAAPSGLGPNTMASGGGAPMADNNEGADGVGNSSGNWHCDSTWLGDRVITTSTRTWALPTYNNHLYKQISNGTSGGSTNDNTYFGYSTPWGYFDFNRFHCHFSPRDWQRLINNNWGFRPKRLNFKLFNIQVKEVTTNEGTKTIANNLTSTVQVFTDSEYQLPYVLGSAHQGCLPPFPADVFMVPQYGYLTLNNGSQALGRSSFYCLEYFPSQMLRTGNNFQFSYTFEDVPFHSSYAHSQSLDRLMNPLIDQYLYYLVRTQTTGTGGTQTLAFSQAGPSSMANQARNWVPGPCYRQQRVSTTTNQNNNSNFAWTGAAKFKLNGRDSLMNPGVAMASHKDDEDRFFPSSGVLIFGKQGAGNDGVDYSQVLITDEEEIKATNPVATEEYGAVAINNQAANTQAQTGLVHNQGVIPGMVWQNRDVYLQGPIWAKIPHTDGNFHPSPLMGGFGLKHPPPQILIKNTPVPADPPLTFNQAKLNSFITQYSTGQVSVEIEWELQKENSKRWNPEIQYTSNYYKSTNVDFAVNTEGVYSEPRPIGTRYLTRNL

SEQ ID NO: 508 - protein, 736 aa, Artificial Sequence; identical to SEQ ID NO: 507
  Description of Artificial Sequence: Synthetic polypeptide

SEQ ID NO: 509 - protein, 736 aa, Artificial Sequence
  Description of Artificial Sequence: Synthetic polypeptide
MAADGYLPDWLEDNLSEGIREWWDLKPGAPKPKANQQKQDDGRGLVLPGYKYLGPFNGLDKGEPVNAADAAALEHDKAYDQQLKAGDNPYLRYNHADAEFQERLQEDTSFGGNLGRAVFQAKKRVLEPLGLVEEGAKTAPGKKRPVEQSPQEPDSSSGIGKTGQQPAKKRLNFGQTGDSESVPDPQPLGEPPAAPSGLGPNTMASGGGAPMADNNEGADGVGNSSGNWHCDSTWLGDRVITTSTRTWALPTYNNHLYKQISNGTSGGSTNDNTYFGYSTPWGYFDFNRFHCHFSPRDWQRLINNNWGFRPKRLNFKLFNIQVKEVTTNEGTKTIANNLTSTVQVFTDSEYQLPYVLGSAHQGCLPPFPADVFMVPQYGYLTLNNGSQALGRSSFYCLEYFPSQMLRTGNNFQFSYTFEDVPFHSSYAHSQSLDRLMNPLIDQYLYYLVRTQTTGTGGTQTLAFSQAGPSSMANQARNWVPGPCYRQQRVSTTTNQNNNSNFAWTGAAKFKLNGRDSLMNPGVAMASHKDDEDRFFPSSGVLIFGKQGAGNDGVDYSQVLITDEEEIKATNPVATEEYGAVAINNQRANTQAQTGLVHNQGVIPGMVWQNRDVYLQGPIWAKIPHTDGNFHPSPLMGGFGLKHPPPQILIKNTPVPADPPLTFNQAKLNSFITQYSTGQVSVEIEWELQKENSKRWNPEIQYTSNYYKSTNVDFAVNTEGVYSEPRPIGTRYLTRNL

SEQ ID NO: 510 - protein, 736 aa, Artificial Sequence
  Description of Artificial Sequence: Synthetic polypeptide
MAADGYLPDWLEDNLSEGIREWWDLKPGAPKPKANQQKQDDGRGLVLPGYKYLGPFNGLDKGEPVNAADAAALEHDKAYDQQLKAGDNPYLRYNHADAEFQERLQEDTSFGGNLGRAVFQAKKRVLEPLGLVEEGAKTAPGKKRPVEQSPQEPDSSSGIGKTGQQPAKKRLNFGQTGDSESVPDPQPLGEPPAAPSGLGPNTMASGGGAPMADNNEGADGVGNSSGNWHCDSTWLGDRVITTSTRTWALPTYNNHLYKQISNGTSGGSTNDNTYFGYSTPWGYFDFNRFHCHFSPRDWQRLINNNWGFRPKRLNFKLFNIQVKEVTTNEGTKTIANNLTSTVQVFTDSEYQLPYVLGSAHQGCLPPFPADVFMVPQYGYLTLNNGSQALGRSSFYCLEYFPSQMLRTGNNFQFSYTFEDVPFHSSYAHSQSLDRLMNPLIDQYLYYLVRTQTTGTGGTQTLAFSQAGPSSMANQARNWVPGPCYRQQRVSTTTNQNNNSNFAWTGAAKFKLNGRDSLMNPGVAMASHKDDEDAFFPSSGVLIFGKQGAGNDGVDYSQVLITDEEEIKATNPVATEEYGAVAINNQAANTQAQTGLVHNQGVIPGMVWQNRDVYLQGPIWAKIPHTDGNFHPSPLMGGFGLKHPPPQILIKNTPVPADPPLTFNQAKLNSFITQYSTGQVSVEIEWELQKENSKRWNPEIQYTSNYYKSTNVDFAVNTEGVYSEPRPIGTRYLTRNL

SEQ ID NO: 511 - DNA, 1803 bp, Bovine adeno-associated virus
acggcgcctgcggcaaaaaagaggcctctagagcagagtcctcaagagccagactcctcgagcggagttggcaagaaaggcaaacagcctgccagaaagagactcaactttgacgacgaacctggagccggagacgggcctcccccagaaggaccatcttccggagctatgtctactgagactgaaatgcgtgcagcagctggcggaaatggtggcgatgcgggacaaggtgccgagggagtgggtaatgcctccggtgattggcattgcgattccacttggtcagagagccacgtcaccaccacctcaacccgcacctgggtcctgccgacctacaacaaccacctgtacctgcggctcggctcgagcaacgccagcgacaccttcaacggattctccaccccctggggatactttgactttaaccgcttccactgccacttctcgccaagagactggcaaaggctcatcaacaaccactggggactgcgccccaaaagcatgcaagtccgcatcttcaacatccaagttaaggaggtcacgacgtctaacggggagacgaccgtatccaacaacctcaccagcacggtccagatctttgcggacagcacgtacgagctcccgtacgtgatggatgcaggtcaggagggcagcttgcctcctttccccaacgacgtgttcatggtgcctcagtacgggtactgcggactggtaaccggaggcagctctcaaaaccagacagacagaaatgccttctactgtctggagtactttcccagccagatgctgagaaccggaaacaactttgagatggtgtacaagtttgaaaacgtgcccttccactccatgtacgctcacagccagagcctggataggctgatgaacccgctgctggaccagtacctgtgggagctccagtctaccacctctggaggaactctcaaccagggcaattcagccaccaactttgccaagctgaccaaaacaaacttttctggctaccgcaaaaactggctcccggggcccatgatgaagcagcagagattctccaagactgccagtcaaaactacaagattccccagggaagaaacaacagtctgctccattatgagaccagaactaccctcgacggaagatggagcaattttgccccgggaacggccatggcaaccgcagccaacgacgccaccgacttctctcaggcccagctcatctttgcggggcccaacatcaccggcaacaccaccacagatgccaataacctgatgttcacttcagaagatgaacttagggccaccaacccccgggacactgacctgtttggccacctggcaaccaaccagcaaaacgccaccaccgttcctaccgtagacgacgtggacggagtcggcgtgtacccgggaatggtgtggcaggacagagacatttactaccaagggcccatttgggccaaaattccacacacggatggacactttcacccgtctcctctcattggcggatttggactgaaaagcccgcctccacaaatattcatcaaaaacactcctgtacccgccaatcccgcaacgaccttctctccggccagaatcaacagcttcatcacccagtacagcaccggacaggtggctgtcaaaatagaatgggaaatccagaaggagcggtccaagagatggaacccagaggtccagttcacgtccaactacggagcacaggactcgcttctctgggctcccgacaacgccggagcctacaaagagcccagggccattggatcccgatacctcaccaaccacctctag

SEQ ID NO: 512 - DNA, 1617 bp, Bovine adeno-associated virus
atgcgtgcagcagctggcggaaatggtggcgatgcgggacaaggtgccgagggagtgggtaatgcctccggtgattggcattgcgattccacttggtcagagagccacgtcaccaccacctcaacccgcacctgggtcctgccgacctacaacaaccacctgtacctgcggctcggctcgagcaacgccagcgacaccttcaacggattctccaccccctggggatactttgactttaaccgcttccactgccacttctcgccaagagactggcaaaggctcatcaacaaccactggggactgcgccccaaaagcatgcaagtccgcatcttcaacatccaagttaaggaggtcacgacgtctaacggggagacgaccgtatccaacaacctcaccagcacggtccagatctttgcggacagcacgtacgagctcccgtacgtgatggatgcaggtcaggagggcagcttgcctcctttccccaacgacgtgttcatggtgcctcagtacgggtactgcggactggtaaccggaggcagctctcaaaaccagacagacagaaatgccttctactgtctggagtactttcccagccagatgctgagaaccggaaacaactttgagatggtgtacaagtttgaaaacgtgcccttccactccatgtacgctcacagccagagcctggataggctgatgaacccgctgctggaccagtacctgtgggagctccagtctaccacctctggaggaactctcaaccagggcaattcagccaccaactttgccaagctgaccaaaacaaacttttctggctaccgcaaaaactggctcccggggcccatgatgaagcagcagagattctccaagactgccagtcaaaactacaagattccccagggaagaaacaacagtctgctccattatgagaccagaactaccctcgacggaagatggagcaattttgccccgggaacggccatggcaaccgcagccaacgacgccaccgacttctctcaggcccagctcatctttgcggggcccaacatcaccggcaacaccaccacagatgccaataacctgatgttcacttcagaagatgaacttagggccaccaacccccgggacactgacctgtttggccacctggcaaccaaccagcaaaacgccaccaccgttcctaccgtagacgacgtggacggagtcggcgtgtacccgggaatggtgtggcaggacagagacatttactaccaagggcccatttgggccaaaattccacacacggatggacactttcacccgtctcctctcattggcggatttggactgaaaagcccgcctccacaaatattcatcaaaaacactcctgtacccgccaatcccgcaacgaccttctctccggccagaatcaacagcttcatcacccagtacagcaccggacaggtggctgtcaaaatagaatgggaaatccagaaggagcggtccaagagatggaacccagaggtccagttcacgtccaactacggagcacaggactcgcttctctgggctcccgacaacgccggagcctacaaagagcccagggccattggatcccgatacctcaccaaccacctctag

SEQ ID NO: 513 - DNA, 1173 bp, Bovine adeno-associated virus
atggcgctggtaagctggctggtggaacatggcatcacttccgagaagcagtggattcaggagaatcaggagagctacctgtccttcaactccacgggaaactctcggagccagattaaagccgcgcttgacaacgcgtcaaaaattatgagtctgaccaaatctgcctcagactatctcgtgggacagactgttccagaggacatttctgaaaacagaatctggcagatttttgatctcaacggctacgacccggcatacgcgggctctgttctctacggctggtgcactcgcgcctttggaaagaggaacaccgtctggctgtatggacccgcgaccaccggaaagaccaacatcgcggaagccatctctcacaccgtgcccttttatggctgtgtgaactggactaatgagaactttccctttaatgactgtgtggaaaaaatgttgatctggtgggaggagggaaagatgaccagcaaggtggtggaacccgccaaggccatcttgggggggtctagagtacgagtggatcaaaaatgtaaatcctctgtacaagtagactctaccccggtgattatcacctccaatactaacatgtgtgtggtggtggatgggaactccacgacctttgaacaccagcagccgctggaagaccgcatgttcagatttgaactcatgcggcggctcccgccagattttggcaagattaccaagcaggaagtcaaagacttttttgcttgggcaaaggtcaaccaggtgccggtgactcacgagtttatggttcccaagaaagtggcgggaactgagagggcggagacttctagaaaacgcccactggatgacgtcaccaataccaactataaaagtccggagaagcgggcccggctctcagttgttcctgagacgcctcgcagttcagacgtgcctgtagagcccgctcctctgcgacctctcaactggtcttccaggtatgaatgcagatgtgactatcatgctaaatttgactctgtaacgggggaatgtgacgagtgtgaatatttgaatcggggcaaaaatggctgtatctttcataatgctacacattgtcaaatttgtcacgctgttcctccatgggaaaaggaaaatgtgtcagattttaatgattttgatgactgtaataaagagcagtaa

SEQ ID NO: 514 - DNA, 1833 bp, Bovine adeno-associated virus
atggctaccttctatgaagtcattgttcgcgttccatttgatgtggaagagcacctgcctggaatttctgacaactttgtagactgggtaactggtcaaatttgggagctgcctcccgagtcagatttgaatttgactctgattgagcagcctcagctgacggtggctgacagaattcgccgcgtgttcctgtacgagtggaacaaattttccaagcaggagagcaaattctttgtgcagtttgaaaagggatctgaatattttcatctgcacacgctcgtggagacctccggcatctcttctatggtccttggccgctacgtgagtcagattcgcgcccagctggtgaaggtggtgttccagaacattgagccgcggattaacgactgggtcgccatcaccaaggtaaagaagggcggagccaataaggtggtggattctgggtatattcccgcctacctgctgccgaaggtccaaccagagcttcagtgggcgtggactaacctcgaagagtataaattggccgccctcaatctggaggagcgcaaacggctcgtcgctcagtttcagcttgagtcctcgcagcgctcgcaagaggcatcttcccagagggacgtttcggctgacccggtcatcaagagcaagacttcccagaaatacatggcgctggtaagctggctggtggaacatggcatcacttccgagaagcagtggattcaggagaatcaggagagctacctgtccttcaactccacgggaaactctcggagccagattaaagccgcgcttgacaacgcgtcaaaaattatgagtctgaccaaatctgcctcagactatctcgtgggacagactgttccagaggacatttctgaaaacagaatctggcagatttttgatctcaacggctacgacccggcatacgcgggctctgttctctacggctggtgcactcgcgcctttggaaagaggaacaccgtctggctgtatggacccgcgaccaccggaaagaccaacatcgcggaagccatctctcacaccgtgcccttttatggctgtgtgaactggactaatgagaactttccctttaatgactgtgtggaaaaaatgttgatctggtgggaggagggaaagatgaccagcaaggtggtggaacccgccaaggccatcttgggggggtctagagtacgagtggatcaaaaatgtaaatcctctgtacaagtagactctaccccggtgattatcacctccaatactaacatgtgtgtggtggtggatgggaactccacgacctttgaacaccagcagccgctggaagaccgcatgttcagatttgaactcatgcggcggctcccgccagattttggcaagattaccaagcaggaagtcaaagacttttttgcttgggcaaaggtcaaccaggtgccggtgactcacgagtttatggttcccaagaaagtggcgggaactgagagggcggagacttctagaaaacgcccactggatgacgtcaccaataccaactataaaagtccggagaagcgggcccggctctcagttgttcctgagacgcctcgcagttcagacgtgcctgtagagcccgctcctctgcgacctctcaactggtcttccaggtatgaatgcagatgtgactatcatgctaaatttgactctgtaacgggggaatgtgacgagtgtgaatatttgaatcggggcaaaaatggctgtatctttcataatgctacacattgtcaaatttgtcacgctgttcctccatgggaaaaggaaaatgtgtcagattttaatgattttgatgactgtaataaagagcagtaa

SEQ ID NO: 515 - DNA, 2211 bp, Bovine adeno-associated virus
atgtcttttgttgaccaccctccagattggttggaatcgatcggcgacggctttcgtgaatttctcggccttgaggcgggtcccccgaaacccaaggccaatcaacagaagcaagataacgctcgaggtcttgtgcttcctgggtacaagtatcttggtcctgggaacggccttgataagggcgatcctgtcaattttgctgacgaggttgcccgagagcacgacctctcctaccagaaacagcttgaggcgggcgataacccttacctcaagtacaaccacgcggacgcagagtttcaggagaaactcgcttctgacacttcttttgggggaaaccttgggaaggctgttttccaggctaaaaagaggattctcgaacctcttggcctggttgagacgccggataaaacggcgcctgcggcaaaaaagaggcctctagagcagagtcctcaagagccagactcctcgagcggagttggcaagaaaggcaaacagcctgccagaaagagactcaactttgacgacgaacctggagccggagacgggcctcccccagaaggaccatcttccggagctatgtctactgagactgaaatgcgtgcagcagctggcggaaatggtggcgatgcgggacaaggtgccgagggagtgggtaatgcctccggtgattggcattgcgattccacttggtcagagagccacgtcaccaccacctcaacccgcacctgggtcctgccgacctacaacaaccacctgtacctgcggctcggctcgagcaacgccagcgacaccttcaacggattctccaccccctggggatactttgactttaaccgcttccactgccacttctcgccaagagactggcaaaggctcatcaacaaccactggggactgcgccccaaaagcatgcaagtccgcatcttcaacatccaagttaaggaggtcacgacgtctaacggggagacgaccgtatccaacaacctcaccagcacggtccagatctttgcggacagcacgtacgagctcccgtacgtgatggatgcaggtcaggagggcagcttgcctcctttccccaacgacgtgttcatggtgcctcagtacgggtactgcggactggtaaccggaggcagctctcaaaaccagacagacagaaatgccttctactgtctggagtactttcccagccagatgctgagaaccggaaacaactttgagatggtgtacaagtttgaaaacgtgcccttccactccatgtacgctcacagccagagcctggataggctgatgaacccgctgctggaccagtacctgtgggagctccagtctaccacctctggaggaactctcaaccagggcaattcagccaccaactttgccaagctgaccaaaacaaacttttctggctaccgcaaaaactggctcccggggcccatgatgaagcagcagagattctccaagactgccagtcaaaactacaagattccccagggaagaaacaacagtctgctccattatgagaccagaactaccctcgacggaagatggagcaattttgccccgggaacggccatggcaaccgcagccaacgacgccaccgacttctctcaggcccagctcatctttgcggggcccaacatcaccggcaacaccaccacagatgccaataacctgatgttcacttcagaagatgaacttagggccaccaacccccgggacactgacctgtttggccacctggcaaccaaccagcaaaacgccaccaccgttcctaccgtagacgacgtggacggagtcggcgtgtacccgggaatggtgtggcaggacagagacatttactaccaagggcccatttgggccaaaattccacacacggatggacactttcacccgtctcctctcattggcggatttggactgaaaagcccgcctccacaaatattcatcaaaaacactcctgtacccgccaatcccgcaacgaccttctctccggccagaatcaacagcttcatcacccagtacagcaccggacaggtggctgtcaaaatagaatgggaaatccagaaggagcggtccaagagatggaacccagaggtccagttcacgtccaactacggagcacaggactcgcttctctgggctcccgacaacgccggagcctacaaagagcccagggccattggatcccgatacctcaccaaccacctctag

SEQ ID NO: 516 - DNA, 4694 bp, Bovine adeno-associated virus
gtggcactcccccccctgtcgcgttcgctcgttcgctggctcgattgggggggtggcagctcaaagagctgccagacgacggccctctgggccgtcgcccccccaatcgagccagcgaacgagcgaacgcgacaggggggggagtgccacactctctagcaagggggttttgtaggtggtgatgtcattgttgatgtcattatagttgtcacgcgatagttaatgattaacagtcatgtgatgtgtgttatccaataggatgaaagcgcgcgaatgagatctcgcgagacttccggggtataaaaggggtgagtgaacgagcccgccgccattctctgctctggactgctagaggaccctcgctgccatggctaccttctatgaagtcattgttcgcgttccatttgatgtggaagagcacctgcctggaatttctgacaactttgtagactgggtaactggtcaaatttgggagctgcctcccgagtcagatttgaatttgactctgattgagcagcctcagctgacggtggctgacagaattcgccgcgtgttcctgtacgagtggaacaaattttccaagcaggagagcaaattctttgtgcagtttgaaaagggatctgaatattttcatctgcacacgctcgtggagacctccggcatctcttctatggtccttggccgctacgtgagtcagattcgcgcccagctggtgaaggtggtgttccagaacattgagccgcggattaacgactgggtcgccatcaccaaggtaaagaagggcggagccaataaggtggtggattctgggtatattcccgcctacctgctgccgaaggtccaaccagagcttcagtgggcgtggactaacctcgaagagtataaattggccgccctcaatctggaggagcgcaaacggctcgtcgctcagtttcagcttgagtcctcgcagcgctcgcaagaggcatcttcccagagggacgtttcggctgacccggtcatcaagagcaagacttcccagaaatacatggcgctggtaagctggctggtggaacatggcatcacttccgagaagcagtggattcaggagaatcaggagagctacctgtccttcaactccacgggaaactctcggagccagattaaagccgcgcttgacaacgcgtcaaaaattatgagtctgaccaaatctgcctcagactatctcgtgggacagactgttccagaggacatttctgaaaacagaatctggcagatttttgatctcaacggctacgacccggcatacgcgggctctgttctctacggctggtgcactcgcgcctttggaaagaggaacaccgtctggctgtatggacccgcgaccaccggaaagaccaacatcgcggaagccatctctcacaccgtgcccttttatggctgtgtgaactggactaatgagaactttccctttaatgactgtgtggaaaaaatgttgatctggtgggaggagggaaagatgaccagcaaggtggtggaacccgccaaggccatcttgggggggtctagagtacgagtggatcaaaaatgtaaatcctctgtacaagtagactctaccccggtgattatcacctccaatactaacatgtgtgtggtggtggatgggaactccacgacctttgaacaccagcagccgctggaagaccgcatgttcagatttgaactcatgcggcggctcccgccagattttggcaagattaccaagcaggaagtcaaagacttttttgcttgggcaaaggtcaaccaggtgccggtgactcacgagtttatggttcccaagaaagtggcgggaactgagagggcggagacttctagaaaacgcccactggatgacgtcaccaataccaactataaaagtccggagaagcgggcccggctctcagttgttcctgagacgcctcgcagttcagacgtgcctgtagagcccgctcctctgcgacctctcaactggtcttccaggtatgaatgcagatgtgactatcatgctaaatttgactctgtaacgggggaatgtgacgagtgtgaatatttgaatcggggcaaaaatggctgtatctttcataatgctacacattgtcaaatttgtcacgctgttcctccatgggaaaaggaaaatgtgtcagattttaatgattttgatgactgtaataaagagcagtaaataaagtgagtagtcatgtcttttgttgaccaccctccagattggttggaatcgatcggcgacggctttcgtgaatttctcggccttgaggcgggtcccccgaaacccaaggccaatcaacagaagcaagataacgctcgaggtcttgtgcttcctgggtacaagtatcttggtcctgggaacggccttgataagggcgatcctgtcaattttgctgacgaggttgcccgagagcacgacctctcctaccagaaacagcttgaggcgggcgataacccttacctcaagtacaaccacgcggacgcagagtttcaggagaaactcgcttctgacacttcttttgggggaaaccttgggaaggctgttttccaggctaaaaagaggattctcgaacctcttggcctggttgagacgccggataaaacggcgcctgcggcaaaaaagaggcctctagagcagagtcctcaagagccagactcctcgagcggagttggcaagaaaggcaaacagcctgccagaaagagactcaactttgacgacgaacctggagccggagacgggcctcccccagaaggaccatcttccggagctatgtctactgagactgaaatgcgtgcagcagctggcggaaatggtggcgatgcgggacaaggtgccgagggagtgggtaatgcctccggtgattggcattgcgattccacttggtcagagagccacgtcaccaccacctcaacccgcacctgggtcctgccgacctacaacaaccacctgtacctgcggctcggctcgagcaacgccagcgacaccttcaacggattctccaccccctggggatactttgactttaaccgcttccactgccacttctcgccaagagactggcaaaggctcatcaacaaccactggggactgcgccccaaaagcatgcaagtccgcatcttcaacatccaagttaaggaggtcacgacgtctaacggggagacgaccgtatccaacaacctcaccagcacggtccagatctttgcggacagcacgtacgagctcccgtacgtgatggatgcaggtcaggagggcagcttgcctcctttccccaacgacgtgttcatggtgcctcagtacgggtactgcggactggtaaccggaggcagctctcaaaaccagacagacagaaatgccttctactgtctggagtactttcccagccagatgctgagaaccggaaacaactttgagatggtgtacaagtttgaaaacgtgcccttccactccatgtacgctcacagccagagcctggataggctgatgaacccgctgctggaccagtacctgtgggagctccagtctaccacctctggaggaactctcaaccagggcaattcagccaccaactttgccaagctgaccaaaacaaacttttctggctaccgcaaaaactggctcccggggcccatgatgaagcagcagagattctccaagactgccagtcaaaactacaagattccccagggaagaaacaacagtctgctccattatgagaccagaactaccctcgacggaagatggagcaattttgccccgggaacggccatggcaaccgcagccaacgacgccaccgacttctctcaggcccagctcatctttgcggggcccaacatcaccggcaacaccaccacagatgccaataacctgatgttcacttcagaagatgaacttagggccaccaacccccgggacactgacctgtttggccacctggcaaccaaccagcaaaacgccaccaccgttcctaccgtagacgacgtggacggagtcggcgtgtacccgggaatggtgtggcaggacagagacatttactaccaagggcccatttgggccaaaattccacacacggatggacactttcacccgtctcctctcattggcggatttggactgaaaagcccgcctccacaaatattcatcaaaaacactcctgtacccgccaatcccgcaacgaccttctctccggccagaatcaacagcttcatcacccagtacagcaccggacaggtggctgtcaaaatagaatgggaaatccagaaggagcggtccaagagatggaacccagaggtccagttcacgtccaactacggagcacaggactcgcttctctgggctcccgacaacgccggagcctacaaagagcccagggccattggatcccgatacctcaccaaccacctctagcccaattctgttgcataccctcaataaaccgtgtattcgtttcagtaaaatactgcctcttgtggtcattcggcgtacaacagcttacaacaacaacaaaacccccttgctagagagtgtggcactcccccccctgtcgcgttcgctcgttcgctggctcgattgggggggtggcagctcaaagagctgccagacgacggccctctgggccgtcgcccccccaatcgagccagcgaacgagcgaacgcgacaggggggggagtgccac

SEQ ID NO: 517 - protein, 390 aa, Bovine adeno-associated virus
MALVSWLVEHGITSEKQWIQENQESYLSFNSTGNSRSQIKAALDNASKIMSLTKSASDYLVGQTVPEDISENRIWQIFDLNGYDPAYAGSVLYGWCTRAFGKRNTVWLYGPATTGKTNIAEAISHTVPFYGCVNWTNENFPFNDCVEKMLIWWEEGKMTSKVVEPAKAILGGSRVRVDQKCKSSVQVDSTPVIITSNTNMCVVVDGNSTTFEHQQPLEDRMFRFELMRRLPPDFGKITKQEVKDFFAWAKVNQVPVTHEFMVPKKVAGTERAETSRKRPLDDVTNTNYKSPEKRARLSVVPETPRSSDVPVEPAPLRPLNWSSRYECRCDYHAKFDSVTGECDECEYLNRGKNGCIFHNATHCQICHAVPPWEKENVSDFNDFDDCNKEQ

SEQ ID NO: 518 - protein, 610 aa, Bovine adeno-associated virus
MATFYEVIVRVPFDVEEHLPGISDNFVDWVTGQIWELPPESDLNLTLIEQPQLTVADRIRRVFLYEWNKFSKQESKFFVQFEKGSEYFHLHTLVETSGISSMVLGRYVSQIRAQLVKVVFQNIEPRINDWVAITKVKKGGANKVVDSGYIPAYLLPKVQPELQWAWTNLEEYKLAALNLEERKRLVAQFQLESSQRSQEASSQRDVSADPVIKSKTSQKYMALVSWLVEHGITSEKQWIQENQESYLSFNSTGNSRSQIKAALDNASKIMSLTKSASDYLVGQTVPEDISENRIWQIFDLNGYDPAYAGSVLYGWCTRAFGKRNTVWLYGPATTGKTNIAEAISHTVPFYGCVNWTNENFPFNDCVEKMLIWWEEGKMTSKVVEPAKAILGGSRVRVDQKCKSSVQVDSTPVIITSNTNMCVVVDGNSTTFEHQQPLEDRMFRFELMRRLPPDFGKITKQEVKDFFAWAKVNQVPVTHEFMVPKKVAGTERAETSRKRPLDDVTNTNYKSPEKRARLSVVPETPRSSDVPVEPAPLRPLNWSSRYECRCDYHAKFDSVTGECDECEYLNRGKNGCIFHNATHCQICHAVPPWEKENVSDFNDFDDCNKEQ

SEQ ID NO: 519 - protein, 538 aa, Bovine adeno-associated virus
MRAAAGGNGGDAGQGAEGVGNASGDWHCDSTWSESHVTTTSTRTWVLPTYNNHLYLRLGSSNASDTFNGFSTPWGYFDFNRFHCHFSPRDWQRLINNHWGLRPKSMQVRIFNIQVKEVTTSNGETTVSNNLTSTVQIFADSTYELPYVMDAGQEGSLPPFPNDVFMVPQYGYCGLVTGGSSQNQTDRNAFYCLEYFPSQMLRTGNNFEMVYKFENVPFHSMYAHSQSLDRLMNPLLDQYLWELQSTTSGGTLNQGNSATNFAKLTKTNFSGYRKNWLPGPMMKQQRFSKTASQNYKIPQGRNNSLLHYETRTTLDGRWSNFAPGTAMATAANDATDFSQAQLIFAGPNITGNTTTDANNLMFTSEDELRATNPRDTDLFGHLATNQQNATTVPTVDDVDGVGVYPGMVWQDRDIYYQGPIWAKIPHTDGHFHPSPLIGGFGLKSPPPQIFIKNTPVPANPATTFSPARINSFITQYSTGQVAVKIEWEIQKERSKRWNPEVQFTSNYGAQDSLLWAPDNAGAYKEPRAIGSRYLTNHL

SEQ ID NO: 520 - protein, 736 aa, Artificial Sequence
  Description of Artificial Sequence: Synthetic polypeptide
MSFVDHPPDWLESIGDGFREFLGLEAGPPKPKANQQKQDNARGLVLPGYKYLGPGNGLDKGDPVNFADEVAREHDLSYQKQLEAGDNPYLKYNHADAEFQEKLASDTSFGGNLGKAVFQAKKRILEPLGLVETPDKTAPAAKKRPLEQSPQEPDSSSGVGKKGKQPARKRLNFDDEPGAGDGPPPEGPSSGAMSTETEMRAAAGGNGGDAGQGAEGVGNASGDWHCDSTWSESHVTTTSTRTWVLPTYNNHLYLRLGSSNASDTFNGFSTPWGYFDFNRFHCHFSPRDWQRLINNHWGLRPKSMQVRIFNIQVKEVTTSNGETTVSNNLTSTVHIFADSTYELPYVMDAGQEGSLPPFPNDVFMVPQYGYCGLVTGGSSQNQTDRNAFYCLEYFPSQMLRTGNNFEMVYKFENVPFHSMYAHSQSLDRLMNPLLDQYLWELQSTTSGGTLNQGNSATNFAKLTNKNFSGYRKNWLPGPMMKQQRFSKTASQNYKIPQGGNNSLLHYETRTTLDRRWSNFAPGTAMATAANDATDFSQAQLIFAGPNITGNTTTDANNLMFTSEDELRATNPRDTDLFGHLATNQQNATTVPTVDDVDGVGVYPGMVWQDRDIYYQGPIWAKIPHTDGHFHPSPLIGGFGLKSPPPQIFIKNTPVPANPATTFSPARINSFITQYSTGQVAVKIEWEIQKERSKRWNPEVQFTSNYGAQDSLLWAPDNAGAYKEPRAIGSRYLTNHL

SEQ ID NO: 521 - protein, 736 aa, Artificial Sequence
  Description of Artificial Sequence: Synthetic polypeptide
MSFVDHPPDWLESIGDGFREFLGLEAGPPKPKANQQKQDNARGLVLPGYKYLGPGNGLDKGDPVNFADEVAREHDLSYQKQLEAGDNPYLKYNHADAEFQEKLASDTSFGGNLGKAVFQAKKRILEPLGLVETPDKTAPAAKKRPLEQSPQEPDSSSGVGKKGKQPARKRLNFDDEPGAGDGPPPEGPSSGAMSTETEMRAAAGGNGGDAGQGAEGVGNASGDWHCDSTWSESHVTTTSTRTWVLPTYNNHLYLRLGSSNASDTFNGFSTPWGYFDFNRFHCHFSPRDWQRLINNHWGLRPKSMQVRIFNIQVKEVTTSNGETTVSNNLTSTVQIFADSTYELPYVMDAGQEGSLPPFPNDVFMVPQYGYCGLVTGGSSQNQTDRNAFYCLEYFPSQMLRTGNNFEMVYKFENVPFHSMYAHSQSLDRLMNPLLDQYLWELQSTTSGGTLNQGNSATNFAKLTKTNFSGYRKNWLPGPMMKQQRFSKTASQNYKIPQGRNNSLLHYETRTTLDGRWSNFAPGTAMATAANDATDFSQAQLIFAGPNITGNTTTDANNLMFTSEDELRATNPRDTDLFGHLATNQQNATTVPTVDDVDGVGVYPGMVWQDRDIYYQGPIWAKIPHTDGHFHPSPLIGGFGLKSPPPQIFIKNTPVPANPATTFSPARINSFITQYSTGQVAVKIEWEIQKERSKRWNPEVQFTSNYGAQDSLLWAPDNAGAYKEPRAIGSRYLTNHL

SEQ ID NO: 522 - protein, 736 aa, Bovine adeno-associated virus; identical to SEQ ID NO: 521

SEQ ID NO: 523 - protein, 600 aa, Bovine adeno-associated virus
TAPAAKKRPLEQSPQEPDSSSGVGKKGKQPARKRLNFDDEPGAGDGPPPEGPSSGAMSTETEMRAAAGGNGGDAGQGAEGVGNASGDWHCDSTWSESHVTTTSTRTWVLPTYNNHLYLRLGSSNASDTFNGFSTPWGYFDFNRFHCHFSPRDWQRLINNHWGLRPKSMQVRIFNIQVKEVTTSNGETTVSNNLTSTVQIFADSTYELPYVMDAGQEGSLPPFPNDVFMVPQYGYCGLVTGGSSQNQTDRNAFYCLEYFPSQMLRTGNNFEMVYKFENVPFHSMYAHSQSLDRLMNPLLDQYLWELQSTTSGGTLNQGNSATNFAKLTKTNFSGYRKNWLPGPMMKQQRFSKTASQNYKIPQGRNNSLLHYETRTTLDGRWSNFAPGTAMATAANDATDFSQAQLIFAGPNITGNTTTDANNLMFTSEDELRATNPRDTDLFGHLATNQQNATTVPTVDDVDGVGVYPGMVWQDRDIYYQGPIWAKIPHTDGHFHPSPLIGGFGLKSPPPQIFIKNTPVPANPATTFSPARINSFITQYSTGQVAVKIEWEIQKERSKRWNPEVQFTSNYGAQDSLLWAPDNAGAYKEPRAIGSRYLTNHL

SEQ ID NO: 524 - DNA, 2214 bp, Artificial Sequence
  Description of Artificial Sequence: Synthetic polynucleotide
atggctgccgatggttatcttccagattggctcgaggacactctctctgaaggaataagacagtggtggaagctcaaacctggcccaccaccaccaaagcccgcagagcggcataaggacgacagcaggggtcttgtgcttcctgggtacaagtacctcggacccttcaacggactcgacaagggagagccggtcaacgaggcagacgccgcggccctcgagcacgacaaagcctacgaccggcagctcgacagcggagacaacccgtacctcaagtacaaccacgccgacgcggagtttcaggagcgccttaaagaagatacgtcttttgggggcaacctcgggcgagcagtcttccaggccaaaaagaggcttcttgaacctcttggtctggttgaggaagcggctaagacggctcctggaaagaagaggcctgtagagcagtctcctcaggaaccggactcctcctcgggcatcggcaagacaggccagcagcccgctaaaaagagactcaatttcggtcagactggcgacacagagtcagtcccagaccctcaaccaatcggagaacctcccgcagccccctcaggtgtgggatctcttacaatggcttcaggtggtggcgcaccagtggcagacaataacgaaggtgccgatggagtgggtagttcctcgggaaattggcattgcgattcccaatggctgggggacagagtcatcaccaccagcacccgaacctgggccctgcccacctacaacaatcacctctacaagcaaatctccaacgggacatcgggaggagccaccaacgacaacacctacttcggctacagcaccccctgggggtattttgactttaacagattccactgccacttttcaccacgtgactggcagcgactcatcaacaacaactggggattccggcccaagagactcagcttcaagctcttcaacatccaggtcaaggaggtcacgcagaatgaaggcaccaagaccatcgccaataaccttaccagcacggtccaggtcttcacggactcggagtaccagctgccgtacgttctcggctctgcccaccagggctgcctgcctccgttcccggcggacgtgttcatgattccccagtacggctacctaacactcaacaacggtagtcaggccgtgggacgctcctccttctactgcctggaatactttccttcgcagatgctgagaaccggcaacaacttccagtttacttacaccttcgaggacgtgcctttccacagcagctacgcccacagccagagcttggaccggctgatgaatcctctgattgaccagtacctgtactacttgtctcggactcaaacaacaggaggcacggcaaatacgcagactctgggcttcagccaaggtgggcctaatacaatggccaatcaggcaaagaactggctgccaggaccctgttaccgccaacaacgcgtctcaacgacaaccgggcaaaacaacaatagcaactttgcctggactgctgggaccaaataccatctgaatggaagaaattcattggctaatcctggcatcgctatggcaacacacaaagacgacaaggagcgtttttttcccagtaacgggatcctgatttttggcaaacaaaatgctgccagagacaatgcggattacagcgatgtcatgctcaccagcgaggaagaaatcaaaaccactaaccctgtggctacagaggaatacggtatcgtggcagataacttgcagcagcaaaacacggctcctcaaattggaactgtcaacagccagggggccttacccggtatggtttggcagaaccgggacgtgtacctgcagggtcccatctgggccaagattcctcacacggacggcaacttccacccgtctccgctgatgggcggctttggcctgaaacatcctccgcctcagatcctgatcaagaacacgcctgtacctgcggatcctccgaccaccttcaaccagtcaaagctgaactctttcatcacgcaatacagcaccggacaggtcagcgtggaaattgaatgggagctgcagaaggaaaacagcaagcgctggaaccccgagatccagtacacctccaactactacaaatctacaagtgtggactttgctgttaatacagaaggcgtgtactctgaaccccaccccattggcacccgttacctcacccgtcccctgtaa

SEQ ID NO: 525 - protein, 737 aa, Artificial Sequence
  Description of Artificial Sequence: Synthetic polypeptide
MAADGYLPDWLEDTLSEGIRQWWKLKPGPPPPKPAERHKDDSRGLVLPGYKYLGPFNGLDKGEPVNEADAAALEHDKAYDRQLDSGDNPYLKYNHADAEFQERLKEDTSFGGNLGRAVFQAKKRLLEPLGLVEEAAKTAPGKKRPVEQSPQEPDSSSGIGKTGQQPAKKRLNFGQTGDTESVPDPQPIGEPPAAPSGVGSLTMASGGGAPVADNNEGADGVGSSSGNWHCDSQWLGDRVITTSTRTWALPTYNNHLYKQISNGTSGGATNDNTYFGYSTPWGYFDFNRFHCHFSPRDWQRLINNNWGFRPKRLSFKLFNIQVKEVTQNEGTKTIANNLTSTVQVFTDSEYQLPYVLGSAHQGCLPPFPADVFMIPQYGYLTLNNGSQAVGRSSFYCLEYFPSQMLRTGNNFQFTYTFEDVPFHSSYAHSQSLDRLMNPLIDQYLYYLSRTQTTGGTANTQTLGFSQGGPNTMANQAKNWLPGPCYRQQRVSTTTGQNNNSNFAWTAGTKYHLNGRNSLANPGIAMATHKDDKERFFPSNGILIFGKQNAARDNADYSDVMLTSEEEIKTTNPVATEEYGIVADNLQQQNTAPQIGTVNSQGALPGMVWQNRDVYLQGPIWAKIPHTDGNFHPSPLMGGFGLKHPPPQILIKNTPVPADPPTTFNQSKLNSFITQYSTGQVSVEIEWELQKENSKRWNPEIQYTSNYYKSTSVDFAVNTEGVYSEPHPIGTRYLTRPL

SEQ ID NO: 526 - protein, 736 aa, Artificial Sequence
  Description of Artificial Sequence: Synthetic polypeptide
MAADGYLPDWLEDNLSEGIREWWDLKPGAPKPKANQQKQDDGRGLVLPGYKYLGPFNGLDKGEPVNAADAAALEHDKAYDQQLKAGDNPYLRYNHADAEFQERLQEDTSFGGNLGRAVFQAKKRVLEPLGLVEEGAKTAPGKKRPVEQSPQEPDSSSGIGKTGQQPAKKRLNFGQTGDTESVPDPQPIGEPPAAPSGVGSLTMASGGGAPVADNNEGADGVGSSSGNWHCDSQWLGDRVITTSTRTWALPTYNNHLYKQISSASTGASNDNHYFGYSTPWGYFDFNRFHCHFSPRDWQRLINNNWGFRPKRLNFKLFNIQVKEVTDNNGVKTIANNLTSTVQVFTDSDYQLPYVLGSAHQGCLPPFPADVFMIPQYGYLTLNNGSQAVGRSSFYCLEYFPSQMLRTGNNFQFTYTFEDVPFHSSYAHSQSLDRLMNPLIDQYLYYLSRTQTTGGTANTQTLGFSQGGPNTMANQAKNWLPGPCYRQQRVSTTTGQNNNSNFAWTAGTKYHLNGRNSLANPGIAMATHKDDKERFFPSNGILIFGKQNAARDNADYSDVMLTSEEEIKTTNPVATEEYGIVADNLQQQNTAPQIGTVNSQGALPGMVWQNRDVYLQGPIWAKIPHTDGNFHPSPLMGGFGLKHPPPQILIKNTPVPADPPTTFNQSKLNSFITQYSTGQVSVEIEWELQKENSKRWNPEIQYTSNYYKSTSVDFAVNTEGVYSEPHPIGTRYLTRPL

SEQ ID NO: 527 - protein, 736 aa, Artificial Sequence
  Description of Artificial Sequence: Synthetic polypeptide
MAADGYLPDWLEDTLSEGIRQWWKLKPGPPPPKPAERHKDDSRGLVLPGYKYLGPFNGLDKGEPVNEADAAALEHDKAYDRQLDSGDNPYLKYNHADAEFQERLQGDTSFGGNLGRAVFQAKKRVLEPLGLVEEGAKTAPGKKRPVEQSPQEPDSSSGIGETGQQPAKKRLNFGQTGDSESVPDPQPLGEPPATPAAVGPTTMASGGGAPMADNNEGADGVGSSSGNWHCDSQWLGDRVITTSTRTWALPTYNNHLYKQISSASTGASNDNHYFGYSTPWGYFDFNRFHCHFSPRDWQRLINNNWGFRPKRLSFKLFNIQVKEVTDNNGVKTIANNLTSTVQVFTDSEYQLPYVLGSAHQGCLPPFPADVFMIPQYGYLTLNNGSQAVGRSSFYCLEYFPSQMLRTGNNFTFSYTFEDVPFHSSYAHSQSLDRLMNPLIDQYLYYLSRTQTTGGTANTQTLGFSQGGPNTMANQAKNWLPGPCYRQQRVSTTTGQNNNSNFAWTAGTKYHLNGRNSLANPGIAMATHKDDKERFFPSNGILIFGKQNAARDNADYSDVMLTSEEEIKTTNPVATEEYGIVADNLQQQNTAPQIGTVNSQGALPGMVWQNRDVYLQGPIWAKIPHTDGNFHPSPLMGGFGLKHPPPQILIKNTPVPADPPTTFNQSKLNSFITQYSTGQVSVEIEWELQKENSKRWNPEIQYTSNYYKSTSVDFAVNTEGVYSEPHPIGTRYLTRPL

SEQ ID NO: 528 - DNA, 2181 bp, Artificial Sequence
  Description of Artificial Sequence: Synthetic polynucleotide
atgtcttttgttgatcaccctccagattggttggaagaagttggtgaaggtcttcgcgagtttttgggccttgaagcgggcccaccgaaaccaaaacccaatcagcagcatcaagatcaagcccgtggtcttgtgctgcctggttataactatctcggacccggaaacggtctcgatcgaggagagcctgtcaacagggcagacgaggtcgcgcgagagcacgacatctcgtacaacgagcagcttgaggcgggagacaacccctacctcaagtacaaccacgcggacgccgagtttcaggagaagctcgccgacgacacatccttcgggggaaacctcggaaaggcagtctttcaggccaagaaaagggttctcgaaccttttggcctggttgaagagggtgctaagacggcccctaccggaaagcggatagacgaccactttccaaaaagaaagaaggctcggaccgaagaggactccaagccttccacctcgtcagacgccgaagctggacccagcggatcccagcagctgcaaatcccagcacaaccagcctcaagtttgggagctgatacaatgtctgcgggaggtggcggcccattgggcgacaataaccaaggtgccgatggagtgggcaatgcctcgggagattggcattgcgattccacgtggatgggggacagagtcgtcaccaagtccacccgcacctgggtgctgcccagctacaacaaccaccagtaccgagagatcaaaagcggctccgtcgacggaagcaacgccaacgcctactttggatacagcaccccctgggggtactttgactttaaccgcttccacagccactggagcccccgagactggcaaagactcatcaacaactattggggcttcagaccccggtctctcagagtcaaaatcttcaacatccaagtcaaagaggtcacggtgcaggactccaccaccaccatcgccaacaacctcacctccaccgtccaagtgtttacggacgacgactaccaactcccgtacgtcgtcggcaacgggaccgagggatgcctgccggccttccccccgcaggtctttacgctgccgcagtacggctacgcgacgctgaaccgagacaacggagacaacccgacagagcggagcagcttcttttgcctagagtactttcccagcaagatgctgaggacgggcaacaactttgagtttacctacagctttgaagaggtgcccttccactgcagcttcgccccgagccagaacctctttaagctggccaacccgctggtggaccagtacctgtaccgcttcgtgagcacctcggccacgggcgccatccagttccaaaagaacctggcgggcagatacgccaacacctacaaaaactggttcccggggcccatgggccgaacccagggctggaacacgagctctggggtcagcagcaccaacagagtcagcgtcaacaacttttccgtctcaaaccggatgaacctggagggggccagctaccaagtgaacccccagcccaacgggatgacaaacacgctccaaggcagcaaccgctacgcgctggaaaacaccatgatcttcaacgctcaaaacgccacgccgggaactacctcggtgtacccagaggacaatctactgctgaccagcgagagcgagactcagcccgtcaaccgggtggcttacaacacgggcggtcagatggccaccaacgcccagaacgccaccacggctcccacggtcgggacctacaacctccaggaagtgcttcctggcagcgtatggatggagagggacgtgtacctccaaggacccatctgggccaagatcccagagacgggggcgcactttcacccctctccggccatgggcggattcggactcaaacacccgccgcccatgatgctcatcaaaaacacgccggtgcccggcaacatcaccagcttctcggacgtgcccgtcagcagcttcatcacccagtacagcaccgggcaggtcaccgtggagatggaatgggagctcaaaaaggaaaactccaagaggtggaacccagagatccagtacaccaacaactacaacgacccccagtttgtggactttgctccagacggctccggcgaatacagaaccaccagagccatcggaacccgatacctcacccgacccctt

SEQ ID NO: 529 - protein, 726 aa, Artificial Sequence
  Description of Artificial Sequence: Synthetic polypeptide
MSFVDHPPDWLEEVGEGLREFLGLEAGPPKPKPNQQHQDQARGLVLPGYNYLGPGNGLDRGEPVNRADEVAREHDISYNEQLEAGDNPYLKYNHADAEFQEKLADDTSFGGNLGKAVFQAKKRVLEPFGLVEEGAKTAPTGKRIDDHFPKRKKARTEEDSKPSTSSDAEAGPSGSQQLQIPAQPASSLGADTMSAGGGGPLGDNNQGADGVGNASGDWHCDSTWMGDRVVTKSTRTWVLPSYNNHQYREIKSGSVDGSNANAYFGYSTPWGYFDFNRFHSHWSPRDWQRLINNYWGFRPRSLRVKIFNIQVKEVTVQDSTTTIANNLTSTVQVFTDDDYQLPYVVGNGTEGCLPAFPPQVFTLPQYGYATLNRDNGDNPTERSSFFCLEYFPSKMLRTGNNFEFTYSFEEVPFHCSFAPSQNLFKLANPLVDQYLYRFVSTSATGAIQFQKNLAGRYANTYKNWFPGPMGRTQGWNTSSGSSTNRVSVNNFSVSNRMNLEGASYQVNPQPNGMTNTLQGSNRYALENTMIFNAQNATPGTTSVYPEDNLLLTSESETQPVNRVAYNTGGQMATNAQNATTAPTVGTYNLQEVLPGSVWMERDVYLQGPIWAKIPETGAHFHPSPAMGGFGLKHPPPMMLIKNTPVPGNITSFSDVPVSSFITQYSTGQVTVEMEWELKKENSKRWNPEIQYTNNYNDPQFVDFAPDGSGEYRTTRAIGTRYLTRPL

SEQ ID NO: 530 - protein, 735 aa, Artificial Sequence
  Description of Artificial Sequence: Synthetic polypeptide
MAADGYLPDWLEDTLSEGIRQWWKLKPGPPPPKPAERHKDDSRGLVLPGYKYLGPFNGLDKGEPVNEADAAALEHDKAYDRQLDSGDNPYLKYNHADAEFQERLKEDTSFGGNLGRAVFQAKKRILEPLGLVEEPVKTAPGKKRPVEHSPAEPDSSSGTGKSGQQPARKRLNFGQTGDADSVPDPQPLGQPPAAPSGLGTNTMASGSGAPMADNNEGADGVGNSSGNWHCDSTWMGDRVITTSTRTWALPTYNNHLYKQISSQSGASNDNHYFGYSTPWGYFDFNRFHCHFSPRDWQRLINNNWGFRPKRLSFKLFNIQVKEVTQNDGTTTIANNLTSTVQVFTDSEYQLPYVLGSAHQGCLPPFPADVFMVPQYGYLTLNNGSQAVGRSSFYCLEYFPSQMLRTGNNFTFSYTFEDVPFHSSYAHSQSLDRLMNPLIDQYLYYLSRTNTPSGTTTMSRLQFSQAGASDIRDQSRNWLPGPCYRQQRVSKTAADNNNSDYSWTGATKYHLNGRDSLVNPGPAMASHKDDEEKYFPQSGVLIFGKQDSGKTNVDIEKVMITDEEEIRTTNPVATEQYGSVSTNLQSGNTQAATSDVNTQGVLPGMVWQDRDVYLQGPIWAKIPHTDGHFHPSPLMGGFGLKHPPPQILIKNTPVPANPSTTFSAAKFASFITQYSTGQVSVEIEWELQKENSKRWNPEIQYTSNYNKSVNVDFTVDTNGVYSEPRPIGTRYLTRNL

SEQ ID NO: 531 - DNA, 1797 bp, Artificial Sequence
  Description of Artificial Sequence: Synthetic polynucleotide
acggctccgaccggagacaagcggaaaggcgaagacgaacctcgtttgcccgacacttcttcacagactcccaagaaaaacaagaagcctcgcaaggaaagaccttccggcggggcagaagatccgggcgaaggcacctcttccaacgctggagcagcagcacccgcctctagtgtgggatcatctatcatggctgaaggaggtggcggcccagtgggcgatgcaggccagggtgccgatggagtgggcaattcctccggaaattggcattgcgattcccaatggctggaaaacggagtcgtcactcgaaccacccgaacctgggtcttgcccagctacaacaaccacctgtacaaacgaatccaaggacccagcggaggcgacaacaacaacaaattctttggattcagcaccccctggggatactttgactacaatcgattccactgccacttttccccgcgagactggcaacgactcatcaacaacaactggggcatccgtcccaaagcgatgcgctttagactctttaacatccaggttaaagaggtcacggtccaagacttcaacaccaccatcggcaacaacctcaccagtacggtccaggtctttgcggacaaggactaccaactgccgtacgtcctcggatcggctaccgaaggcaccttcccgccgttcccagcggatatctacacgatcccgcagtacgggtactgcacgctaaactacaacaacgaggcggtggatcgttcggccttctactgtctggactactttccctcagacatgctgcggacaggaaataactttgagtttacttacaccttcgaggacgttcctttccatagcatgtttgcccacaaccagacgctagaccggctgatgaatcccctcgtggatcagtacctctgggctttcagctccgtcagccaagcaggctcatctggacgagctcttcattactcgcgggcgactaaaaccaacatggcggctcaatataggaactggttacctgggcctttcttccgtgatcagcaaatctttacgggcgctagcaacatcactaaaaataacgtctttagcgtttgggaaaaaggcaagcaatgggaactcgacaatcggaccaacctaatgcagcccggtcctgcggcagcgaccacctttagcggagaacctgaccgtcaagccatgcaaaacacgctggcttttagcaggaccgtctacgatcaaacgaccgccacgaccgatcgtaaccagatactcatcaccaacgaagacgaaatcagacccaccaactcggtcggtatcgacgcgtggggagcagttcccaccaacaaccagtcgatcgtgacccccggcactcgcgcggccgtcaacaatcaaggggcgcttcccgggatggtgtggcaaaacagagacatttaccctacagggacccatttggccaaaattcccgacactgacaatcacttccatccgtccccgcttattgggcggtttggctgcaagcatccccctccccagattttcattaaaaacacacccgtccctgccaacccttcggaaacgttccagacggccaaagtggcctccttcatcaaccagtactcgaccggacagtgcaccgtcgaaatcttttgggaactcaagaaggaaacctccaagcgctggaaccccgaaatccagttcacctccaactttggcaacgcggccgacatccagtttgccgtctccgacacgggatcctattccgaacctcgtcccatcggtacccgttaccttaccaaacctctgtaa

SEQ ID NO: 532 - DNA, 1989 bp, Artificial Sequence
  Description of Artificial Sequence: Synthetic polynucleotide
atgaggtcgtactacgaggtcatcgttcagctgcccaacgacgtcgagagtcaggtacctggaatctccgattcgttcgtcaactggattacgtcgcgagaatggacgttgcctgaggacgccgattgggatttggaccaggtcgatcaagttcaactgacgctcggcgacaaaatccaacgggagattcgaactcattgggggacgatggccaaagaaccggactttcactattttatccaactggaacaaggtgaggtgttctttcatttacacgtcctgctggaaacgtgttccgtaaagccgatggtactcggaagatatatccgacatattcaacaaaaaattgtgagtaaagtctactgcgccacgagcctacgatggaaggatggatgcgtggtgaccaagaccaaaaatttcgggggcgcgaacaaggtccgggccgagtcgtatattcccgcctacctgatcccgaaacagcaaccggaagtgcagtgggcgtggactaacgtgcccgagtatataaaagcgtgcttgcaccgagaactgcgtgccagtctcgcgcgacttcacttcgaggaggcgggcgtctcgcaatccaaggaaaatctcgcgagaactgcagacggcgctcccgtgatgccgacccgcgtcagcaaacgctacatggagctcgtggattggctcgtggagaaggggatcaccaccgagaaggaatggctgctggaaaacagagaaagctttcggagctttcaggcctcgagcaactcggcgcgtcagatcaagacggccctgcaaggcgccattcaggagatgcttctgaccaagacggcggaggactacctcgtcggaaaggatcccgtctcggacgacgacatccgtcagaaccgcatctacaagattctggaactgaaccactacgacccagcgtacgtggggagtattttggtcgggtggtgccagaagaaatggggcaagcgaaacacgctgtggctgttcggacatgcgaccaccggcaagaccaacatcgcggaggctattgcccatgctgtgccgttctatggatgcgttaactggaccaacgagaactttccgttcaacgactgcgtcgaaaaaatgattatctggtgggaggagggcaaaatgaccgccaaagtggtggaaacagccaaggcgattctgggaggatctcgggtgagagtggaccaaaaatgcaaagcttcggttccgatcgaaccgacgccggtcattattaccagtaacaccaacatgtgttatgtcatcgacgggaacacgaccacgttcgagcataagcagccgttggaggacaggatgtttaagctcgaattgctgactcggttgcctgatgactttggtaaggtgaccaaacaggaggtgcgtcaattcttcaggtggtctcaggatcacctgacccctgtgatcccagaattcctagtgcggaaggcggagtctcgcaaaagacccgccccttccggggaaggctatataagcccgacaaagcggcccgcgctcgcagagcagcagcaggcgtcggagagcgcggacccggttcccaccaggtatcgtatcaaatgctcgaaacattgcggtatggataaaatgttgtttccttgccaaatttgtgaatcgatgaacagagatattaatatttgtgctattcataaaacgaccgactgtaaagagtgtttccccgactacggggataaagatgatgtagaactacccccctgtacagaacacaacgtgtctcgttgttatcaatgtcattcgggcgaattgtatcgcgtgacttcggactctgacgagaaacctgcccccgagagtgatgaaggcaccgagccatcctatgctccctgcacgattcaccacctgatgggcaagagtcacgggttagtcacttgcgcggcgtgtcggttgaaaaatagtacgttgcatgatgacttggatgacggtgatctcgaacaataa

SEQ ID NO: 533 - DNA, 1626 bp, Artificial Sequence
  Description of Artificial Sequence: Synthetic polynucleotide
atgaggtcgtactacgaggtcatcgttcagctgcccaacgacgtcgagagtcaggtacctggaatctccgattcgttcgtcaactggattacgtcgcgagaatggacgttgcctgaggacgccgattgggatttggaccaggtcgatcaagttcaactgacgctcggcgacaaaatccaacgggagattcgaactcattgggggacgatggccaaagaaccggactttcactattttatccaactggaacaaggtgaggtgttctttcatttacacgtcctgctggaaacgtgttccgtaaagccgatggtactcggaagatatatccgacatattcaacaaaaaattgtgagtaaagtctactgcgccacgagcctacgatggaaggatggatgcgtggtgaccaagaccaaaaatttcgggggcgcgaacaaggtccgggccgagtcgtatattcccgcctacctgatcccgaaacagcaaccggaagtgcagtgggcgtggactaacgtgcccgagtatataaaagcgtgcttgcaccgagaactgcgtgccagtctcgcgcgacttcacttcgaggaggcgggcgtctcgcaatccaaggaaaatctcgcgagaactgcagacggcgctcccgtgatgccgacccgcgtcagcaaacgctacatggagctcgtggattggctcgtggagaaggggatcaccaccgagaaggaatggctgctggaaaacagagaaagctttcggagctttcaggcctcgagcaactcggcgcgtcagatcaagacggccctgcaaggcgccattcaggagatgcttctgaccaagacggcggaggactacctcgtcggaaaggatcccgtctcggacgacgacatccgtcagaaccgcatctacaagattctggaactgaaccactacgacccagcgtacgtggggagtattttggtcgggtggtgccagaagaaatggggcaagcgaaacacgctgtggctgttcggacatgcgaccaccggcaagaccaacatcgcggaggctattgcccatgctgtgccgttctatggatgcgttaactggaccaacgagaactttccgttcaacgactgcgtcgaaaaaatgattatctggtgggaggagggcaaaatgaccgccaaagtggtggaaacagccaaggcgattctgggaggatctcgggtgagagtggaccaaaaatgcaaagcttcggttccgatcgaaccgacgccggtcattattaccagtaacaccaacatgtgttatgtcatcgacgggaacacgaccacgttcgagcataagcagccgttggaggacaggatgtttaagctcgaattgctgactcggttgcctgatgactttggtaaggtgaccaaacaggaggtgcgtcaattcttcaggtggtctcaggatcacctgacccctgtgatcccagaattcctagtgcggaaggcggagtctcgcaaaagacccgccccttccggggaaggctatataagcccgacaaagcggcccgcgctcgcagagcagcagcaggcgtcggagagcgcggacccggttcccaccagattggttggagcggttggtcaaaaagggagtgaatgctgcagctga

SEQ ID NO: 534 - DNA, 1323 bp, Artificial Sequence
  Description of Artificial Sequence: Synthetic polynucleotide
atggagctcgtggattggctcgtggagaaggggatcaccaccgagaaggaatggctgctggaaaacagagaaagctttcggagctttcaggcctcgagcaactcggcgcgtcagatcaagacggccctgcaaggcgccattcaggagatgcttctgaccaagacggcggaggactacctcgtcggaaaggatcccgtctcggacgacgacatccgtcagaaccgcatctacaagattctggaactgaaccactacgacccagcgtacgtggggagtattttggtcgggtggtgccagaagaaatggggcaagcgaaacacgctgtggctgttcggacatgcgaccaccggcaagaccaacatcgcggaggctattgcccatgctgtgccgttctatggatgcgttaactggaccaacgagaactttccgttcaacgactgcgtcgaaaaaatgattatctggtgggaggagggcaaaatgaccgccaaagtggtggaaacagccaaggcgattctgggaggatctcgggtgagagtggaccaaaaatgcaaagcttcggttccgatcgaaccgacgccggtcattattaccagtaacaccaacatgtgttatgtcatcgacgggaacacgaccacgttcgagcataagcagccgttggaggacaggatgtttaagctcgaattgctgactcggttgcctgatgactttggtaaggtgaccaaacaggaggtgcgtcaattcttcaggtggtctcaggatcacctgacccctgtgatcccagaattcctagtgcggaaggcggagtctcgcaaaagacccgccccttccggggaaggctatataagcccgacaaagcggcccgcgctcgcagagcagcagcaggcgtcggagagcgcggacccggttcccaccaggtatcgtatcaaatgctcgaaacattgcggtatggataaaatgttgtttccttgccaaatttgtgaatcgatgaacagagatattaatatttgtgctattcataaaacgaccgactgtaaagagtgtttccccgactacggggataaagatgatgtagaactacccccctgtacagaacacaacgtgtctcgttgttatcaatgtcattcgggcgaattgtatcgcgtgacttcggactctgacgagaaacctgcccccgagagtgatgaaggcaccgagccatcctatgctccctgcacgattcaccacctgatgggcaagagtcacgggttagtcacttgcgcggcgtgtcggttgaaaaatagtacgttgcatgatgacttggatgacggtgatctcgaacaataa

SEQ ID NO: 535 - DNA, 960 bp, Artificial Sequence
  Description of Artificial Sequence: Synthetic polynucleotide
atggagctcgtggattggctcgtggagaaggggatcaccaccgagaaggaatggctgctggaaaacagagaaagctttcggagctttcaggcctcgagcaactcggcgcgtcagatcaagacggccctgcaaggcgccattcaggagatgcttctgaccaagacggcggaggactacctcgtcggaaaggatcccgtctcggacgacgacatccgtcagaaccgcatctacaagattctggaactgaaccactacgacccagcgtacgtggggagtattttggtcgggtggtgccagaagaaatggggcaagcgaaacacgctgtggctgttcggacatgcgaccaccggcaagaccaacatcgcggaggctattgcccatgctgtgccgttctatggatgcgttaactggaccaacgagaactttccgttcaacgactgcgtcgaaaaaatgattatctggtgggaggagggcaaaatgaccgccaaagtggtggaaacagccaaggcgattctgggaggatctcgggtgagagtggaccaaaaatgcaaagcttcggttccgatcgaaccgacgccggtcattattaccagtaacaccaacatgtgttatgtcatcgacgggaacacgaccacgttcgagcataagcagccgttggaggacaggatgtttaagctcgaattgctgactcggttgcctgatgactttggtaaggtgaccaaacaggaggtgcgtcaattcttcaggtggtctcaggatcacctgacccctgtgatcccagaattcctagtgcggaaggcggagtctcgcaaaagacccgccccttccggggaaggctatataagcccgacaaagcggcccgcgctcgcagagcagcagcaggcgtcggagagcgcggacccggttcccaccagattggttggagcggttggtcaaaaagggagtgaatgctgcagctga

SEQ ID NO: 536 - DNA, 1608 bp, Artificial Sequence
  Description of Artificial Sequence: Synthetic polynucleotide
atggctgaaggaggtggcggcccagtgggcgatgcaggccagggtgccgatggagtgggcaattcctccggaaattggcattgcgattcccaatggctggaaaacggagtcgtcactcgaaccacccgaacctgggtcttgcccagctacaacaaccacctgtacaaacgaatccaaggacccagcggaggcgacaacaacaacaaattctttggattcagcaccccctggggatactttgactacaatcgattccactgccacttttccccgcgagactggcaacgactcatcaacaacaactggggcatccgtcccaaagcgatgcgctttagactctttaacatccaggttaaagaggtcacggtccaagacttcaacaccaccatcggcaacaacctcaccagtacggtccaggtctttgcggacaaggactaccaactgccgtacgtcctcggatcggctaccgaaggcaccttcccgccgttcccagcggatatctacacgatcccgcagtacgggtactgcacgctaaactacaacaacgaggcggtggatcgttcggccttctactgtctggactactttccctcagacatgctgcggacaggaaataactttgagtttacttacaccttcgaggacgttcctttccatagcatgtttgcccacaaccagacgctagaccggctgatgaatcccctcgtggatcagtacctctgggctttcagctccgtcagccaagcaggctcatctggacgagctcttcattactcgcgggcgactaaaaccaacatggcggctcaatataggaactggttacctgggcctttcttccgtgatcagcaaatctttacgggcgctagcaacatcactaaaaataacgtctttagcgtttgggaaaaaggcaagcaatgggaactcgacaatcggaccaacctaatgcagcccggtcctgcggcagcgaccacctttagcggagaacctgaccgtcaagccatgcaaaacacgctggcttttagcaggaccgtctacgatcaaacgaccgccacgaccgatcgtaaccagatactcatcaccaacgaagacgaaatcagacccaccaactcggtcggtatcgacgcgtggggagcagttcccaccaacaaccagtcgatcgtgacccccggcactcgcgcggccgtcaacaatcaaggggcgcttcccgggatggtgtggcaaaacagagacatttaccctacagggacccatttggccaaaattcccgacactgacaatcacttccatccgtccccgcttattgggcggtttggctgcaagcatccccctccccagattttcattaaaaacacacccgtccctgccaacccttcggaaacgttccagacggccaaagtggcctccttcatcaaccagtactcgaccggacagtgcaccgtcgaaatcttttgggaactcaagaaggaaacctccaagcgctggaaccccgaaatccagttcacctccaactttggcaacgcggccgacatccagtttgccgtctccgacacgggatcctattccgaacctcgtcccatcggtacccgttaccttaccaaacctctgtaa

SEQ ID NO: 537 - DNA, 2232 bp, Artificial Sequence
  Description of Artificial Sequence: Synthetic polynucleotide
atgtctctcatttctgatgcgattccagattggttggagcggttggtcaaaaagggagtgaatgctgcagctgatttctaccatttggaaagcggtcctcctcgtcctaaggcaaatcagcaaactcaagaatctcttgaaaaggacgattcgagaggtctcgtgttcccaggctacaattatctaggccctttcaacggtctagataaaggagaacccgtcaacgaggcagacgctgccgccttagaacacgacaaggcttacgacctcgaaatcaaggacgggcacaacccgtactttgagtacaacgaggccgacagacgtttccaggaacgtctcaaagacgatacctcctttggaggcaatttaggtaaagccatcttccaggccaaaaagagggttctcgaaccctttggtctggtggaagactcaaagacggctccgaccggagacaagcggaaaggcgaagacgaacctcgtttgcccgacacttcttcacagactcccaagaaaaacaagaagcctcgcaaggaaagaccttccggcggggcagaagatccgggcgaaggcacctcttccaacgctggagcagcagcacccgcctctagtgtgggatcatctatcatggctgaaggaggtggcggcccagtgggcgatgcaggccagggtgccgatggagtgggcaattcctccggaaattggcattgcgattcccaatggctggaaaacggagtcgtcactcgaaccacccgaacctgggtcttgcccagctacaacaaccacctgtacaaacgaatccaaggacccagcggaggcgacaacaacaacaaattctttggattcagcaccccctggggatactttgactacaatcgattccactgccacttttccccgcgagactggcaacgactcatcaacaacaactggggcatccgtcccaaagcgatgcgctttagactctttaacatccaggttaaagaggtcacggtccaagacttcaacaccaccatcggcaacaacctcaccagtacggtccaggtctttgcggacaaggactaccaactgccgtacgtcctcggatcggctaccgaaggcaccttcccgccgttcccagcggatatctacacgatcccgcagtacgggtactgcacgctaaactacaacaacgaggcggtggatcgttcggccttctactgtctggactactttccctcagacatgctgcggacaggaaataactttgagtttacttacaccttcgaggacgttcctttccatagcatgtttgcccacaaccagacgctagaccggctgatgaatcccctcgtggatcagtacctctgggctttcagctccgtcagccaagcaggctcatctggacgagctcttcattactcgcgggcgactaaaaccaacatggcggctcaatataggaactggttacctgggcctttcttccgtgatcagcaaatctttacgggcgctagcaacatcactaaaaataacgtctttagcgtttgggaaaaaggcaagcaatgggaactcgacaatcggaccaacctaatgcagcccggtcctgcggcagcgaccacctttagcggagaacctgaccgtcaagccatgcaaaacacgctggcttttagcaggaccgtctacgatcaaacgaccgccacgaccgatcgtaaccagatactcatcaccaacgaagacgaaatcagacccaccaactcggtcggtatcgacgcgtggggagcagttcccaccaacaaccagtcgatcgtgacccccggcactcgcgcggccgtcaacaatcaaggggcgcttcccgggatggtgtggcaaaacagagacatttaccctacagggacccatttggccaaaattcccgacactgacaatcacttccatccgtccccgcttattgggcggtttggctgcaagcatccccctccccagattttcattaaaaacacacccgtccctgccaacccttcggaaacgttccagacggccaaagtggcctccttcatcaaccagtactcgaccggacagtgcaccgtcgaaatcttttgggaactcaagaaggaaacctccaagcgctggaaccccgaaatccagttcacctccaactttggcaacgcggccgacatccagtttgccgtctccgacacgggatcctattccgaacctcgtcccatcggtacccgttaccttaccaaacctctgtaa

SEQ ID NO: 538 - protein, 535 aa, Artificial Sequence
  Description of Artificial Sequence: Synthetic polypeptide
MAEGGGGPVGDAGQGADGVGNSSGNWHCDSQWLENGVVTRTTRTWVLPSYNNHLYKRIQGPSGGDNNNKFFGFSTPWGYFDYNRFHCHFSPRDWQRLINNNWGIRPKAMRFRLFNIQVKEVTVQDFNTTIGNNLTSTVQVFADKDYQLPYVLGSATEGTFPPFPADIYTIPQYGYCTLNYNNEAVDRSAFYCLDYFPSDMLRTGNNFEFTYTFEDVPFHSMFAHNQTLDRLMNPLVDQYLWAFSSVSQAGSSGRALHYSRATKTNMAAQYRNWLPGPFFRDQQIFTGASNITKNNVFSVWEKGKQWELDNRTNLMQPGPAAATTFSGEPDRQAMQNTLAFSRTVYDQTTATTDRNQILITNEDEIRPTNSVGIDAWGAVPTNNQSIVTPGTRAAVNNQGALPGMVWQNRDIYPTGTHLAKIPDTDNHFHPSPLIGRFGCKHPPPQIFIKNTPVPANPSETFQTAKVASFINQYSTGQCTVEIFWELKKETSKRWNPEIQFTSNFGNAADIQFAVSDTGSYSEPRPIGTRYLTKPL

SEQ ID NO: 539 - protein, 440 aa, Artificial Sequence
  Description of Artificial Sequence: Synthetic polypeptide
MELVDWLVEKGITTEKEWLLENRESFRSFQASSNSARQIKTALQGAIQEMLLTKTAEDYLVGKDPVSDDDIRQNRIYKILELNHYDPAYVGSILVGWCQKKWGKRNTLWLFGHATTGKTNIAEAIAHAVPFYGCVNWTNENFPFNDCVEKMIIWWEEGKMTAKVVETAKAILGGSRVRVDQKCKASVPIEPTPVIITSNTNMCYVIDGNTTTFEHKQPLEDRMFKLELLTRLPDDFGKVTKQEVRQFFRWSQDHLTPVIPEFLVRKAESRKRPAPSGEGYISPTKRPALAEQQQASESADPVPTRYRIKCSKHCGMDKMLFPCQICESMNRDINICAIHKTTDCKECFPDYGDKDDVELPPCTEHNVSRCYQCHSGELYRVTSDSDEKPAPESDEGTEPSYAPCTIHHLMGKSHGLVTCAACRLKNSTLHDDLDDGDLEQ

SEQ ID NO: 540 - protein, 319 aa, Artificial Sequence
  Description of Artificial Sequence: Synthetic polypeptide
MELVDWLVEKGITTEKEWLLENRESFRSFQASSNSARQIKTALQGAIQEMLLTKTAEDYLVGKDPVSDDDIRQNRIYKILELNHYDPAYVGSILVGWCQKKWGKRNTLWLFGHATTGKTNIAEAIAHAVPFYGCVNWTNENFPFNDCVEKMIIWWEEGKMTAKVVETAKAILGGSRVRVDQKCKASVPIEPTPVIITSNTNMCYVIDGNTTTFEHKQPLEDRMFKLELLTRLPDDFGKVTKQEVRQFFRWSQDHLTPVIPEFLVRKAESRKRPAPSGEGYISPTKRPALAEQQQASESADPVPTRLVGAVGQKGSECCS

SEQ ID NO: 541 - protein, 662 aa, Artificial Sequence
  Description of Artificial Sequence: Synthetic polypeptide
MRSYYEVIVQLPNDVESQVPGISDSFVNWITSREWTLPEDADWDLDQVDQVQLTLGDKIQREIRTHWGTMAKEPDFHYFIQLEQGEVFFHLHVLLETCSVKPMVLGRYIRHIQQKIVSKVYCATSLRWKDGCVVTKTKNFGGANKVRAESYIPAYLIPKQQPEVQWAWTNVPEYIKACLHRELRASLARLHFEEAGVSQSKENLARTADGAPVMPTRVSKRYMELVDWLVEKGITTEKEWLLENRESFRSFQASSNSARQIKTALQGAIQEMLLTKTAEDYLVGKDPVSDDDIRQNRIYKILELNHYDPAYVGSILVGWCQKKWGKRNTLWLFGHATTGKTNIAEAIAHAVPFYGCVNWTNENFPFNDCVEKMIIWWEEGKMTAKVVETAKAILGGSRVRVDQKCKASVPIEPTPVIITSNTNMCYVIDGNTTTFEHKQPLEDRMFKLELLTRLPDDFGKVTKQEVRQFFRWSQDHLTPVIPEFLVRKAESRKRPAPSGEGYISPTKRPALAEQQQASESADPVPTRYRIKCSKHCGMDKMLFPCQICESMNRDINICAIHKTTDCKECFPDYGDKDDVELPPCTEHNVSRCYQCHSGELYRVTSDSDEKPAPESDEGTEPSYAPCTIHHLMGKSHGLVTCAACRLKNSTLHDDLDDGDLEQ

SEQ ID NO: 542 - protein, 541 aa, Artificial Sequence
  Description of Artificial Sequence: Synthetic polypeptide
MRSYYEVIVQLPNDVESQVPGISDSFVNWITSREWTLPEDADWDLDQVDQVQLTLGDKIQREIRTHWGTMAKEPDFHYFIQLEQGEVFFHLHVLLETCSVKPMVLGRYIRHIQQKIVSKVYCATSLRWKDGCVVTKTKNFGGANKVRAESYIPAYLIPKQQPEVQWAWTNVPEYIKACLHRELRASLARLHFEEAGVSQSKENLARTADGAPVMPTRVSKRYMELVDWLVEKGITTEKEWLLENRESFRSFQASSNSARQIKTALQGAIQEMLLTKTAEDYLVGKDPVSDDDIRQNRIYKILELNHYDPAYVGSILVGWCQKKWGKRNTLWLFGHATTGKTNIAEAIAHAVPFYGCVNWTNENFPFNDCVEKMIIWWEEGKMTAKVVETAKAILGGSRVRVDQKCKASVPIEPTPVIITSNTNMCYVIDGNTTTFEHKQPLEDRMFKLELLTRLPDDFGKVTKQEVRQFFRWSQDHLTPVIPEFLVRKAESRKRPAPSGEGYISPTKRPALAEQQQASESADPVPTRLVGAVGQKGSECCS

SEQ ID NO: 543 - protein, 743 aa, Artificial Sequence
  Description of Artificial Sequence: Synthetic polypeptide
MSLISDAIPDWLERLVKKGVNAAADFYHLESGPPRPKANQQTQESLEKDDSRGLVFPGYNYLGPFNGLDKGEPVNEADAAALEHDKAYDLEIKDGHNPYFEYNEADRRFQERLKDDTSFGGNLGKAIFQAKKRVLEPFGLVEDSKTAPTGDKRKGEDEPRLPDTSSQTPKKNKKPRKERPSGGAEDPGEGTSSNAGAAAPASSVGSSIMAEGGGGPVGDAGQGADGVGNSSGNWHCDSQWLENGVVTRTTRTWVLPSYNNHLYKRIQGPSGGDNNNKFFGFSTPWGYFDYNRFHCHFSPRDWQRLINNNWGIRPKAMRFRLFNIQVKEVTVQDFNTTIGNNLTSTVQVFADKDYQLPYVLGSATEGTFPPFPADIYTIPQYGYCTLNYNNEAVDRSAFYCLDYFPSDMLRTGNNFEFTYTFEDVPFHSMFAHNQTLDRLMNPLVDQYLWAFSSVSQAGSSGRALHYSRATKTNMAAQYRNWLPGPFFRDQQIFTGASNITKNNVFSVWEKGKQWELDNRTNLMQPGPAAATTFSGEPDRQAMQNTLAFSRTVYDQTTATTDRNQILITNEDEIRPTNSVGIDAWGAVPTNNQSIVTPGTRAAVNNQGALPGMVWQNRDIYPTGTHLAKIPDTDNHFHPSPLIGRFGCKHPPPQIFIKNTPVPANPSETFQTAKVASFINQYSTGQCTVEIFWELKKETSKRWNPEIQFTSNFGNAADIQFAVSDTGSYSEPRPIGTRYLTKPL

SEQ ID NO: 544 - protein, 598 aa, Artificial Sequence
  Description of Artificial Sequence: Synthetic polypeptide
TAPTGDKRKGEDEPRLPDTSSQTPKKNKKPRKERPSGGAEDPGEGTSSNAGAAAPASSVGSSIMAEGGGGPVGDAGQGADGVGNSSGNWHCDSQWLENGVVTRTTRTWVLPSYNNHLYKRIQGPSGGDNNNKFFGFSTPWGYFDYNRFHCHFSPRDWQRLINNNWGIRPKAMRFRLFNIQVKEVTVQDFNTTIGNNLTSTVQVFADKDYQLPYVLGSATEGTFPPFPADIYTIPQYGYCTLNYNNEAVDRSAFYCLDYFPSDMLRTGNNFEFTYTFEDVPFHSMFAHNQTLDRLMNPLVDQYLWAFSSVSQAGSSGRALHYSRATKTNMAAQYRNWLPGPFFRDQQIFTGASNITKNNVFSVWEKGKQWELDNRTNLMQPGPAAATTFSGEPDRQAMQNTLAFSRTVYDQTTATTDRNQILITNEDEIRPTNSVGIDAWGAVPTNNQSIVTPGTRAAVNNQGALPGMVWQNRDIYPTGTHLAKIPDTDNHFHPSPLIGRFGCKHPPPQIFIKNTPVPANPSETFQTAKVASFINQYSTGQCTVEIFWELKKETSKRWNPEIQFTSNFGNAADIQFAVSDTGSYSEPRPIGTRYLTKPL

SEQ ID NO: 545 - DNA, 4694 bp, Artificial Sequence
  Description of Artificial Sequence: Synthetic polynucleotide
tggccagtttccaagacaggctcgctcgctcactcgggccggggccccaaaggggcccctagcgaccgcttcgcggtcgcggcccgagtgagcgagcgagcctgtcttggaaactggccagcactccggtgaggtaatgccgtcacgtggtcgggaatgggaacgggaaatctcgcgagaacgtaaacaaatataagacggcgccacacggcgctgcgtcatacgcgcgcgcgcaccggcgagatgaggtcgtactacgaggtcatcgttcagctgcccaacgacgtcgagagtcaggtacctggaatctccgattcgttcgtcaactggattacgtcgcgagaatggacgttgcctgaggacgccgattgggatttggaccaggtcgatcaagttcaactgacgctcggcgacaaaatccaacgggagattcgaactcattgggggacgatggccaaagaaccggactttcactattttatccaactggaacaaggtgaggtgttctttcatttacacgtcctgctggaaacgtgttccgtaaagccgatggtactcggaagatatatccgacatattcaacaaaaaattgtgagtaaagtctactgcgccacgagcctacgatggaaggatggatgcgtggtgaccaagaccaaaaatttcgggggcgcgaacaaggtccgggccgagtcgtatattcccgcctacctgatcccgaaacagcaaccggaagtgcagtgggcgtggactaacgtgcccgagtatataaaagcgtgcttgcaccgagaactgcgtgccagtctcgcgcgacttcacttcgaggaggcgggcgtctcgcaatccaaggaaaatctcgcgagaactgcagacggcgctcccgtgatgccgacccgcgtcagcaaacgctacatggagctcgtggattggctcgtggagaaggggatcaccaccgagaaggaatggctgctggaaaacagagaaagctttcggagctttcaggcctcgagcaactcggcgcgtcagatcaagacggccctgcaaggcgccattcaggagatgcttctgaccaagacggcggaggactacctcgtcggaaaggatcccgtctcggacgacgacatccgtcagaaccgcatctacaagattctggaactgaaccactacgacccagcgtacgtggggagtattttggtcgggtggtgccagaagaaatggggcaagcgaaacacgctgtggctgttcggacatgcgaccaccggcaagaccaacatcgcggaggctattgcccatgctgtgccgttctatggatgcgttaactggaccaacgagaactttccgttcaacgactgcgtcgaaaaaatgattatctggtgggaggagggcaaaatgaccgccaaagtggtggaaacagccaaggcgattctgggaggatctcgggtgagagtggaccaaaaatgcaaagcttcggttccgatcgaaccgacgccggtcattattaccagtaacaccaacatgtgttatgtcatcgacgggaacacgaccacgttcgagcataagcagccgttggaggacaggatgtttaagctcgaattgctgactcggttgcctgatgactttggtaaggtgaccaaacaggaggtgcgtcaattcttcaggtggtctcaggatcacctgacccctgtgatcccagaattcctagtgcggaaggcggagtctcgcaaaagacccgccccttccggggaaggctatataagcccgacaaagcggcccgcgctcgcagagcagcagcaggcgtcggagagcgcggacccggttcccaccaggtatcgtatcaaatgctcgaaacattgcggtatggataaaatgttgtttccttgccaaatttgtgaatcgatgaacagagatattaatatttgtgctattcataaaacgaccgactgtaaagagtgtttccccgactacggggataaagatgatgtagaactacccccctgtacagaacacaacgtgtctcgttgttatcaatgtcattcgggcgaattgtatcgcgtgacttcggactctgacgagaaacctgcccccgagagtgatgaaggcaccgagccatcctatgctccctgcacgattcaccacctgatgggcaagagtcacgggttagtcacttgcgcggcgtgtcggttgaaaaatagtacgttgcatgatgacttggatgacggtgatctcgaacaataaatgattgaaatgtagccatgtctctcatttctgatgcgattccagattggttggagcggttggtcaaaaagggagtgaatgctgcagctgatttctaccatttggaaagcggtcctcctcgtcctaaggcaaatcagcaaactcaagaatctcttgaaaaggacgattcgagaggtctcgtgttcccaggctacaattatctaggccctttcaacggtctagataaaggagaacccgtcaacgaggcagacgctgccgccttagaacacgacaaggcttacgacctcgaaatcaaggacgggcacaacccgtactttgagtacaacgaggccgacagacgtttccaggaacgtctcaaagacgatacctcctttggaggcaatttaggtaaagccatcttccaggccaaaaagagggttctcgaaccctttggtctggtggaagactcaaagacggctccgaccggagacaagcggaaaggcgaagacgaacctcgtttgcccgacacttcttcacagactcccaagaaaaacaagaagcctcgcaaggaaagaccttccggcggggcagaagatccgggcgaaggcacctcttccaacgctggagcagcagcacccgcctctagtgtgggatcatctatcatggctgaaggaggtggcggcccagtgggcgatgcaggccagggtgccgatggagtgggcaattcctccggaaattggcattgcgattcccaatggctggaaaacggagtcgtcactcgaaccacccgaacctgggtcttgcccagctacaacaaccacctgtacaaacgaatccaaggacccagcggaggcgacaacaacaacaaattctttggattcagcaccccctggggatactttgactacaatcgattccactgccacttttccccgcgagactggcaacgactcatcaacaacaactggggcatccgtcccaaagcgatgcgctttagactctttaacatccaggttaaagaggtcacggtccaagacttcaacaccaccatcggcaacaacctcaccagtacggtccaggtctttgcggacaaggactaccaactgccgtacgtcctcggatcggctaccgaaggcaccttcccgccgttcccagcggatatctacacgatcccgcagtacgggtactgcacgctaaactacaacaacgaggcggtggatcgttcggccttctactgtctggactactttccctcagacatgctgcggacaggaaataactttgagtttacttacaccttcgaggacgttcctttccatagcatgtttgcccacaaccagacgctagaccggctgatgaatcccctcgtggatcagtacctctgggctttcagctccgtcagccaagcaggctcatctggacgagctcttcattactcgcgggcgactaaaaccaacatggcggctcaatataggaactggttacctgggcctttcttccgtgatcagcaaatctttacgggcgctagcaacatcactaaaaataacgtctttagcgtttgggaaaaaggcaagcaatgggaactcgacaatcggaccaacctaatgcagcccggtcctgcggcagcgaccacctttagcggagaacctgaccgtcaagccatgcaaaacacgctggcttttagcaggaccgtctacgatcaaacgaccgccacgaccgatcgtaaccagatactcatcaccaacgaagacgaaatcagacccaccaactcggtcggtatcgacgcgtggggagcagttcccaccaacaaccagtcgatcgtgacccccggcactcgcgcggccgtcaacaatcaaggggcgcttcccgggatggtgtggcaaaacagagacatttaccctacagggacccatttggccaaaattcccgacactgacaatcacttccatccgtccccgcttattgggcggtttggctgcaagcatccccctccccagattttcattaaaaacacacccgtccctgccaacccttcggaaacgttccagacggccaaagtggcctccttcatcaaccagtactcgaccggacagtgcaccgtcgaaatcttttgggaactcaagaaggaaacctccaagcgctggaaccccgaaatccagttcacctccaactttggcaacgcggccgacatccagtttgccgtctccgacacgggatcctattccgaacctcgtcccatcggtacccgttaccttaccaaacctctgtaaattaaacccttcaataaaccgtttatgcgtaactgtatttccgtctcctgtcgttattcagtcacatgatgcggcattacctcaccggagtgctggccagtttccaagacaggctcgctcgctcactcgggccggggccccaaaggggcccctagcgaccgcttcgcggtcgcggcccgagtgagcgagcgagcctgtcttggaaactggcca

SEQ ID NO: 546 - DNA, 2211 bp, Artificial Sequence
  Description of Artificial Sequence: Synthetic polynucleotide
atggctgctgatggttatcttccagattggctcgaggacactctctctgaaggaataagacagtggtggaagctcaaacctggcccaccaccaccaaagcccgcagagcggcataaggacgacagcaggggtcttgtgcttcctgggtacaagtacctcggacccttcaacggactcgacaagggagagccggtcaacgaggcagacgcagcggccctcgagcacgacaaggcctacgaccagcagctcaaggccggtgacaacccctacctcaagtacaaccacgccgacgcggagttccagcagcggcttcagggcgacacatcgtttgggggcaacctcggcagagcagtcttccaggccaaaaagagggttcttgaacctcttggtctggttgagcaagcgggtgagacggctcctggaaagaagagaccgttgattgaatccccccagcagcccgactcctccacgggtatcggcaaaaaaggcaagcagccggctaaaaagagactcaattttggtcagactggcgactcagagtcagtccccgacccacaacctctcggagaacctccagcaacccccgctgctgtgggacctactacaatggcttcaggtggtggcgcaccaatggcagacaataacgaaggcgccgacggagtgggtaatgcctcaggaaattggcattgcgattccacatggctgggcgacagagtcatcaccaccagcacccgcacctgggccttgcccacctacaataaccacctctacaagcaaatctccagtgcttcaacgggggccagcaacgacaaccactacttcggctacagcaccccctgggggtattttgacttcaacagattccactgccacttttcaccacgtgactggcagcgactcatcaacaacaattggggattccggcccaagagactcaacttcaaactcttcaacatccaagtcaaggaggtcacgacgaatgatggcgtcacaaccatcgctaataaccttaccagcacggttcaagtcttctcggactcagactatcagctcccgtacgtgctcgggtcggctcacgagggctgcctcccgccgttcccagcagacgtcttcatggtgccacagtatggatacctcaccctgaacaacgggagtcaggcagtaggacgctcttcattttactgcctggagtactttccttctcagatgctgcgtaccggaaacaactttaccttcagctacacttttgaggacgttcctttccacagcagctacgctcacagccagagtctggaccgtctcatgaatcctctcatcgaccagtacctgtattacctgaacagaactcagaatcagtccggaagtgcccaaaacaaggacttgctgtttagccgggggtctccagctggcatgtctgttcagcccaaaaactggctacctggaccctgttatcggcagcagcgcgtttctaaaacaaaaacagacaacaacaacagcaactttacctggactggtgcttcaaaatataaccttaatgggcgtgaatctataatcaaccctggcactgctatggcctcacacaaagacgacaaagacaagttctttcccatgagcggtgtcatgatttttggaaaggagagcgccggagcttcaaacactgcattggacaatgtcatgatcacagacgaagaggaaatcaaagccactaaccccgtggccaccgaaagatttgggactgtggcagtcaatctccagagcagcagcacagaccctgcgaccggagatgtgcatgttatgggagccttacctggaatggtgtggcaagacagagacgtatacctgcagggtcccatttgggccaaaattcctcacacagatggacactttcacccgtctcctcttatgggcggctttggactcaagaacccgcctcctcagatcctcatcaaaaacacgcctgttcctgcgaatcctccggcggagttttcagctacaaagtttgcttcattcatcacccaatactccacaggacaagtgagtgtggaaattgaatgggagctgcagaaagaaaacagcaagcgctggaatcccgaagtgcagtacacatccaattatgcaaaatctgccaacgttgattttactgtggacaacaatggactttatactgagcctcgccccattggcacccgttacctcacccgtcccctgtaa

SEQ ID NO: 547 - protein, 736 aa, Artificial Sequence
  Description of Artificial Sequence: Synthetic polypeptide
MAADGYLPDWLEDTLSEGIRQWWKLKPGPPPPKPAERHKDDSRGLVLPGYKYLGPFNGLDKGEPVNEADAAALEHDKAYDQQLKAGDNPYLKYNHADAEFQQRLQGDTSFGGNLGRAVFQAKKRVLEPLGLVEQAGETAPGKKRPLIESPQQPDSSTGIGKKGKQPAKKRLNFGQTGDSESVPDPQPLGEPPATPAAVGPTTMASGGGAPMADNNEGADGVGNASGNWHCDSTWLGDRVITTSTRTWALPTYNNHLYKQISSASTGASNDNHYFGYSTPWGYFDFNRFHCHFSPRDWQRLINNNWGFRPKRLNFKLFNIQVKEVTTNDGVTTIANNLTSTVQVFSDSDYQLPYVLGSAHEGCLPPFPADVFMVPQYGYLTLNNGSQAVGRSSFYCLEYFPSQMLRTGNNFTFSYTFEDVPFHSSYAHSQSLDRLMNPLIDQYLYYLNRTQNQSGSAQNKDLLFSRGSPAGMSVQPKNWLPGPCYRQQRVSKTKTDNNNSNFTWTGASKYNLNGRESIINPGTAMASHKDDKDKFFPMSGVMIFGKESAGASNTALDNVMITDEEEIKATNPVATERFGTVAVNLQSSSTDPATGDVHVMGALPGMVWQDRDVYLQGPIWAKIPHTDGHFHPSPLMGGFGLKNPPPQILIKNTPVPANPPAEFSATKFASFITQYSTGQVSVEIEWELQKENSKRWNPEVQYTSNYAKSANVDFTVDNNGLYTEPRPIGTRYLTRPL

SEQ ID NO: 548 - DNA, 2211 bp, Artificial Sequence
  Description of Artificial Sequence: Synthetic polynucleotide
atggcttccgatggttatcttccagattggctcgaggacaacctctctgagggcatccgcgagtggtgggacttgaaacctggagccccgaaacccaaagccaaccagcaaaagcaggacgacggccggggtctggtgcttcctggctacaagtacctcggacccttcaacggactcgacaagggggagcccgtcaacgcggcggatgcagcggccctcgagcacgacaaggcctacgaccagcagctcagagcgggtgacaatccgtacctgcggtataaccacgccgacgccgagtttcaggagcgtctgcaagaagatacgtcttttgggggcaacctcgggcgagcagtcttccaggccaagaagagggttctcgaaccttttggtctggttgaggaaggtgctaagacggctcctggaaagaaacgtccggtagagcagtcgccacaagagccagactcctcctcgggcattggcaagacaggccagcagcccgctaaaaagagactcaattttggtcagactggcgactcagagtcagtccccgacccacaacctctcggagaacctccagcaacccccgctgctgtgggacctactacaatggcttcaggcggtggcgcaccaatggcagacaataacgaaggcgccgacggagtgggtaatgcctcaggaaattggcattgcgattccacatggctgggcgacagagtcatcaccaccagcacccgaacatgggccttgcccacctataacaaccacctctacaagcaaatctccagtgcttcaacgggggccagcaacgacaaccactacttcggctacagcaccccctgggggtattttgatttcaacagattccactgccatttctcaccacgtgactggcagcgactcatcaacaacaattggggattccggcccaagagactcaacttcaaactcttcaacatccaagtcaaggaggtcacgacgaatgatggcgtcacaaccatcgctaataaccttaccagcacggttcaagtcttctcggactcggagtaccagcttccgtacgtcctcggctctgcgcaccagggctgcctccctccgttcccggcggacgtgttcatgattccgcagtacggctacctaacgctcaacaatggcagccaggcagtgggacggtcatccttttactgcctggaatatttcccatcgcagatgctgagaacgggcaataactttaccttcagctacaccttcgaggacgtgcctttccacagcagctacgcgcacagccagagcctggaccggctgatgaatcctctcatcgaccagtacctgtattacctgaacagaactcagaatcagtccggaagtgcccaaaacaaggacttgctgtttagccgggggtctccagctggcatgtctgttcagcccaaaaactggctacctggaccctgttaccggcagcagcgcgtttctaaaacaaaaacagacaacaacaacagcaactttacctggactggtgcttcaaaatataaccttaatgggcgtgaatctataatcaaccctggcactgctatggcctcacacaaagacgacaaagacaagttctttcccatgagcggtgtcatgatttttggaaaggagagcgccggagcttcaaacactgcattggacaatgtcatgatcacagacgaagaggaaatcaaagccactaaccccgtggccaccgaaagatttgggactgtggcagtcaatctccagagcagcagcacagaccctgcgaccggagatgtgcatgttatgggagccttacctggaatggtgtggcaagacagagacgtatacctgcagggtcccatttgggccaaaattcctcacacagatggacactttcacccgtctcctcttatgggcggctttggacttaagcacccgcctcctcagatcctcatcaaaaacacgcctgttcctgcgaatcctccggcagagttttcggctacaaagtttgcttcattcatcacccagtattctactggccaagtcagcgtggagattgaatgggagctgcagaaagaaaacagcaaacgctggaatcccgaagtgcagtatacatctaactatgcaaaatctgccaacgttgatttcactgtggacaacaatggactttatactgagcctcgtcccattggcacccgttacctcacccgtcccctgtaa

SEQ ID NO: 549 - protein, 736 aa, Artificial Sequence
  Description of Artificial Sequence: Synthetic polypeptide
MASDGYLPDWLEDNLSEGIREWWDLKPGAPKPKANQQKQDDGRGLVLPGYKYLGPFNGLDKGEPVNAADAAALEHDKAYDQQLRAGDNPYLRYNHADAEFQERLQEDTSFGGNLGRAVFQAKKRVLEPFGLVEEGAKTAPGKKRPVEQSPQEPDSSSGIGKTGQQPAKKRLNFGQTGDSESVPDPQPLGEPPATPAAVGPTTMASGGGAPMADNNEGADGVGNASGNWHCDSTWLGDRVITTSTRTWALPTYNNHLYKQISSASTGASNDNHYFGYSTPWGYFDFNRFHCHFSPRDWQRLINNNWGFRPKRLNFKLFNIQVKEVTTNDGVTTIANNLTSTVQVFSDSEYQLPYVLGSAHQGCLPPFPADVFMIPQYGYLTLNNGSQAVGRSSFYCLEYFPSQMLRTGNNFTFSYTFEDVPFHSSYAHSQSLDRLMNPLIDQYLYYLNRTQNQSGSAQNKDLLFSRGSPAGMSVQPKNWLPGPCYRQQRVSKTKTDNNNSNFTWTGASKYNLNGRESIINPGTAMASHKDDKDKFFPMSGVMIFGKESAGASNTALDNVMITDEEEIKATNPVATERFGTVAVNLQSSSTDPATGDVHVMGALPGMVWQDRDVYLQGPIWAKIPHTDGHFHPSPLMGGFGLKHPPPQILIKNTPVPANPPAEFSATKFASFITQYSTGQVSVEIEWELQKENSKRWNPEVQYTSNYAKSANVDFTVDNNGLYTEPRPIGTRYLTRPL

SEQ ID NO: 550 - DNA, 2211 bp, Artificial Sequence
  Description of Artificial Sequence: Synthetic polynucleotide
atggctgctgatggttatcttccagattggctcgaggacactctctctgaaggaataagacagtggtggaagctcaaacctggcccaccaccaccaaagcccgcagagcggcataaggacgacagcaggggtcttgtgcttcctgggtacaagtacctcggacccttcaacggactcgacaagggagagccggtcaacgaggcagacgcagcggccctcgagcacgacaaggcctacgaccagcagctcaaggccggtgacaacccctacctcaagtacaaccacgccgacgcggagttccagcagcggcttcagggcgacacatcgtttgggggcaacctcggcagagcagtcttccaggccaaaaagagggttcttgaacctcttggtctggttgagcaagcgggtgagacggctcctggaaagaagagaccgttgattgaatccccccagcagcccgactcctccacgggtatcggcaaaaaaggcaagcagccggctaaaaagagactcaattttggtcagactggcgactcagagtcagtccccgacccacaacctctcggagaacctccagcaacccccgctgctgtgggacctactacaatggcttcaggtggtggcgcaccaatggcagacaataacgaaggcgccgacggagtgggtaatgcctcaggaaattggcattgcgattccacatggctgggcgacagagtcatcaccaccagcacccgcacctgggccttgcccacctacaataaccacctctacaagcaaatctccagtgcttcaacgggggccagcaacgacaaccactacttcggctacagcaccccctgggggtattttgacttcaacagattccactgccacttttcaccacgtgactggcagcgactcatcaacaacaattggggattccggcccaagagactcaacttcaaactcttcaacatccaagtcaaggaggtcacgacgaatgatggcgtcacaaccatcgctaataaccttaccagcacggttcaagtcttctcggactcagactatcagctcccgtacgtgctcgggtcggctcacgagggctgcctcccgccgttcccagcagacgtcttcatggtgccacagtatggatacctcaccctgaacaacgggagtcaggcagtaggacgctcttcattttactgcctggagtactttccttctcagatgctgcgtaccggaaacaactttaccttcagctacacttttgaggacgttcctttccacagcagctacgctcacagccagagtctggaccgtctcatgaatcctctcatcgaccagtacctgtattacctgaacagaactcagaatcagtccggaagtgcccaaaacaaggacttgctgtttagccgggggtctccaactggcatgtctgttcagcccaaaaactggctacctggaccctgttatcggcagcagcgcgtttctaaaacaaaaacagacaacaacaacagcaactttacctggactggtgcttcaaaatataaccttaatgggcgtgaatctataatcaaccctggcactgctatggcctcacacaaagacgacaaagacaagttctttcccatgagcggtgtcatgatttttggaaaggagagcgccggagcttcaaacactgcattggacaatgtcatgatcacagacgaagaggaaatcaaagccactaaccccgtggccactgaaagatttgggactgtggcagtcaatctccagagcagcagcacagaccctgcgaccggagatgtgcatgccatgggagccttacctggaatggtgtggcaagacagagacgtatacctgcagggtcctatttgggccaaaattcctcacacggatggacactttcacccgtctcctctcatgggcggctttggactcaagaacccgcctcctcagatcctcatcaaaaacacgcctgttcctgcgaatcctccggcggagttttcagctacaaagtttgcttcattcatcacccagtattccacaggacaagtgagcgtggagattgaatgggagctgcagaaagaaaacagcaaacgctggaatcccgaagtgcagtatacatctaactatgcaaaatctgccaacgttgatttcactgtggacaacaatggactttatactgagcctcgccccattggcacccgttacctcacccgtcccctgtaa

SEQ ID NO: 551 - protein, 736 aa, Artificial Sequence
  Description of Artificial Sequence: Synthetic polypeptide
MAADGYLPDWLEDTLSEGIRQWWKLKPGPPPPKPAERHKDDSRGLVLPGYKYLGPFNGLDKGEPVNEADAAALEHDKAYDQQLKAGDNPYLKYNHADAEFQQRLQGDTSFGGNLGRAVFQAKKRVLEPLGLVEQAGETAPGKKRPLIESPQQPDSSTGIGKKGKQPAKKRLNFGQTGDSESVPDPQPLGEPPATPAAVGPTTMASGGGAPMADNNEGADGVGNASGNWHCDSTWLGDRVITTSTRTWALPTYNNHLYKQISSASTGASNDNHYFGYSTPWGYFDFNRFHCHFSPRDWQRLINNNWGFRPKRLNFKLFNIQVKEVTTNDGVTTIANNLTSTVQVFSDSDYQLPYVLGSAHEGCLPPFPADVFMVPQYGYLTLNNGSQAVGRSSFYCLEYFPSQMLRTGNNFTFSYTFEDVPFHSSYAHSQSLDRLMNPLIDQYLYYLNRTQNQSGSAQNKDLLFSRGSPTGMSVQPKNWLPGPCYRQQRVSKTKTDNNNSNFTWTGASKYNLNGRESIINPGTAMASHKDDKDKFFPMSGVMIFGKESAGASNTALDNVMITDEEEIKATNPVATERFGTVAVNLQSSSTDPATGDVHAMGALPGMVWQDRDVYLQGPIWAKIPHTDGHFHPSPLMGGFGLKNPPPQILIKNTPVPANPPAEFSATKFASFITQYSTGQVSVEIEWELQKENSKRWNPEVQYTSNYAKSANVDFTVDNNGLYTEPRPIGTRYLTRPL

SEQ ID NO: 552 - DNA, 2211 bp, Artificial Sequence
  Description of Artificial Sequence: Synthetic polynucleotide
atggctgccgatggttatcttccagattggctcgaggacaacctctctgagggcattcgcgagtggtgggcgctgaaacctggagccccgaagcccaaagccaaccagcaaaagcaggacgacggccggggtctggtgcttcctggctacaagtacctcggacccttcaacggactcgacaagggggagcccgtcaacgcggcggatgcagcggccctcgagcacgacaaggcctacgaccagcagctcaaagcgggtgacaatccgtacctgcggtataaccacgccgacgccgagtttcaggagcgtctgcaagaagatacgtcttttgggggcaacctcgggcgagcagtcttccaggccaagaagcgggttctcgaacctctcggtctggttgaggaaggcgctaagacggctcctggaaagaaacgtccggtagagcaatcgccacaagagccagactcctcctcgggcatcggcaagacaggccagcagcccgctaaaaagagactcaattttggtcagactggcgactcagagtcagtccccgacccacaacctctcggagaacctccagcaacccccgctgctgtgggacctactacaatggcttcaggcggtggcgcaccaatggcagacaataacgaaggcgccgacggagtgggtaatgcctcaggaaattggcattgcgattccacatggctgggcgacagagtcatcaccaccagcacccgaacatgggccttgcccacctataacaaccacctctacaagcaaatctccagtgcttcgacgggggccagcaacgacaaccactacttcggctacagcaccccctgggggtattttgactttaacagattccactgccacttttcaccacgtgactggcagcgactcatcaacaacaactggggattccggcccaagagactcagcttcaagctcttcaacatccaggtcaaggaggtcacgacgaatgatggcgtcacaaccatcgctaataaccttaccagcacggttcaagtcttctcggactcggagtaccagcttccgtacgtcctcggctctgcgcaccagggctgcctccctccgttcccggcggacgtgttcatgattccgcaatacggctacctgacgctcaacaatggcagccaagccgtgggacgttcatccttttactgcctggaatatttcccttctcagatgctgagaacgggcaacaactttaccttcagctacacctttgaggaagtgcctttccacagcagctacgcgcacagccagagcctggaccggctgatgaatcctctcatcgatcaatacctgtattacctgaacagaactcaaaatcagtccggaagtgcccaaaacaaggacttgctgtttagccgtgggtctccagctggcatgtctgttcagcccaaaaactggctacctggaccctgttatcggcagcagcgcgtttctaaaacaaaaacagacaacaacaacagcaattttacctggactggtgcttcaaaatataacctcaatgggcgtgaatccatcatcaaccctggcactgctatggcctcacataaagacgacgaagacaagttctttcccatgagcggtgtcatgatttttggaaaagagagcgccggagcttcaaacactgcattggacaatgtcatgattacagacgaagaggaaattaaagccactaaccctgtggccaccgaaagatttgggaccgtggcagtcaatttccagagcagcagcacagaccctgcgaccggagatgtgcatgctatgggagcattacctggcatggtgtggcaagatagagacgtgtacctgcagggtcccatttgggccaaaattcctcacacagatggacactttcacccgtctcctcttatgggcggctttggactcaagaacccgcctcctcagatcctcatcaaaaacacgcctgttcctgcgaatcctccggcggagttttcagctacaaagtttgcttcattcatcacccaatactccacaggacaagtgagcgtggagattgaatgggagctgcagaaagaaaacagcaaacgctggaatcccgaagtgcagtatacatctaactatgcaaaatctgccaacattgatttcactgtggacaacaatggactttatactgagcctcgccccattggcacccgttacctcacccgtccccagtaa

SEQ ID NO: 553 - protein, 736 aa, Artificial Sequence
  Description of Artificial Sequence: Synthetic polypeptide
MAADGYLPDWLEDNLSEGIREWWALKPGAPKPKANQQKQDDGRGLVLPGYKYLGPFNGLDKGEPVNAADAAALEHDKAYDQQLKAGDNPYLRYNHADAEFQERLQEDTSFGGNLGRAVFQAKKRVLEPLGLVEEGAKTAPGKKRPVEQSPQEPDSSSGIGKTGQQPAKKRLNFGQTGDSESVPDPQPLGEPPATPAAVGPTTMASGGGAPMADNNEGADGVGNASGNWHCDSTWLGDRVITTSTRTWALPTYNNHLYKQISSASTGASNDNHYFGYSTPWGYFDFNRFHCHFSPRDWQRLINNNWGFRPKRLSFKLFNIQVKEVTTNDGVTTIANNLTSTVQVFSDSEYQLPYVLGSAHQGCLPPFPADVFMIPQYGYLTLNNGSQAVGRSSFYCLEYFPSQMLRTGNNFTFSYTFEEVPFHSSYAHSQSLDRLMNPLIDQYLYYLNRTQNQSGSAQNKDLLFSRGSPAGMSVQPKNWLPGPCYRQQRVSKTKTDNNNSNFTWTGASKYNLNGRESIINPGTAMASHKDDEDKFFPMSGVMIFGKESAGASNTALDNVMITDEEEIKATNPVATERFGTVAVNFQSSSTDPATGDVHAMGALPGMVWQDRDVYLQGPIWAKIPHTDGHFHPSPLMGGFGLKNPPPQILIKNTPVPANPPAEFSATKFASFITQYSTGQVSVEIEWELQKENSKRWNPEVQYTSNYAKSANIDFTVDNNGLYTEPRPIGTRYLTRPQ

SEQ ID NO: 554 - DNA, 2211 bp, Artificial Sequence
  Description of Artificial Sequence: Synthetic polynucleotide
atggctgccgatggttatcttccagattggctcgaggacaacctctctgagggcattcgcgagtggtgggacttgaaacctggagccccgaaacccaaagccaaccagcaaaagcaggacgacggccggggtctggtgcttcctggctacaagtacctcggacccttcaacggactcgacaagggggagcccgtcaacgcggcggatgcagcggccctcgagcacgacaaggcctacgaccagcagctcaaagcgggtgacaatccgtaccttcggtataaccacgccgacgccgagtttcaggagcgtctgcaagaagatacgtcttttgggggcaacctcgggcgagcagtcttccaggccaaaaagagggttctcgaacctctcggtctggttgaggaagcggctaagacggctcctggaaagaaacgtccggtagagcagtcgccacaagagccagactcctcctcgggcattggcaagacaggccagcagcccgctaaaaagagactcaattttggtcagactggcgactcagagtcagtccccgacccacaacctctcggagaacctcccgcagccccctcaggtgtgggatctcttacaatggcttcaggtggtggcgcaccaatggcagacaataacgaaggcgccgacggagtgggtaatgcctcaggaaattggcattgcgattccacatggctgggcgacagagtcatcaccaccagcacccgcacctgggccttgcccacctacaataaccacctctacaagcaaatctccagtgcttcaacgggggccagcaacgacaaccactacttcggctacagcaccccctgggggtattttgacttcaacagattccactgccacttttcaccacgtgactggcaaagactcatcaacaacaattggggattccggcccaagagactcaacttcaagctcttcaacatccaagtcaaggaggtcacgacgaatgatggcgtcacgaccatcgctaataaccttaccagcacggttcaagtcttctcggactcggagtaccagttgccgtacgtcctcggctctgcgcaccagggctgcctccctccgttcccggcggacgtgttcatgattccgcagtacggctacctaacgctcaacaatggcagccaggcagtgggacggtcatccttttactgcctggaatatttcccatcgcagatgctgagaacgggcaacaactttaccttcagctacacctttgaggaagtgcctttccacagcagctacgcgcacagccagagcctggaccggctgatgaatcctctcatcgaccagtacctgtattacctgaacagaactcaaaatcagtccggaagtgcccaaaacaaggacttgctgtttagccgtgggtctccagctggcatgtctgttcagcccaaaaactggctacctggaccctgttaccggcagcagtgcgtttctaaaacaaaaacagacaacaacaacagcaactttacctggactggtgcttcaaaatataaccttaatgggcgtgaatctataatcaaccctggcactgctatggcctcacacaaagacgacaaagacaagttctttcccatgagcggtgtcatgatttttggaaaggagagcgccggagcttcaaacactgcattggacaatgtcatgatcacagacgaagaggaaatcaaagccactaaccccgtggccaccgaaagatttgggactgtggcagtcaatctccagagcagcagcacagaccctgcgaccggagatgtgcatgttatgggagccttacctggaatggtgtggcaagacagagacgtatacctgcagggtcctatttgggccaaaattcctcacacagatggacactttcacccgtctcctcttatgggcggctttggactcaagaacccgcctcctcagatcctcatcaaaaacacgcctgttcctgcgaatcctccggcggagttttcagctacaaagtttgcttcattcatcacccaatactccacaggacaagtgagcgtggagattgaatgggagctgcagaaagaaaacagcaagcgctggaatcccgaagtgcagtacacatccaattatgcaaaatctgccaacgttgatttcactgtggacaacaatggactttatactgagcctcgccccattggcacccgttacctcacccgtcccctgtaa

SEQ ID NO: 555 - protein, 736 aa, Artificial Sequence
  Description of Artificial Sequence: Synthetic polypeptide
MAADGYLPDWLEDNLSEGIREWWDLKPGAPKPKANQQKQDDGRGLVLPGYKYLGPFNGLDKGEPVNAADAAALEHDKAYDQQLKAGDNPYLRYNHADAEFQERLQEDTSFGGNLGRAVFQAKKRVLEPLGLVEEAAKTAPGKKRPVEQSPQEPDSSSGIGKTGQQPAKKRLNFGQTGDSESVPDPQPLGEPPAAPSGVGSLTMASGGGAPMADNNEGADGVGNASGNWHCDSTWLGDRVITTSTRTWALPTYNNHLYKQISSASTGASNDNHYFGYSTPWGYFDFNRFHCHFSPRDWQRLINNNWGFRPKRLNFKLFNIQVKEVTTNDGVTTIANNLTSTVQVFSDSEYQLPYVLGSAHQGCLPPFPADVFMIPQYGYLTLNNGSQAVGRSSFYCLEYFPSQMLRTGNNFTFSYTFEEVPFHSSYAHSQSLDRLMNPLIDQYLYYLNRTQNQSGSAQNKDLLFSRGSPAGMSVQPKNWLPGPCYRQQCVSKTKTDNNNSNFTWTGASKYNLNGRESIINPGTAMASHKDDKDKFFPMSGVMIFGKESAGASNTALDNVMITDEEEIKATNPVATERFGTVAVNLQSSSTDPATGDVHVMGALPGMVWQDRDVYLQGPIWAKIPHTDGHFHPSPLMGGFGLKNPPPQILIKNTPVPANPPAEFSATKFASFITQYSTGQVSVEIEWELQKENSKRWNPEVQYTSNYAKSANVDFTVDNNGLYTEPRPIGTRYLTRPL

SEQ ID NO: 556 - DNA, 2211 bp, Artificial Sequence
  Description of Artificial Sequence: Synthetic polynucleotide
atggctgccgatggttatcttccagattggctcgaggacaacctctctgagggcattcgcgaatggtgggacttgaaacctggagccccgaaacccaaagtcaaccagcaaaagcaggacaacgctcggggtcttgtgcttccgggttacaaatacctcggacccttcaacggactcgacaagggggagcccgtcaacgcggcggacgcagcggccctcgagcacgacaaggcctacgaccagcagctcaaagcgggtgacaatccgtaccttcggtataaccacgccgacgccgagtttcaggagcgtctgcaagaagatacgtcttttgggggcaaccttggacgagcagtcttccaggccaagaagagggttctcgaaccttttggtctggttgaggaaggtgctaagacggctcctggaaagaaacgtccggtagagcagtcgccacaagagccagactcctcctcgggcattggcaagacaggccagcagcccgctaaaaagagactcaattttggtcagactggcgactcagagtcagtccccgacccacaacctctcggagaacctccagcaacccccgctgctgtgggacctactacaatggcttcaggcggtggcgcaccaatggcagacaataacgaaggcgccgacggagtgggtaatgcctcaggaaattggcattgcgattccacatggctgggcgacagagtcatcaccaccagcacccgcacctgggccttgcccacctacaataaccacctctacaagcaaatctccagtgcttcaacgggggccagcaacgacaaccactacttcggctacagcaccccctgggggtattttgacttcaacagattccactgccacttttcaccacgtgactggcaaagactcatcaacaacaattggggattccggcccaagagactcaacttcaagctcttcaacatccaagtcaaggaggtcacgacgaatgatggcgtcacgaccatcgctaataaccttaccagcacggttcaagtcttctcggactcggagtaccagttgccgtacgtcctcggctctgcgcaccagggctgcctccctccgttcccggcggacgtgttcatgattccgcaatacggctacctgacgctcaacaatggcagccaggcagtgggacggtcatccttttactgcctggaatatttcccatcgcagatgctgagaacgggcaataactttaccttcagctacacttttgaggacgttcctttccacagcagctacgctcacagccagagcctggaccggctgatgaatcctctcatcgaccagtacctgtattacctgaacagaactcagaatcagtccggaagtgcccaaaacaaggacttgctgtttagccgtgggtctccaactggcatgtctgttcagcccaaaaactggctacctggaccctgttatcggcagcagcgcgtttctaaaacaaaaacagacaacaacaacagcaactttacctggactggtgcttcaaaatataaccttaatgggcgtgaatctataatcaaccctggcactgctatggcctcacacaaagacgacgaagacaagttctttcccatgagcggtgtcatgatttttggaaaggagagcgccggagcttcaaacactgcattggacaatgtcatgatcacagacgaagaggaaatcaaagccactaaccccgtggccactgaaagatttgggactgtggcagtcaatctccagagcagcagcacagaccctgcgaccggagatgtgcatgccatgggagccttacctggaatggtgtggcaagacagagacgtatacctgcagggtcctatttgggccaaaattcctcacacggatggacactttcacccgtctcctctcatgggcggctttggacttaagcacccgcctcctcagatcctcatcaaaaacacgcctgttcctgcgaatcctccggcagagttttcggctacaaagtttgcttcattcatcacccagtattccacaggacaagtgagcgtggagattgaatgggagctgcagaaagaaaacagcaaacgctggaatcccgaagtgcagtatacatctaactatgcaaaatctgccaacgttgatttcactgtggacaacaatggactttatactgagcctcgccccattggcacccgttacctcacccgtcccctgtaa

SEQ ID NO: 557 - protein, 736 aa, Artificial Sequence
  Description of Artificial Sequence: Synthetic polypeptide
MAADGYLPDWLEDNLSEGIREWWDLKPGAPKPKVNQQKQDNARGLVLPGYKYLGPFNGLDKGEPVNAADAAALEHDKAYDQQLKAGDNPYLRYNHADAEFQERLQEDTSFGGNLGRAVFQAKKRVLEPFGLVEEGAKTAPGKKRPVEQSPQEPDSSSGIGKTGQQPAKKRLNFGQTGDSESVPDPQPLGEPPATPAAVGPTTMASGGGAPMADNNEGADGVGNASGNWHCDSTWLGDRVITTSTRTWALPTYNNHLYKQISSASTGASNDNHYFGYSTPWGYFDFNRFHCHFSPRDWQRLINNNWGFRPKRLNFKLFNIQVKEVTTNDGVTTIANNLTSTVQVFSDSEYQLPYVLGSAHQGCLPPFPADVFMIPQYGYLTLNNGSQAVGRSSFYCLEYFPSQMLRTGNNFTFSYTFEDVPFHSSYAHSQSLDRLMNPLIDQYLYYLNRTQNQSGSAQNKDLLFSRGSPTGMSVQPKNWLPGPCYRQQRVSKTKTDNNNSNFTWTGASKYNLNGRESIINPGTAMASHKDDEDKFFPMSGVMIFGKESAGASNTALDNVMITDEEEIKATNPVATERFGTVAVNLQSSSTDPATGDVHAMGALPGMVWQDRDVYLQGPIWAKIPHTDGHFHPSPLMGGFGLKHPPPQILIKNTPVPANPPAEFSATKFASFITQYSTGQVSVEIEWELQKENSKRWNPEVQYTSNYAKSANVDFTVDNNGLYTEPRPIGTRYLTRPL

SEQ ID NO: 558 - DNA, 2208 bp, Artificial Sequence
  Description of Artificial Sequence: Synthetic polynucleotide
  misc_feature (955)..(955): n is a, c, t, or g
  misc_feature (971)..(972): n is a, c, t, or g
  misc_feature (981)..(981): n is a, c, t, or g
  misc_feature (986)..(986): n is a, c, t, or g
  misc_feature (1235)..(1235): n is a, c, t, or g
  misc_feature (1694)..(1696): n is a, c, t, or g
  misc_feature (1698)..(1698): n is a, c, t, or g
  misc_feature (1763)..(1765): n is a, c, t, or g
  misc_feature (1778)..(1778): n is a, c, t, or g
  misc_feature (2204)..(2204): n is a, c, t, or g
atggctgccgatggttatcttccagattggctcgaggacaacctctctgagggcattcgcgaatggtgggacttgaaacctggagccccgaaacccaaagtcaaccagcaaaagcaggacaacgctcggggtcttgtgcttccgggttacaaatacctcggacccttcaacggactcgacaagggggagcccgtcaacgcggcggacgcagcggccctcgagcacgacaaggcctacgaccagcagctcaaagcgggtgacaatccgtaccttcggtataaccacgccgacgccgagtttcaggagcgtctgcaagaagatacgtcttttgggggcaaccttggacgagcagtcttccaggccaagaagagggttctcgaaccttttggtctggttgaggaaggtgctaagacggctcctggaaagaaacgtccggtagagcagtcgccacaagagccagactcctcctcgggcattggcaagacaggccagcagcccgctaaaaagagactcaattttggtcagactggcgactcagagtcagtccccgacccacaacctctcggagaacctccagcaacccccgctgctgtgggacctactacaatggcttcaggcggtggcgcaccaatggcagacaataacgaaggcgccgacggagtgggtaatgcctcaggaaattggcattgcgattccacatggctgggcgacagagtcatcaccaccagcacccgaacatgggccttgcccacctataacaaccacctctacaagcaaatctccagtgcttcaacgggggccagcaacgacaaccactacttcggctacagcaccccctgggggtattttgatttcaacagattccactgccacttttcaccacgtgactggcagcgactcatcaataacaattggggattccggcccaagagactcaacttcaaactcttcaacntccaagtcaaggaggnnacgacgaangatgncgtcacaaccatcgctaataaccttaccagcacggttcaagtcttctcggactcggagtaccagcttccgtacgtcctcggctctgcgcaccagggctgcctccctccgttcccggcggacgtgttcatgattccgcaatacggctacctgacgctcaacaatggcagccaggcagtgggacggtcatccttttactgcctggaatatttcccatcgcagatgctgagaacgggcaataactttacctncagctacacttttgaggacgttcctttccacagcagctacgctcacagccagagcctggaccggctgatgaatcctctcatcgaccagtacctgtattacctgaacagaactcagaatcagtccggaagtgcccaaaacaaggacttgctgtttagccgtgggtctccaactggcatgtctgttcagcccaaaaactggctacctggaccctgttatcggcagcagcgcgtttctaaaacaaaaacagacaacaacaacagcaactttacctggactggtgcttcaaaatataaccttaatgggcgtgaatctataatcaaccctggcactgctatggcctcacacaaagacgacgaagacaagttctttcccatgagcggtgtcatgatttttggaaaggagagcgccggagcttcaaacactgcattggacaatgtcatgatcacagacgaagagannncnaagccactaaccccgtggccactgaaagatttgggactgtggcagtcaatctccaagcagcacannnaccctgcgaccgnagatgtgcatgccatgggagccttacctggaatggtgtggcaagacagagacgtatacctgcagggtcctatttgggccaaaattcctcacacggatggacactttcacccgtctcctctcatgggcggctttggacttaagcacccgcctcctcagatcctcatcaaaaacacgcctgttcctgcgaatcctccggcagagttttcggctacaaagtttgcttcattcatcacccagtattccacaggacaagtgagcgtggagattgaatgggagctgcagaaagaaaacagcaaacgctggaatcccgaagtgcagtatacatctaactatgcaaaatctgccaacgttgatttcactgtggacaacaatggactttatactgagcctcgccccattggcacccgttacctcacccgtccccngtaa

SEQ ID NO: 559 - protein, 723 aa, Artificial Sequence
  Description of Artificial Sequence: Synthetic polypeptide
MAADGYLPDWLEDNLSEGIREWWDLKPGAPKPKVNQQKQDNARGLVLPGYKYLGPFNGLDKGEPVNAADAAALEHDKAYDQQLKAGDNPYLRYNHADAEFQERLQEDTSFGGNLGRAVFQAKKRVLEPFGLVEEGAKTAPGKKRPVEQSPQEPDSSSGIGKTGQQPAKKRLNFGQTGDSESVPDPQPLGEPPATPAAVGPTTMASGGGAPMADNNEGADGVGNASGNWHCDSTWLGDRVITTSTRTWALPTYNNHLYKQISSASTGASNDNHYFGYSTPWGYFDFNRFHCHFSPRDWQRLINNNWGFRPKRLNFKLFNQVKETTDVTTIANNLTSTVQVFSDSEYQLPYVLGSAHQGCLPPFPADVFMIPQYGYLTLNNGSQAVGRSSFYCLEYFPSQMLRTGNNFTSYTFEDVPFHSSYAHSQSLDRLMNPLIDQYLYYLNRTQNQSGSAQNKDLLFSRGSPTGMSVQPKNWLPGPCYRQQRVSKTKTDNNNSNFTWTGASKYNLNGRESIINPGTAMASHKDDEDKFFPMSGVMIFGKESAGASNTALDNVMITDEEATNPVATERFGTVAVNLQSSPATDVHAMGALPGMVWQDRDVYLQGPIWAKIPHTDGHFHPSPLMGGFGLKHPPPQILIKNTPVPANPPAEFSATKFASFITQYSTGQVSVEIEWELQKENSKRWNPEVQYTSNYAKSANVDFTVDNNGLYTEPRPIGTRYLTRP

SEQ ID NO: 560 - DNA, 2208 bp, Artificial Sequence
  Description of Artificial Sequence: Synthetic polynucleotide
atggctgccgatggttatcttccagattggctcgaggacactctctctgaaggaataagacagtggtggaagctcaaacctggcccaccaccaccaaagcccgcagagcggcataaggacgacagcaggggtcttgtgcttcctgggtacaagtacctcggacccttcaacggactcgacaagggagagccggtcaacgaggcagacgccgcggccctcgagcacgacaaagcctatgaccggcagctcgacagcggagacaacccgtacctcaagtacaaccacgccgacgcggagtttcaggagcgccttaaagaagatacgtcttttgggggcaacctcggacgagcagtcttccaggcgaaaaagagggttcttgaacctctgggcctggttgaggaacctgttaagacggctccgggaaaaaagaggccggtagagcactctcctgtggagccagactcctcctcgggaaccggaaaggcgggtcagcagcctgcaagaaaaagattgaattttggtcagactggagacgcagactcagtacctgacccccagcctctcggacagccaccagcagccccctctggtctgggaactaatacgatggctacaggcagtggcgcaccaatggcagacaataacgagggcgccgacggagtgggtaattcctcgggaaattggcattgcgattccacatggatgggcgacagagtcatcaccaccagcacccgaacctgggccctgcccacctacaacaaccacctctacaaacaaatttccagccaatcaggagcctcgaacgacaatcactactttggctacagcaccccttgggggtattttgacttcaacagattccactgccacttttcaccacgtgactggcaaagactcatcaacaacaactggggattccgacccaagagactcaagttcaagctctttaacattcaagtcaaagaggtcacgcagaatgacggtacgacgacgattgccaataaccttaccagcacggttcaggtgtttactgactcggagtaccagctcccgtacgtcctcggctcggcgcatcaaggatgcctcccgccgttcccagcagacgtcttcatggtgccacagtatggatacctcaccctgaacaacgggagtcaggcagtaggacgctcttcattttactgcctggagtactttccttctcagatgctgcgtaccggtaacaactttaccttcagctacacttttgaggacgttcctttccacagcagctacgctcacagccagagtctggaccgtctcatgaatcctctcatcgaccagtacctgtattacttgagcagaacagacgctccaagtggaaccaccacgcagtcaaggcttcagttttctcaggccggagcgagtgacattcgggaccagtctaggaactggcttcctggaccctgttaccgccagcagcgagtatcaaagacatctgcggataacaacaacagtgaatactcgtggactggagctaccaagtaccacctcaatggcagagactctctggtgaatccgggcccggccatggcaagccacaaggacgatgaagaaaagttttttcctcagagcggggttctcatctttgggaagcaaggctcagagaaaacaagtgtggacattgaaaaggtcatgattacagacgaagaggaaatcaggacaaccaatcccgtggctacggagcagtatggttctgtatctaccaacctccagagaggcaacagacaagcagctaccgcagatgtcaacacacaaggcgttcttccaggcatggtctggcaggacagagatgtgtaccttcaggggcccatctgggcaaagattccacacacggacggacattttcacccctctcccctcatgggtggattcggacttaaacaccctcctccacagattctcatcaagaacaccccggtacctgcgaatccttcgaccaccttcagtgcggcaaagtttgcttccttcatcacacagtactccacgggacaggtcagcgtggagatcgagtgggagctgcagaaggaaaacagcaaacgctggaatcccgaagttcagtacacttccaactacaacaagtctgttaatgtggactttactgtggacactaatggcgtgtattcagagcctcgccccattggcaccagatacctgactcgtaatctgtaa

SEQ ID NO: 561 - protein, 735 aa, Artificial Sequence
  Description of Artificial Sequence: Synthetic polypeptide
MAADGYLPDWLEDTLSEGIRQWWKLKPGPPPPKPAERHKDDSRGLVLPGYKYLGPFNGLDKGEPVNEADAAALEHDKAYDRQLDSGDNPYLKYNHADAEFQERLKEDTSFGGNLGRAVFQAKKRVLEPLGLVEEPVKTAPGKKRPVEHSPVEPDSSSGTGKAGQQPARKRLNFGQTGDADSVPDPQPLGQPPAAPSGLGTNTMATGSGAPMADNNEGADGVGNSSGNWHCDSTWMGDRVITTSTRTWALPTYNNHLYKQISSQSGASNDNHYFGYSTPWGYFDFNRFHCHFSPRDWQRLINNNWGFRPKRLKFKLFNIQVKEVTQNDGTTTIANNLTSTVQVFTDSEYQLPYVLGSAHQGCLPPFPADVFMVPQYGYLTLNNGSQAVGRSSFYCLEYFPSQMLRTGNNFTFSYTFEDVPFHSSYAHSQSLDRLMNPLIDQYLYYLSRTDAPSGTTTQSRLQFSQAGASDIRDQSRNWLPGPCYRQQRVSKTSADNNNSEYSWTGATKYHLNGRDSLVNPGPAMASHKDDEEKFFPQSGVLIFGKQGSEKTSVDIEKVMITDEEEIRTTNPVATEQYGSVSTNLQRGNRQAATADVNTQGVLPGMVWQDRDVYLQGPIWAKIPHTDGHFHPSPLMGGFGLKHPPPQILIKNTPVPANPSTTFSAAKFASFITQYSTGQVSVEIEWELQKENSKRWNPEVQYTSNYNKSVNVDFTVDTNGVYSEPRPIGTRYLTRNL

SEQ ID NO: 562 - DNA, 2208 bp, Artificial Sequence
  Description of Artificial Sequence: Synthetic polynucleotide
atggctgccgatggttatcttccagattggctcgaggacactctctctgaaggaataagacagtggtggaagctcaaacctggcccaccaccaccaaagcccgcagagcggcataaggacgacagcaggggtcttgtgcttcctgggtacaagtacctcggacccttcaacggactcgacaagggagagccggtcaacgaggcagacgccgcggccctcgagcacgacaaagcctatgaccggcagctcgacagcggagacaacccgtacctcaagtacaaccacgccgacgcggagtttcaggagcgccttaaagaagatacgtcttttgggggcaacctcggacgagcagtcttccaggcgaaaaagagggttcttgaacctctgggcctggttgaggaacctgttaagacggctccgggaaaaaagaggccggtagagcactctcctgtggagccagactcctcctcgggaaccggaaaggcgggccagcagcctgcaagaaaaagattgaattttggtcagactggagacgcaaactcagtacctgacccccagcctctcggacagccaccagcagccccctctggtctgggaactaatacgatggctacaggcagtggcgcaccaatggcagacaataacgagggcgccgacggagtgggtaattcctcgggaaattggcattgcgattccacatggatgggcgacagagtcatcaccaccagcacccgaacctgggccctgcccacctacaacaaccacctctacaaacaaatttccagccaatcaggagcctcgaacgacaatcactactttggctacagcaccccttgggggtattttgacttcaacagattccactgccacttttcaccacgtgactggcaaagactcatcaacaacaactggggattccgacccaagagactcaagttcaagctctttaacattcaagtcaaagaggtcacgcagaatgacggtacgacgacgattgccaataaccttaccagcacggttcaggtgtttactgactcggagtaccagctcccgtacgtcctcggctcggcgcatcaaggatgcctcccgccgttcccagcagacgtcttcatggtgccacagtatggatacctcaccctgaacaacgggagtcgggcagtaggacgctcttcattttactgcctggagtactttccttctcagatgctgcgtaccggtaacaactttaccttcagctacacttttgaggacgttcctttccacagcagctacgctcacagccagagtctggaccgtctcatgaatcctctcatcgaccagtacctgtattacttgagcagaacagacactccaagtggaaccaccacgcagtcaaggcttcagttttctcaggccggagcgagtgacattcgggaccagtctaggaactggcttcctggaccctgttaccgccagcagcgagtatcaaagacatctgcggataacaacaacagtgaatactcgtggactggagctaccaagtaccacctcaatggcagagactctctggtgaatccgggcccggccatggcaagccacaaggacgatgaagaaaagttttttcctcagagcggggttctcatctttgggaagcaaggctcagagaaaacaagtgtggacattgaaaaggtcatgattacagacgaagaggaaatcaggacgaccaatcccgtggctacggagcagtatggttctgtatctaccaacctccagagaggcaacagacaagcagctaccgcagatgtcaacacacaaggcgttcttccaggcatggtctggcaggacagagatgtgtaccttcaggggcccatctgggcaaagattccacacacggacggacattttcacccctctcccctcatgggtggattcggacttaaacaccctcctccacagattctcatcaagaacaccccggtacctgcgaatccttcgaccaccttcagtgcggcaaagtttgcttccttcatcacacagtactccacgggacaggtcagcgtggagatcgagtgggagctgcagaaggaaaacagcaaacgctggaatcccgaagttcagtacacttccaactacaacaagtctgttaatgtggactttactgtggacactaatggcgtgtatacagagcctcgccccattggcaccagatacctgactcgtaatctgtaa

SEQ ID NO: 563 - protein, 735 aa, Artificial Sequence
  Description of Artificial Sequence: Synthetic polypeptide
MAADGYLPDWLEDTLSEGIRQWWKLKPGPPPPKPAERHKDDSRGLVLPGYKYLGPFNGLDKGEPVNEADAAALEHDKAYDRQLDSGDNPYLKYNHADAEFQERLKEDTSFGGNLGRAVFQAKKRVLEPLGLVEEPVKTAPGKKRPVEHSPVEPDSSSGTGKAGQQPARKRLNFGQTGDANSVPDPQPLGQPPAAPSGLGTNTMATGSGAPMADNNEGADGVGNSSGNWHCDSTWMGDRVITTSTRTWALPTYNNHLYKQISSQSGASNDNHYFGYSTPWGYFDFNRFHCHFSPRDWQRLINNNWGFRPKRLKFKLFNIQVKEVTQNDGTTTIANNLTSTVQVFTDSEYQLPYVLGSAHQGCLPPFPADVFMVPQYGYLTLNNGSRAVGRSSFYCLEYFPSQMLRTGNNFTFSYTFEDVPFHSSYAHSQSLDRLMNPLIDQYLYYLSRTDTPSGTTTQSRLQFSQAGASDIRDQSRNWLPGPCYRQQRVSKTSADNNNSEYSWTGATKYHLNGRDSLVNPGPAMASHKDDEEKFFPQSGVLIFGKQGSEKTSVDIEKVMITDEEEIRTTNPVATEQYGSVSTNLQRGNRQAATADVNTQGVLPGMVWQDRDVYLQGPIWAKIPHTDGHFHPSPLMGGFGLKHPPPQILIKNTPVPANPSTTFSAAKFASFITQYSTGQVSVEIEWELQKENSKRWNPEVQYTSNYNKSVNVDFTVDTNGVYTEPRPIGTRYLTRNL

SEQ ID NO: 564 - DNA, 2211 bp, Artificial Sequence
  Description of Artificial Sequence: Synthetic polynucleotide
atggctgccgatggttatcttccagattggctcgaggacactctctctgaaggaataagacagtggtggaagctcaaacctggcccaccaccaccaaagcccgcagagcggcataaggacgacagcaggggtcttgtgcttcctgggtacaagtacctcggacccttcaacggactcgacaagggagagccggtcaacgaggcagacgccgcggccctcgagcacgacaaggcctacgaccagcagctcaaagcgggtgacaatccgtacctgcggtataaccacgccgacgccgagtttcaggagcgtctgcaagaagatacgtcttttgggggcaacctcgggcgagcagtcttccaggccaagaagcgggttctcgaacctctcggtctggttgaggaaggcgctaagacggctcctggaaagaaacgtccggtagagcagtcgccacaagagccagactcctcctcgggcatcggcaagacaggccagcagcccgctaaaaagagactcaattttggtcagactggcgactcagagtcagtccccgacccacaacctctcggagaacctccagcaacccccgctgctgtgggacctactacaatggcttcaggcggtggcgcaccaatggcagacaataacgaaggcgccgacggagtgggtaatgcctcaggaaattggcattgcgattccacatggctgggcgacagagtcatcaccaccagcacccgaacatgggccttgcccacctataacaaccacctctacaagcaaatctccagtgcttcgacgggggccagcaacgacaaccactacttcggctacagcaccccctgggggtattttgactttaacagattccactgccacttttcaccacgtgactggcagcgactcatcaacaataactggggattccggcccaagagactcagcttcaagctcttcaacatccaggtcaaggaggtcacgacgaatgatggcgtcacaaccatcgctaataaccttaccagcacggttcaagtcttctcggactcggagtaccagcttccgtacgtcctcggctctgcgcaccagggctgcctccctccgttcccggcggacgtgttcatgattccgcaatacggctacctgacgctcaacaatggcagccaagccgtgggacgttcatccttttactgcctggaatatttcccttctcagatgctgagaacgggcaacaactttaccttcagctacacctttgaggaagtgcctttccacagcagctacgcgcacagccagagcctggaccggctgatgaatcctctcatcgatcaatacctgtattacctgaacagaactcaaaatcagtccggaagtgcccaaaacaaggacttgctgtttagccgtgggtctccagctggcatgtctgttcagcccaaaaactggctacctggaccctgttatcggcagcagcgcgtttctaaaacaaaaacagacaacaacaacagcaattttacctggactggtgcttcaaaatataacctcaatgggcgtgaatccatcatcaaccctggcactgctatggcctcacacaaagacgacgaagacaagttctttcccatgagcggtgtcatgatttttggaaaagagagcgccggagcttcaaacactgcattggacaatgtcatgattacggacgaagaggaaattaaagccactaaccctgtggccaccgaaagatttgggaccgtggcagtcaatttccagagcagcagcacagaccctgcgaccggagatgtgcatgctatgggagcattacctggcatggtgtggcaagatagagacgtgtacctgcagggtcccatttgggccaaaattcctcacacagatggacactttcacccgtctcctcttatgggcggctttggactcaagaacccgcctcctcagatcctcatcaaaaacacgcctgttcctgcgaatcctccggcggagttttcagctacaaagtttgcttcattcatcactcaatactccacaggacaagtgagcgtggaaattgaatgggagctgcagaaagaaaacagcaaacgctggaatcccgaagtgcagtatacatctaactatgcaaaatctgccaacgttgatttcactgtggacaacaatggactttatactgagcctcgccccattggcacccgttacctcacccgtcccctgtaa

SEQ ID NO: 565 - protein, 736 aa, Artificial Sequence
  Description of Artificial Sequence: Synthetic polypeptide
MAADGYLPDWLEDTLSEGIRQWWKLKPGPPPPKPAERHKDDSRGLVLPGYKYLGPFNGLDKGEPVNEADAAALEHDKAYDQQLKAGDNPYLRYNHADAEFQERLQEDTSFGGNLGRAVFQAKKRVLEPLGLVEEGAKTAPGKKRPVEQSPQEPDSSSGIGKTGQQPAKKRLNFGQTGDSESVPDPQPLGEPPATPAAVGPTTMASGGGAPMADNNEGADGVGNASGNWHCDSTWLGDRVITTSTRTWALPTYNNHLYKQISSASTGASNDNHYFGYSTPWGYFDFNRFHCHFSPRDWQRLINNNWGFRPKRLSFKLFNIQVKEVTTNDGVTTIANNLTSTVQVFSDSEYQLPYVLGSAHQGCLPPFPADVFMIPQYGYLTLNNGSQAVGRSSFYCLEYFPSQMLRTGNNFTFSYTFEEVPFHSSYAHSQSLDRLMNPLIDQYLYYLNRTQNQSGSAQNKDLLFSRGSPAGMSVQPKNWLPGPCYRQQRVSKTKTDNNNSNFTWTGASKYNLNGRESIINPGTAMASHKDDEDKFFPMSGVMIFGKESAGASNTALDNVMITDEEEIKATNPVATERFGTVAVNFQSSSTDPATGDVHAMGALPGMVWQDRDVYLQGPIWAKIPHTDGHFHPSPLMGGFGLKNPPPQILIKNTPVPANPPAEFSATKFASFITQYSTGQVSVEIEWELQKENSKRWNPEVQYTSNYAKSANVDFTVDNNGLYTEPRPIGTRYLTRPL

SEQ ID NO: 566 - protein, 735 aa, Artificial Sequence
  Description of Artificial Sequence: Synthetic polypeptide
MAADGYLPDWLEDTLSEGIRQWWKLKPGPPPPKPAERHKDDSRGLVLPGYKYLGPFNGLDKGEPVNEADAAALEHDKAYDRQLDSGDNPYLKYNHADAEFQERLKEDTSFGGNLGRAVFQAKKRVLEPLGLVEEPVKTAPGKKRPVEHSPVEPDSSSGTGKAGQQPARKRLNFGQTGDADSVPDPQPLGQPPAAPSGLGTNTMATGSGAPMADNNEGADGVGNSSGNWHCDSTWMGDRVITTSTRTWALPTYNNHLYKQISSQSGASNDNHYFGYSTPWGYFDFNRFHCHFSPRDWQRLINNNWGFRPKRLKFKLFNIQVKEVTQNDGTTTIANNLTSTVQVFTDSEYQLPYVLGSAHQGCLPPFPADVFMVPQYGYLTLNNGSQAVGRSSFYCLEYFPSQMLRTGNNFTFSYTFEDVPFHSSYAHSQSLDRLMNPLIDQYLYYLSRTDTPSGTTTQSRLQFSQAGASDIRNQSRNWLPGPCYRQQRVSKTSADNNNSEYSWTGATKYHLNGRDSLVNPGPAMASHKDDEEKFFPQSGVLIFGKQGSEKTSVDIEKVMITDEEEIRTTNPVATEQYGSVSTNLQRGNRQAATADVNTQGVLPGMVWQDRDVYLQGPIWAKIPHTDGHFHPSPLMGGFGLKHPPPQILIKNTPVPANPSTTFSAAKFASFITQYSTGQVSVEIEWELQKENSKRWNPEVQYTSNYNKSVNVDFTVDTNGVYSEPRPIGTRYLTRNQ

SEQ ID NO: 567 - DNA, 2208 bp, Artificial Sequence
  Description of Artificial Sequence: Synthetic polynucleotide
atggctgccgatggttatcttccagattggctcgaggacactctctctgaaggaataagacagtggtggaagctcaaacctggcccaccaccaccaaagcccgcagagcggcataaggacgacagcaggggtcttgtgcttcctgggtacaagtacctcggacccttcaacggactcgacaagggagagccggtcaacgaggcagacgccgcggccctcgagcacgacaaagcctatgaccggcagctcgacagcggagacaacccgtacctcaagtacaaccacgccgacgcggagtttcaggaacgccttaaagaagatacgtcttttgggggcaacctcggacgagcagtcttccaggcgaaaaagagggttcttgaacctctgggcctggttgaggaacctgttaagacggctccgggaaaaaagaggccggtagagcactctcctgtggagccagactcctcctcgggaaccggaaaggcgggccagcagcctgcaagaaaaagattgaattttggtcagactggagacgcagactcagtacctgacccccagcctctcggacagccaccagcagccccctctggtctgggaactaatacgatggctacaggcagtggcgcaccaatggcagacaataacgagggcgccgacggagtgggtaattcctcgggaaattggcattgcgattccacatggatgggcgacagagtcatcaccaccagcacccgaacctgggccctgcccacctacaacaaccacctctacaaacaaatttccagccaatcaggagcctcgaacgacaatcactactttggctacagcaccccttgggggtattttgacttcaacagattccactgccacttttcaccacgtgactggcaaagactcatcaacaacaactggggattccgacccaagagactcaagttcaagctctttaacattcaagtcaaagaggtcacgcagaatgacggtacgacgacgattgccaataaccttaccagcacggttcaggtgtttactgactcggagtaccagctcccgtacgtcctcggctcggcgcatcaaggatgcctcccgccgttcccagcagacgtcttcatggtgccacagtatggatacctcaccctgaacaacgggagtcaggcagtaggacgctcttcattttactgcctggagtactttccttctcagatgctgcgtaccggtaacaactttaccttcagctacacttttgaggacgttcctttccacagcagctacgctcacagccagagtctggaccgtctcatgaatcctctcatcgaccagtacctgtattacttgagcagaacagacactccaagtggaaccaccacgcagtcaaggcttcagttttctcaggccggagcgagtgacattcggaaccagtctaggaactggcttcctggaccctgttaccgccagcagcgagtatcaaagacatctgcggataacaacaacagtgaatactcgtggactggagctaccaagtaccacctcaatggcagagactctctggtgaatccgggcccggccatggcaagccacaaggacgatgaagaaaagttttttcctcagagcggggttctcatctttgggaagcaaggctcagagaaaacaagtgtggacattgaaaaggtcatgattacagacgaagaggaaatcaggacaaccaatcccgtggctacggagcagtatggttctgtatctaccaacctccagagaggcaacagacaagcagctaccgcagatgtcaacacacaaggcgttcttccaggcatggtctggcaggacagagatgtgtaccttcaggggcccatctgggcaaagattccacacacggacggacattttcacccctctcccctcatgggtggattcggacttaaacaccctcctccacagattctcatcaagaacaccccggtacctgcgaatccttcgaccaccttcagtgcggcaaagtttgcttccttcatcacacagtactccacgggacaggtcagcgtggagatcgagtgggagctgcagaaggaaaacagcaaacgctggaatcccgaagttcagtacacttccaactacaacaagtctgttaatgtggactttactgtggacactaatggcgtgtattcagagcctcgccccattggcaccagatacctgactcgtaatcagtaa

SEQ ID NO: 568 - DNA, 2208 bp, Artificial Sequence
  Description of Artificial Sequence: Synthetic polynucleotide
atggctgccgatggttatcttccagattggctcgaggacactctctctgaaggaataagacagtggtggaagctcaaacctggcccaccaccaccaaagcccgcagagcggcataaggacgacagcaggggtcttgtgcttcctgggtacaagtacctcggacccttcaacggactcgacaagggagagccggtcaacgaggcagacgccgcggccctcgagcacgacaaagcctatgaccggcagctcgacagcggagacaacccgtacctcaagtacaaccacgccgacgcggagtttcaggagcgccttaaagaagatacgtcttttgggggcaacctcggacgagcagtcttccaggcgaaaaagagggttcttgaacctctgggcctggttgaggaacctgttaagacggctccgggaaaaaagaggccggtagagcactctcctgtggagccagactcctcctcgggaaccggaaaggcgggccagcagcctgcaagaaaaagattgaattttggtcagactggagacgcagactcagtacctgatccccagcctctcggacagccaccagcagccccctctggtctgggaactaatacgatggctacaggcagtggcgcaccaatggcagacaataacgagggcgccgacggagtgggtaattcctcgggaaattggcattgcgattccacatggatgggcgacagagtcatcaccaccagcacccgaacctgggccctgcccacctacaacaaccacctctacaaacaaatttccagccaatcaggagcctcgaacgacaatcactactttggctacagcaccccttgggggtattttgacttcaacagattccactgccacttttcaccacgtgactggcaaagactcatcaacaacaactggggattccgacccaagagactcaagttcaagctctttaacattcaagtcaaagaggtcacgcagaatgacggtacgacgacgattgccaataaccttaccagcacggttcaggtgtttactgactcggagtaccagctcccgtatgtcctcggctcggcgcatcaaggatgcctcccgccgttcccagcagacgtcttcatggtgccacagtatggatacctcaccctgaacaacgggagtcaggcagtaggacgctcttcattttactgcctggagtactttccttctcagatgctgcgtaccggtaacaactttaccttcagctacacttttgaggacgttcctttccacagcagctacgctcacagccagagtctggaccgtctcatgaatcctctcatcgaccagtacctgtattacttgagcagaacagacactccaagtggaaccaccacgcagtcaaggcttcagttttctcaggccggagcgagtgacattcgggaccagtctaggaactggcttcctggaccctgttaccgccagcagcgagtatcaaagacatctgcggataacaacaacagtgaatactcgtggactggagctaccaagtaccacctcaatggcagagactctctggtgaatccgggcccggccatggcaagccacaaggacgatgaagaaaagttttttcctcagagcggggttctcatctttgggaagcaaggctcagagaaaacaagtgtggacattgaaaaggtcatgattacagacgaagaggaaatcaggacaaccaatcccgtggctacggagcagtatggttctgtatctaccaacctccagagaggcaacagacaagcagctaccgcagatgtcaacacacaaggcgttcttccaggcatggtctggcaggacagagatgtgtaccttcaggggcccatctgggcaaagattccacacacggacggacattttcacccctctcccctcatgggtggattcggacttaaacaccctcctccacagattctcatcaagaacaccccggtacctgcgaatccttcgaccaccttcagtgcggcaaagtttgcttccttcatcacacagtactccacgggacaggtcagcgtggagatcgagtgggagctgcagaaggaaaacagcaaacgctggaatcccgaagttcagtacacttccaactacaacaagtctgttaatgtggactttactgtggacactaatggcgtgtattcagagcctcgccccattggcaccagatacctgactcgtaatctgtaa

SEQ ID NO: 569 - protein, 735 aa, Artificial Sequence
  Description of Artificial Sequence: Synthetic polypeptide
MAADGYLPDWLEDTLSEGIRQWWKLKPGPPPPKPAERHKDDSRGLVLPGYKYLGPFNGLDKGEPVNEADAAALEHDKAYDRQLDSGDNPYLKYNHADAEFQERLKEDTSFGGNLGRAVFQAKKRVLEPLGLVEEPVKTAPGKKRPVEHSPVEPDSSSGTGKAGQQPARKRLNFGQTGDADSVPDPQPLGQPPAAPSGLGTNTMATGSGAPMADNNEGADGVGNSSGNWHCDSTWMGDRVITTSTRTWALPTYNNHLYKQISSQSGASNDNHYFGYSTPWGYFDFNRFHCHFSPRDWQRLINNNWGFRPKRLKFKLFNIQVKEVTQNDGTTTIANNLTSTVQVFTDSEYQLPYVLGSAHQGCLPPFPADVFMVPQYGYLTLNNGSQAVGRSSFYCLEYFPSQMLRTGNNFTFSYTFEDVPFHSSYAHSQSLDRLMNPLIDQYLYYLSRTDTPSGTTTQSRLQFSQAGASDIRDQSRNWLPGPCYRQQRVSKTSADNNNSEYSWTGATKYHLNGRDSLVNPGPAMASHKDDEEKFFPQSGVLIFGKQGSEKTSVDIEKVMITDEEEIRTTNPVATEQYGSVSTNLQRGNRQAATADVNTQGVLPGMVWQDRDVYLQGPIWAKIPHTDGHFHPSPLMGGFGLKHPPPQILIKNTPVPANPSTTFSAAKFASFITQYSTGQVSVEIEWELQKENSKRWNPEVQYTSNYNKSVNVDFTVDTNGVYSEPRPIGTRYLTRNL

SEQ ID NO: 570 - DNA, 2601 bp, Artificial Sequence
  Description of Artificial Sequence: Synthetic polynucleotide
ccatcgacgtcagacgcggaagcttcgatcaactacgcggacaggtaccaaaacaaatgttctcgtcacgtgggcatgaatctgatgctgtttccctgcagacaatgcgagagactgaatcagaattcaaatatctgcttcactcacggtgtcaaagactgtttagagtgctttcccgtgtcagaatctcaacccgtttctgtcgtcaaaaaggcgtatcagaaactgtgctacattcatcacatcatgggaaaggtgccagacgcttgcactgcttgcgacctggtcaatgtggacttggatgactgtgtttctgaacaataaatgacttaaaccaggtatgactgccgatggttatcttccagattggctcgaggacaaccttagtgaaggaattcgcgagtggtgggctttgaaacctggagcccctcaacccaaggcaaatcaacaacatcaagacaacgctcgaggtcttgtgcttccgggttacaaataccttggacccggcaacggactcgacaagggggagccggtcaacgcagcagacgcggcggccctcgagcacgacaaggcctacgaccagcagctcaaggccggagacaacccgtacctcaagtacaaccacgccgacgccgagttccaggagcggctcaaagaagatacgtcttttgggggcaacctcgggcgagcagtcttccaggccaaaaagaggcttcttgaacctcttggtctggttgaggaagcggctaagacggctcctggaaagaagaggcctgtagagcagtctcctcaggaaccggactcctccgcgggtattggcaaatcgggtgcacagcccgctaaaaagagactcaatttcggtcagactggcgacacagagtcagtcccagaccctcaaccaatcggagaacctcccgcagccccctcaggtgtgggatctcttacaatggcttcaggtggtggcgcaccagtggcagacaataacgaaggtgccgatggagtgggtagttcctcgggaaattggcattgcgattcccaatggctgggggacagagtcatcaccaccagcacccgaacctgggccctgcccacctacaacaatcacctctacaagcaaatctccaacagcacatctggaggatcttcaaatgacaacgcctacttcggctacagcaccccctgggggtattttgacttcaacagattccactgccacttctcaccacgtgactggcagcgactcatcaacaacaactggggattccggcctaagcaactcaacttcaagctcttcaacattcaggtcaaagaggttacggacaacaatggagtcaagaccatcgccaataaccttaccagcacggtccaggtcttcacggactcagactatcagctcccgtacgtgctcgggtcggctcacgagggctgcctcccgccgttcccagcggacgttttcatgattcctcagtacgggtatctgacgcttaatgatggaagccaggccgtgggtcgttcgtccttttactgcctggaatatttcccgtcgcaaatgctaagaacgggtaacaacttccagttcagctacgagtttgagaacgtacctttccatagcagctacgctcacagccaaagcctggaccgactaatgaatccactcatcgaccaatacttgtactatctctcaaagactattaacggttctggacagaatcaacaaacgctaaaattcagtgtggccggacccagcaacatggctgtccagggaagaaactacatacctggacccagctaccgacaacaacgtgtctcaaccactgtgactcaaaacaacaacagcgaatttgcttggcctggagcttcttcttgggctctcaatggacgtaatagcttgatgaatcctggacctgctatggccagccacaaagaaggagaggaccgtttctttcctttgtctggatctttaatttttggcaaacaaggaactggaagagacaacgtggatgcggacaaagtcatgataaccaacgaagaagaaattaaaactactaacccggtagcaacggagtcctatggacaagtggccacaaaccaccagagtgcccaagcacaggcgcagaccggctgggttcaaaaccaaggaatacttccgggtatggtttggcaggacagagatgtgtacctgcaaggacccatttgggccaaaattcctcacacggacggcaactttcacccttctccgctgatgggagggtttggaatgaagcacccgcctcctcagatcctcatcaaaaacacacctgtacctgcggatcctccaacggccttcaacaaggacaagctgaactctttcatcacccagtattctactggccaagtcagcgtggagatcgagtgggagctgcagaaggaaaacagcaagcgctggaacccggagatccagtacacttccaactattacaagtctaataatgttgaatttgctgttaatactgaaggtgtatatagtgaaccccgccccattggcaccagatacctgactcgtaatctgtaattgcttgttaatcaataaaccgtttaattcgtttcagttgaactgcggcc

SEQ ID NO: 571 - DNA, 2601 bp, Artificial Sequence
  Description of Artificial Sequence: Synthetic polynucleotide
ccatcgacgtcagacgcggaagcttcgatcaactacgcggacaggtaccaaaacaaatgttctcgtcacgtgggcatgaatctgatgctgtttccctgcagacaatgcgagagactgaatcagaattcaaatatctgcttcactcacggtgtcaaagactgtttagagtgctttcccgtgtcagaatctcaacccgtttctgtcgtcaaaaaggcgtatcagaaactgtgctacattcatcacatcatgggaaaggtgccagacgcttgcactgcttgcgacctggtcaatgtggacttggatgactgtgtttctgaacaataaatgacttaaaccaggtatggctgccgatggttatcttccagattggctcgaggacaaccttagtgaaggaattcgcgagtggtgggctttgaaacctggagcccctcaacccaaggcaaatcaacaacatcaagacaacgctcgaggtcttgtgcttccgggttacaaataccttggacccggcaacggactcgacaagggggagccggtcaacgcagcagacgcggcggccctcgagcacgacaaggcctacgaccagcagctcaaggccggagacaacccgtacctcaagtacaaccacgccgacgccgagttccaggagcggctcaaagaagatacgtcttttgggggcaacctcgggcgagcagtcttccaggccaaaaagaggcttcttgaacctcttggtctggttgaggaagcggctaagacggctcctggaaagaagaggcctgtagagcagtctcctcaggaaccggactcctccgcgggtattggcaaatcgggtgcacagcccgctaaaaagagactcaatttcggtcagactggcgacacagagtcagtcccagaccctcaaccaatcggagaacctcccgcagccccctcaggtgtgggatctcttacaatggcttcaggtggtggcgcaccagtggcagacaataacgaaggtgccgatggagtgggtagttcctcgggaaattggcattgcgattcccaatggctgggggacagagtcatcaccaccagcacccgaacctgggccctgcccacctacaacaatcacctctacaagcaaatctccaacagcacatctggaggatcttcaaatgacaacgcctacttcggctacagcaccccctgggggtattttgacttcaacagattccactgccacttctcaccacgtgactggcagcgactcatcaacaacaactggggattccggcctaagcgactcaacttcaagctcttcaacattcaggtcaaagaggttacggacaacaatggagtcaagaccatcgccaataaccttaccagcacggtccaggtcttcacggactcagactatcagctcccgtacgtgctcgggtcggctcacgagggctgcctcccgccgttcccagcggacgttttcatgattcctcagtacgggtatctgacgcttaatgatggaagccaggccgtgggtcgttcgtccttttactgcctggaatatttcccgtcgcaaatgctaagaacgggtaacaacttccagttcagctacgagtttgagaacgtacctttccatagcagctacgctcacagccaaagcctggaccgactaatgaatccactcatcgaccaatacttgtactatctctcaaagactattaacggttctggacagaatcaacaaacgctaaaattcagtgtggccggacccagcaacatggctgtccagggaagaaactacatacctggacccagctaccgacaacaacgtgtctcaaccactgtgactcaaaacaacaacagcgaatttgcttggcctggggcttcttcttgggctctcaatggacgtaatagcttgatgaatcctggacctgctatggccagccacaaagaaggagaggaccgtttctttcctttgtctggatctttaatttttggcaaacaaggaactggaagagacaacgtggatgcggacaaagtcatgataaccaacgaagaagaaattaaaactactaacccggtagcaacggagtcctatggacaagtggccacaaaccaccagagtgcccaagcacaggcgcagaccggctgggttcaaaaccaaggaatacttccgggtatggtttggcaggacagagatgtgtacctgcaaggacccatttgggccaaaattcctcacacgggcggcaactttcacccttctccgctgatgggagggtttggaatgaagcacccgcctcctcagatcctcatcaaaaacacacctgtacctgcggatcctccaacggccttcaacaaggacaagctgaactctttcatcacccagtattctactggccaagtcagcgtggagatcgagtgggagctgcagaaggaaaacagcaagcgctggaacccggagatccagtacacttccaactattacaagtctaataatgttgaatttgctgttaatactggaggtgtatatagtgaaccccgccccattggcaccagatacctgactcgtaatctgtaattgcttgttaatcaataaaccgtttaattcgtttcagttgaactgcggcc

SEQ ID NO: 572 - DNA, 2601 bp, Artificial Sequence
  Description of Artificial Sequence: Synthetic polynucleotide
ccatcgacgtcagacgcggaagcttcgatcaactacgcggacaggtaccaaaacaaatgttctcgtcacgtgggcatgaatctgatgctgtttccctgcagacaatgcgagagactgaatcagaattcaaatatctgcttcactcacggtgtcaaagactgtttagagtgctttcccgtgtcagaatctcaacccgtttctgtcgtcaaaaaggcgtatcagaaactgtgctacattcatcacatcatgggaaaggtgccagacgcttgcactgcttgcgacctggtcaatgtggactcggatgactgtgtttctgaacaataaatgacttaaaccaggtatggctgccgatggttatcttccagattggctcgaggacaaccttagtgaaggaattcgcgagtggtgggctttgaaacctggagcccctcaacccaaggcaaatcaacaacatcaagacaacgctcgaggtcttgtgcttccgggttacaaataccttggacccggcaacggactcgacaagggggagccggtcaacgcagcagacgcggcggccctcgagcacgacaaggcctacgaccagcagctcaaggccggagacaacccgtacctcaagtacaaccacgccgacgccgagttccaggagcggctcaaagaagatacgtcttttgggggcaacctcgggcgagcagtcttccaggccaaaaagaggcttcttgaacctcttggtctggttgaggaagcggctaagacggctcctggaaagaagaggcctgtagagcagtctcctcaggaaccggactcctccgcgggtattgacaaatcgggtgcacagcccgctaaaaagagactcaatttcggtcagactggcgacacagagtcagtcccagaccctcaaccaatcggagaacctcccgcagccccctcaggtgtgggatctcttacaatggcttcaggtggtggcgcaccagtggcagacaataacgaaggtgccgatggagtgggtagttcctcgggaaattggcattgcgattcccaatggctgggggacagagtcatcaccaccagcacccgaacctgggccctgcccacctacaacaatcacctctacaagcaaatctccaacagcacatctggaggatcttcaaatgacaacgcctacttcggctacagcaccccctgggggtattttgacttcaacagattccactgccacttctcaccacgtgactggcagcgactcatcaacaacaactggggattccggcctaagcgactcaacttcaagctcttcaacattcaggtcaaagaggttacggacaacaatggagtcaagaccatcgccaataaccttaccagcacggtccaggtcttcacggactcggactatcagctcccgtacgtgctcgggtcggctcacgagggctgcctcccgccgttcccagcggacgttttcatgattcctcagtacgggtatctgacgcttaatgatggaagccaggccgtgggtcgttcgtccttttactgcctggaatatttcccgtcgcaaatgctaagaacgggtaacaacttccagttcagctacgagtttgagaacgtacctttccatagcagctacgctcacagccaaagcctggaccgactaatgaatccactcatcgaccaatacttgtactatctctcaaagactattaacggttctggacagaatcaacaaacgctaaaattcagtgtggccggacccagcaacatggctgtccagggaagaaactacatacctggacccagctaccgacaacaacgtgtctcaaccactgtgactcaaaacaacaacagcgaatttgcttggcctggagcttcttcttgggctctcaatggacgtaatagcttgatgaatcctggacctgctatggccagccacaaagaaggagaggaccgtttctttcctttgtctggatctttaatttttggcaaacaaggaactggaagagacaacgtggatgcggacaaagtcatgataaccaacgaagaagaaattaaaactactaacccggtagcaacggagtcctatggacaagtggccacaaaccaccagagtgcccaagcacaggcgcagaccggctgggttcaaaaccaaggaatacttccgggtatggtttggcaggacagagatgtgtacctgcaaggacccatttgggccaaaattcctcacacggacggcaactttcacccttctccgctgatgggagggtttggaatgaagcacccgcctcctcagatcctcatcaaaaacacacctgtacctgcggatcctccaacggccttcaacaaggacaagctgaactctttcatcacccagtattctactggccaagtcagcgtggagatcgagtgggagctgcagaaggaaaacagcaagcgctggaacccggagatccagtacacttccaactattacaagtctaataatgttgaatttgctgttaatactgaaggtgtatatagtgaaccccgccccattggcaccagatacctgactcgtaatctgtaattgcttgttaatcaataaaccgtttaattcgtttcagttgaactgcggcc

SEQ ID NO: 573 - DNA, 2601 bp, Artificial Sequence
  Description of Artificial Sequence: Synthetic polynucleotide
ccatcgacgtcagacgcggaagcttcgatcaactacgcggacaggtaccaaaacaaatgttctcgtcacgtgggcatgaatctgatgctgtttccctgcagacaatgcgagagactgaatcagaattcaaatatctgcttcactcacggtgtcaaagactgtttagagtgctttcccgtgtcagaatctcaacccgtttctgtcgtcaaaaaggcgtatcagaaactgtgctacattcatcacatcatgggaaaggtgccagacgcttgcactgcttgcgacctggtcaatgtggacttggatgactgtgtttctgaacaataaatgacttaaaccaggtatggctgccgatggttatcttccagattggctcgaggacaaccttagtgaaggaattcgcgagtggtgggctttgaaacctggagcccctcaacccaaggcaaatcaacaacatcaagacaacgctcgaggtcttgtgcttccgggttacaaataccttggacccggcaacggactcgacaagggggagccggtcaacgcagcagacgcggcggccctcgagcacgacaaggcctacgaccagcagctcaaggccggagacaacccgtacctcaagtacaaccacgccgacgccgagttccaggagcggctcaaagaagatacgtcttttgggggcaacctcgggcgagcagtcctccaggccaaaaagaggcttcttgaacctcttggtctggttgaggaagcggctaagacggctcctggaaagaagaggcctgtagagcagtctcctcaggaaccggactcctccgcgggtattggcaaatcgggtgcacagcccgctaaaaagagactcaatttcggtcagactggcgacacagagtcagtcccagaccctcaaccaatcggagaacctcccgcagccccctcaggtgtgggatctcttacaatggcttcaggtggtggcgcaccagtggcagacaataacgaaggtgccgatggagtgggtagttcctcgggaaattggcattgcgattcccaatggctgggggacagagtcatcaccaccagcacccgaacctgggccctgcccacctacaacaatcacctctacaagcaaatctccaacagcacatctggaggatcttcaaatgacaacgcctacttcggctacagcaccccctgggggtattttgacttcaacagattccactgccacttctcaccacgtgactggcagcgactcatcaacaacaactggggattccggcctaagcgactcaacttcaagctcttcaacattcaggtcaaagaggttacggacaacaatggagtcaagaccatcgccaataaccttaccagcacggtccaggtcttcacggactcagactatcagctcccgtacgtgctcgggtcggctcacgagggctgcctcccgccgttcccagcggacgttttcatgattcctcagtacgggtatctgacgcttaatgatggaagccaggccgtgggtcgttcgtccttttactgcctggaatatttcccgtcgcaaatgctaagaacgggtaacaacttccagttcagctacgagtttgagaacgtacctttccatagcagctacgctcacagccaaagcctggaccgactaatgaatccactcatcgaccaatacttgtactatctctcaaagactattaacggttctggacagaatcaacaaacgctaaaattcagtgtggccggatccagcaacatggctgtccagggaagaaactacatacctggacccagctaccgacaacaacgtgtctcaaccactgtgactcaaaacaacaacagcgaatttgcttggcctggagcttcttcttgggctctcaatggacgtaatagcttgatgaatcctggacctgctatggccagccacaaagaaggagaggaccgtttctttcctttgtctggatctttaatttttggcaaacaaggaactggaagagacaacgtggatgcggacaaagtcatgataaccaacgaagaagaaattaaaactactaacccggtagcaacggagtcctatggacaagtggccacaaaccaccagagtgcccaagcacaggcgcagaccggctgggttcaaaaccaaggaatacttccaggtatggtttggcaggacagagatgtgtacctgcaaggacccatttgggccaaaattcctcacacggacggcaactttcacccttctccgctgatgggagggtttggaatgaagcacccgcctcctcagatcctcatcaaaaacacacctgtacctgcggatcctccaacggccttcaacaaggacaagctgaactctttcatcacccagtattctactggccaagtcagcgtggagatcgagtgggagctgcagaaggaaaacagcaagcgctggaacccggagatccagtacacttccaactattacaagtctaataatgttgaatttgctgttaatactgaaggtgtatatagtgaaccccgccccattggcaccagatacctgactcgtaatctgtaattgcttgttaatcaataaaccgtttaattcgtttcagttgaactgcggcc

SEQ ID NO: 574 - DNA, 2601 bp, Artificial Sequence
  Description of Artificial Sequence: Synthetic polynucleotide
ccatcgacgtcagacgcggaagcttcgatcaactacgcggacaggtaccaaaacaaatgttctcgtcacgtgggcatgaatctgatgctgtttccctgcagacaatgcgagagactgaatcagaattcaaatatctgcttcactcacggtgtcaaagactgtttagagtgctttcccgtgtcagaatctcaacccgtttctgtcgtcaaaaaggcgtatcagaaactgtgctacattcatcacatcatgggaaaggtgccagacgcttgcactgcttgcgacctggtcaatgtggacttggatgactgtgtttctgaacaataaatgacttaaaccaggtatggctgccgatggttatcttccagattggctcgaggacaaccttagtgaaggaattcgcgagtggtgggctttgaaacctggagcccctcaacccaaggcaaatcaacaacatcaagacaacgctcgaggtcttgtgcttccgggttacaaataccttggacccggcaacggactcgacaagggggagccggtcaacgcagcagacgcggcggccctcgagcacgacagggcctacgaccagcagctcaaggccggagacaacccgtacctcaagtacaaccacgccgacgccgagttccaggagcggctcaaagaagatacgtcttttgggggcaacctcgggcgagcagtcttccaggccaaaaagaggcttcttgaacctcttggtctggttgaggaagcggctaagacggctcctggaaagaagaggcctgtagagcagtctcctcaggaaccggactcctccgcgggtattggcaaatcgggtgcacagcccgctaaaaagagactcaatttcggtcagactggcgacacagagtcagtcccagaccctcaaccaatcggagaacctcccgcagccccctcaggtgtgggatctcttacaatggcttcaggtggtggcgcaccagtggcagacaataacgaaggtgccgatggagtgggtagttcctcgggaaattggcattgcgattcccaatggctgggggacagagtcatcaccaccagcacccgaacctgggccctgcccacctacaacaatcacctctacaagcaaatctccaacagcacatctggaggatcttcaaatgacaacgcctacttcggctacagcaccccctgggggtattttgacttcaacagattccactgccacttctcaccacgtgactggcagcgactcatcaacaacaactggggattccggcctaagcgactcaacttcaagctcttcaacattcaggtcaaagaggttacggacaacaatggagtcaagaccatcgccaataaccttaccagcacggtccaggtcttcacggactcagactatcagctcccgtacgtgctcgggtcggctcacgagggctgcctcccgccgttcccagcggacgttttcatgattcctcagtacgggtatctgacgcttaatgatggaagccaggccgtgggtcgttcgtccttttactgcctggaatatttcccgtcgcaaatgctaagaacgggtaacaacttccagttcagctacgagtttgagaacgtacctttccatagcagctacgctcacagccaaagcctggaccgactaatgaatccactcatcgaccaatacttgtactatctctcaaagactattaacggttctggacagaatcaacaaacgctaaaattcagtgtggccggacctagcaacatggctgtccagggaagaaactacatacctggacccagctaccgacaacaacgtgtctcaaccactgtgactcaaaacaacaacagcgaatttgcttggcctggagcttcttcttgggctctcaatggacgtaatagcttgatgaatcctggacctgctatggccagccacaaagaaggagaggaccgtttctttcctttgtctggatctttaatttttggcaaacaaggaactggaagagacaacgtggatgcggacaaagtcatgataaccaacgaagaagaaattaaaactactaacccggtagcaacggagtcctatggacaagtggccacaaaccaccagagtgcccaagcacaggcgcagaccggctgggttcaaaaccaaggaatacttccgggtatggtttggcaggacagagatgtgtacctgcaaggacccatttgggccaaaattcctcacacggacggcaactttcacccttctccgctgatgggagggtttggaatgaagcacccgcctcctcagatcctcatcaaaaacacacctgtacctgcggatcctccaacggccttcaacaaggacaagctgaactctttcatcacccagtattctactggccaagtcagcgtggagatcgagtgggagctgcagaagaaaaacagcaagcgctggaacccggagatccagtacacttccaactattacaagtctaataatgttgaatttgctgttaacactgaaggtgtatatagtgaaccccgccccattggcaccagatacctgactcgtaatctgtaattgcttgttaatcaataaaccgtttaattcgtttcagttgaactgcggcc

SEQ ID NO: 575 - DNA, 2601 bp, Artificial Sequence
  Description of Artificial Sequence: Synthetic polynucleotide
ccatcgacgtcagacgcggaagcttcgatcaactacgcggacaggtaccaaaacaaatgttctcgtcacgtgggcatgaatctgatgctgtttccctgcagacaatgcgagagactgaatcagaattcaaatatctgcttcactcacggtgtcaaagactgtttagagtgctttcccgtgtcagaatctcaacccgtttctgtcgtcaaaaaggcgtatcagaaactgtgctacattcatcacatcatgggaaaggtgccagacgcttgcactgcttgcgacctggtcaatgtggacttggatgactgtgtttctgaacaataaatgacttaaaccaggtatggctgccgatggttatcttccagattggctcgaggacaaccttagtgaaggaattcgcgagtggtgggctttgaaacctggagcccctcaacccaaggcaaatcaacaacatcaagacaacgctcgaggtcttgtgcttccgggttacaaataccttggacccggcaacggactcgacaagggggagccggtcaacgcagcagacgcggcggccctcgagcacgacaaggcctacgaccagcagctcaaggccggagacaacccgtacctcaagtacaaccacgccgacgccgagttccaggagcggctcaaagaagatacgtcttttgggggcaacctcgggcgagcagtcttccaggccaaaaagaggcttcttgaacctcttggtctggttgaggaagcggctaagacggctcctggaaagaagaggcctgtagagcagtctcctcaggaaccggactcctccgcgggtattggcaaatcgggtgcacagcccgctaaaaagagactcaatttcggtcagactggcgacacagagtcagtcccagaccctcaaccaatcggagaacctcccgcagccccctcaggtgtgggatctcttacaatggcttcaggtggtggcgcaccagtggcagacaataacgaaggtgccgatggagtgggtagttcctcgggaaattggcattgcgattcccaatggctgggggacagagtcatcaccaccagcacccgaacctgggccctgcccacctacaacaatcacctctacaagcaaatctccaacagcacatctggaggatcttcaaatgacaacgcctacttcggctacagcaccccctgggggtattttgacttcaacagattccactgccacttctcaccacgtgactggcagcgactcatcaacaacaactggggattccggcctaagcgactcaacttcaagctcttcaacattcaggtcaaagaggttacggacaacaatggagtcaagaccatcgccaataaccttaccagcacggtccaggtcttcacggactcagactatcagctcccgtacgtgctcgggtcggctcacgagggctgcctcccgccgttcccagcggacgttttcatgattcctcagtacgggtatctgacgcttaatgatggaagccaggccgtgggtcgttcgtccttttactgcctggaatatttcccgtcgcaaatgctaagaacgggtaacaacttccagttcagctacgagtttgagaacgtacctttccatagcagctacgctcacagccaaagcctggaccgactaatgaatccactcatcgaccaatacttgtactatctctcaaagactattaacggttctggacagaatcaacaaacgctaaaattcagtgtggccggacccagcaacatggctgtccagggaagaaactacatacctggacccagctaccgacaacaacgtgtctcaaccactgtgactcaaaacaacaacagcgaatttgcttggcctggagcttcttcttgggctctcaatggacgtaatagcttgatgaatcctggacctgctatggccagccacaaagaaggagaggaccgtttctttcctttgtctggatctttaatttttggcaaacaaggaactggaagagacaacgtggatgcggacaaagtcatgataaccaacgaagaagaaattaaaactactaacccggtagcaacggagtcctatggacaagtggccacaaaccaccagagtgcccaagcacgggcgcagaccggctgggttcaaaaccaaggaatacttccgggtatggtttggcaggacagagatgtgtacctgcaaggacccatttgggccaaaattcctcacacggacggcaactttcacccttctccgctgatgggagggtttggaatgaagcacccgcctcctcagatcctcatcaaaaacacacctgtacctgcggatcctccaacggccttcaacaaggacaagctgaactctttcatcacccagtattctactggccaagtcagcgtggagatcgagtgggagctgcagaaggaaaacagcaagcgctggaacccggagatccagtacacttccaactattacaagtctaataatgttgaatttgctgttaatactgaaggtgtatatagtgaaccccgccccattggcaccagatacctgactcgtaatctgtaattgcttgttaatcaataaaccgtttaattcgtttcagttgaactgcggcc

SEQ ID NO: 576 - DNA, 2601 bp, Artificial Sequence
  Description of Artificial Sequence: Synthetic polynucleotide
ccatcgacgtcagacgcggaagcttcgatcaactacgcggacaggtaccaaaacaaatgttctcgtcacgtgggcatgaatctgatgctgtttccctgcagacaatgcgagagactgaatcagaattcaaatatctgcttcactcacggtgtcaaagactgtttagagtgctttcccgtgtcagaatctcaacccgtttctgtcgtcaaaaaggcgtatcagaaactgtgctacattcatcacatcatgggaaaggtgccagacgcttgcactgcttgcgacctggtcaatgtggacttggatgactgtgtttctgaacaataaatgacttaaaccaggtatggctgccgatggttatcttccagattggctcgaggacaaccttagtgaaggaattcgcgagtggtgggctttgaaacctggagcccctcaacccaaggcaaatcaacaacatcaagacaacgctcgaggtcttgtgcttccgggttacaaataccttggacccggcaacggactcgacaagggggagccggtcaacgcagtagacgcggcggccctcgagcacgacaaggcctacgaccagcagctcaaggccggagacaacccgtacctcaagtacaaccacgccgacgccgagttccaggagcggctcaaagaagatacgtcttttgggggcaacctcgggcgagcagtcttccaggccaaaaagaggcttcttgaacctcttggtctggttgaggaagcggctaagacggctcctggaaagaagaggcctgtagagcagtctcctcaggaaccggactcctccgcgggtattggcaaatcgggtgcacagcccgctaaaaagagactcaatttcggtcagactggcgacacagagtcagtcccagaccctcaaccaatcggagaacctcccgcagccccctcaggtgtgggatctcttacaatggcttcaggtggtggcgcaccagtggcagacaataacgaaggtgccgatggagtgggtagttcctcgggaaattggcattgcgattcccaatggctgggggacagagtcatcaccaccagcacccgaacctgggccctgcccacctacaacaatcacctctacaagcaaatctccaacagcacatctggaggatcttcaaatgacaacgcctacttcggctacagcaccccctgggggtattttgacttcaacagattccactgccacttctcaccacgtgactggcagcgactcatcaacaacaactggggatttcggcctaagcgactcaacttcaagctcttcaacattcaggtcaaagaggttacggacaacaatggagtcaagaccatcgccaataaccttaccagcacggtccaggtcttcacggactcagactatcagctcccgtacgtgctcgggtcggctcacgagggctgcctcccgccgttcccagcggacgttttcatgattcctcagtacgggtatctgacgcttaatgatggaagccaggccgtgggtcgttcgtccttttactgcctggaatatttcccgtcgcaaatgctaagaacgggtaacaacttccagttcagctacgagtttgagaacgtacctttccatagcagctacgctcacagccaaagcctggaccgactaatgaatccactcatcgaccaatacttgtactatctctcaaagactattaacggttctggacagaatcaacaaacgctaaaattcagtgtggccggacccagcaacatggctgtccagggaagaaactacatacctggacccagctaccgacaacaacgtgtctcaaccactgtgactcaaaacaacaacagcgaatttgcttggcctggagcttcttcttgggctctcaatggacgtaatagcttgatgaatcctggacctgctatggccagccacaaagaaggagaggaccgtttctttcctttgtctggatctttaatttttggcaaacaaggaactggaagagacaacgtggatgcggacaaagtcatgataaccaacgaagaagaaattaaaactactaacccggtagcaacggagtcctatggacaagtggccacaaaccaccagagtgcccaagcacaggcgcagaccggctgggttcaaaaccaaggaatacttccgggtatggtttggcaggacagagatgtgtacctgcaaggacccatttgggccaaaattcctcacacggacggcaactttcacccttctccgctgatgggagggtttggaatgaagcacccgcctcctcagatcctcatcaaaaacacacctgtacctgcggatcctccaacggccttcaacaaggacaagctgaactctttcatcacccagtattctactggccaagtcagcgtggagatcgagtgggagctgcagaaggaaaacagcaagcgctggaacccggagatccagtacacttccaactattacaagtctaataatgttgaatttgctgttaatactgaaggtgtatatagtgaaccccgccccattggcaccagatacctgactcgtaatctgtaattgcttgttaatcaataaaccgtttaattcgtttcagttgaactgcggcc

SEQ ID NO: 577 - DNA, 2580 bp, Artificial Sequence
  Description of Artificial Sequence: Synthetic polynucleotide
ccatcgacgtcagacgcggaagcttcgatcaactacgcggacaggtaccaaaacaaatgttctcgtcacgtgggcatgaatctgatgctgtttccctgcagacaatgcgagagactgaatcagaattcaaatatctgcttcactcacggtgtcaaagactgtttagagtgctttcccgtgtcagaatctcaacccgtttctgtcgtcaaaaaggcgtatcagaaactgtgctacattcatcacatcatgggaaaggtgccagacgcttgcactgcttgcgacctggtcaatgtggacttggatgactgtgtttctgaacaataaatgacttaaaccaggtatggctgccgatggttatcttccagattggctcgaggacaaccttagtgaaggaattcgcgagtggtgggctttgaaacctggagcccctcaacccaaggcaaatcaacaacatcaagacaacgctcgaggtcttgtgcttccgggttacaaataccttggacccggcaacggactcgacaagggggagccggtcaacgcagcagacgcggcggccctcgagcacgacaaggcctacgaccagcagctcaaggccggagacaacccgtacctcaagtacaaccacgccgacgccgagttccaggagcggctcaaagaagatacgtcttttgggggcaacctcgggcgagcagtcttccaggccaaaaagaggcttcttgaacctcttggtctggttgaggaagcggctaagacggctcctggaaagaagaggcctgtagagcagtctcctcgggaaccggactcctccgcgggtattggcaaatcgggtgcacagcccgctaaaaagagactcaatttcggtcagactggcgacacagagtcagtcccagaccctcaaccaatcggagaacctcccgcagccccctcaggtgtgggatctcttacaatggcttcaggtggtggcgcaccagtggcagacaataacgaaggtgccgatggagtgggtagttcctcgggaaattggcattgcgattcccaatggctgggggacagagtcatcaccaccagcacccgaacctgggccctgcccacctacaacaatcacctctacaagcaaatctccaacagcacatctggaggatcttcaaatgacaacgcctacttcggctacagcaccccctgggggtattttgacttcaacagattccactgccacttctcaccacgtgactggcagcgactcatcaacaacaactggggattccggcctaagcgactcaacttcaagctcttcaacattcaggtcaaagaggttacggacaacaatggagtcaagaccatcgccaataaccttaccagcacggtccaggtcttcacggactcagactatcagctcccgtacgtgctcgggtcggctcacgagggctgcctcccgccgttcccagcggacgttttcatgattcctcagtacgggtatctgacgcttaatgatggaagccaggccgtgggtcgttcgtccttttactgcctggaatatttcccgtcgcaaatgctaagaacgggtaacaacttccagttcagctacgagtttgagaacgtacctttccatagcagctacgctcacagccaaagcctggaccgactaatgaatccactcatcgaccaatacttgtactatctctcaaagactattaacggttctggacagaatcaacaaacgctaaaattcagtgtggccggacccagcaacatggctgtccagggaagaaactacatacctggacccagctaccgacaacaacgtgtctcaaccactgtgactcaaaacaacaacagcgaatttgcttggcctggagcttcttcttgggctctcaatggacgtaatagcttgatgaatcctggacctgctatggccagccacaaagaaggagaggaccgtttctttcctttgtctggatctttaatttttggcaaacaaggaactggaagagacaacgtggatgcggacaaagtcatgataaccaacgaagaagaaattaaaactactaacccggtagcaacggagtcctatggacaagtggccacaaaccaccagagtgcccaagcacaggcgcagaccggctgggttcaaaaccaaggaatacttccgggtatggtttggcaggacagagatgtgtacctgcaaggacccatttgggccaaaattcctcacacggacggcaactttcacccttctccgctgatgggagggtttggaatgaagcacccgcctcctcagatcctcatcaaaaacacacctgtacctgcggatcctccaacggccttcaacaaggacaagctgaactctttcatcacccagtattctactggccaagtcagcgtggagatcgagtgggaactgcagaaggaaaacagcaagcgctggaacccggagatccagtacacttccaactattacaagtctaataatgttgaatttgctgttaatactgaaggtgtatatagtgaaccccgccccattggcaccagatacctgactcgtaatctgtaattgcttgttaatcaataaaccgtttaatt

SEQ ID NO: 578 - DNA, 2601 bp, Artificial Sequence
  Description of Artificial Sequence: Synthetic polynucleotide
ccatcgacgtcagacgcggaagcttcgatcaactacgcggacaggtaccaaaacaaatgttctcgtcacgtgggcatgaatctgatgctgtttccctgcagacaatgcgagagactgaatcagaattcaaatatctgcttcactcacggtgtcaaagactgtttagagtgctttcccgtgtcagaatctcaacccgtttctgtcgtcaaaaaggcgtatcagaaactgtgctacattcatcacatcatgggaaaggtgccagacgcttgcactgcttgcgacctggtcaatgtggacttggatgactgtgtttctgaacaataaatgacttaaaccaggtatggctgccgatggttatcttccagattggctcgaggacaaccttagtgaaggaattcgcgagtggtgggctttgaaacctggagcccctcaacccaaggcaaatcaacaacatcaagacaacgctcgaggtcttgtgcttccgggttacaaataccttggacccggcaacggactcgacaagggggagccggtcaacgcagcagacgcggcggccctcgagcacgacaaggcctacgaccagcagctcaaggccggagacaacccgtacctcaagtacaaccacgccgacgccgagttccaggagcggctcaaagaagatacgtcttttgggggcaacctcgggcgagcagtctttcaggccaaaaagaggcttcttgaacctcttggtctggttgaggaagcggctaagacggctcctggaaagaagaggcctgtagagcagtctcctcaggaaccggactcctccgcgggtattggcaaatcgggtgcacagcccgctaaaaagagactcaatttcggtcagactggcgacacagagtcagtcccagaccctcaaccaatcggagaacctcccgcagccccctcaggtgtgggatctcttacaatggcttcatgtggtggcgcaccagtggcagacaataacgaaggtgccgatggagtgggtagttcctcgggaaattggcattgcgattcccaatggctgggggacagagtcatcaccaccagcacccgaacctgggccctgcccacctacaacaatcacctctacaagcaaatctccaacagcacatctggaggatcttcaaatgacaacgcctacttcggctacagcaccccctgggggtattttgacttcaacagattccactgccacttctcaccacgtgactggcagcgactcatcaacaacaactggggattccggcctaagcgactcaacttcaagctcttcaacattcaggtcaaagaggttacggacaacaatggagtcaagaccatcgccaataaccttaccagcacggtccaggtcttcacggactcagactatcagctcccgtacgtgctcgggtcggctcacgagggctgcctcccgccgttcccagcggacgttttcatgattcctcagtacgggtatctgacgcttaatgatggaagccaggccgtgggtcgttcgtccttttactgcctggaatatttcccgtcgcaaatgctaagaacgggtaacaacttccagttcagctacgagtttgagaacgtacctttccatagcagctacgctcacagccaaagcctggaccgactaatgaatccactcatcgaccaatacttgtactatctctcaaagactattaacggttctggacagaatcaacaaacgctaaaattcagtgtggccggacccagcaacatggctgtccagggaagaaactacatacctggacccagctaccgacaacaacgtgtctcaaccactgtgactcaaaacaacaacagcgaatttgcttggcctggagcttcttcttgggctctcaatggacgtaatagcttgatgaatcctggacctgctatggccagccacaaagaaggagaggaccgtttctttcctttgtctggatctttaatttttggcaaacaaggaactggaagagacaacgtggatgcggacaaagtcatgataaccaacgaagaagaaattaaaactactaacccggtagcaacggagtcctatggacaagtggccacaaaccaccagagtgcccaagcacaggcgcagaccggctgggttcaaaaccaaggaatacttccgggtatggtttggcaggacagagatgtgtacctgcaaggacccatttgggccaaaattcctcacacggacggcaactttcacccttctccgctgatgggagggtttggaatgaagcacccgcctcctcagatcctcatcaaaaacacacctgtacctgcggatcctccaacggccttcaacaaggacaagctgaactctttcatcacccagtattctactggccaagtcagcgtggagatcgagtgggagctgcagaaggaaaacagcaagcgctggaacccggagatccagtacacttccaactattacaagtctaataatgttgaatttgctgttaatactgaaggtgtatatagtgaaccccgccccattggcaccagatacctgactcgtaatctgtaattgcttgttaatcaataaaccgtttaattcgtttcagttgaactgcggcc

SEQ ID NO: 579 - DNA, 2601 bp, Artificial Sequence
  Description of Artificial Sequence: Synthetic polynucleotide
ccatcgacgtcagacgcggaagcttcgatcaactacgcggacaggtaccaaaacaaatgttctcgtcacgtgggcatgaatctgatgctgtttccctgcagacaatgcgagagactgaatcagaattcaaatatctgcttcactcacggtgtcaaagactgtttagagtgctttcccgtgtcagaatctcaacccgtttctgtcgtcaaaaaggcgtatcagaaactgtgctacattcatcacatcatgggaaaggtgccagacgcttgcactgcttgcgacctggtcaatgtggacttggatgactgtgtttctgaacaataaatgacttaaaccaggtatggctgccgatggttatcttccagattggctcgaggacaaccttagtgaaggaattcgcgagtggtgggctttgaaacctggagcccctcaacccaaggcaaatcaacaacatcaagacaacgctcgaggtcttgtgcttccgggttacaaataccttggacccggcaacggactcgacaagggggagccgatcaacgcagcagacgcggcggccctcgagcacgacaaggcctacgaccagcagctcaaggccggagacaacccgtacctcaagtacaaccacgccgacgccgagttccaggagcggctcaaagaagatacgtcttttgggggcaacctcgggcgagcagtcttccaggccaaaaagaggcttcttgaacctcttggtctggttgaggaagcggctaagacggctcctggaaagaagaggcctgtagagcagtctcctcaggaaccggactcctccgcgggtattggcaaatcgggtgcacagcccgctaaaaagagactcaatttcggtcagactggcgacacagagtcagtcccagaccctcaaccaatcggagaacctcccgcagccccctcaggtgtgggatctcttacaatggcttcaggtggtggcgcaccagtggcagacaataacgaaggtgccgatggagtgggtagttcctcgggaaattggcattgcgattcccaatggctgggggacagagtcatcaccaccagcacccgaacctgggccctgcccacctacaacaatcacctctacaagcaaatctccaacagcacatctggaggatcttcaaatgacaacgcctacttcggctacagcaccccctgggggtattttgacttcaacagattccactgccacttctcaccacgtgactggcagcgactcatcaacaacaactggggattccggcctaagcgactcaacttcaagctcttcaacattcaggtcaaagaggttacggacaacaatggagtcaagaccatcgccaataaccttaccagcacggtccaggtcttcacggactcagactatcagctcccgtacgtgctcgggtcggctcacgagggctgcctcccgccgttcccagcggacgttttcatgattcctcagtacgggtatctgacgcttaatgatggaagccaggccgtgggtcgttcgtccttttactgcctggaatatttcccgtcgcaaatgctaagaacgggtaacaacttccagttcagctacgagtttgagaacgtacctttccatagcagctacgctcacagccaaagcctggaccgactaatgaatccactcatcgaccaatacttgtactatctctcaaagactattaacggttctggacagaatcaacaaacgctaaaattcagtgtggccggacccagcaacatggctgtccagggaagaaactacatacctggacccagctaccgacaacaacgtgtctcaaccactgtgactcaaaacaacaacagcgaatttgcttggcctggagcttcttcttgggctctcaatggacgtaatagcttgatgaatcctggacctgctatggccagccacaaagaaggagaggaccgtttctttcctttgtctggatctttaatttttggcaaacaaggaactggaagagacaacgtggatgcggacaaagtcatgataaccaacgaagaagaaattaaaactactaacccggtagcaacggagtcctatggacaagtggccacaaaccaccagagtgcccaagcacaggcgcagaccggctgggttcaaaaccaaggaatacttccgggtatggtttggcaggacagagatgtgtacctgcaaggacccatttgggccaaaattcctcacacgtacggcaactttcacccttctccgctgatgggagggtttggaatgaagcacccgcctcctcagatcctcatcaaaaacacacctgtacctgcggatcctccaacggccttcaacaaggacaagctgaactctttcatcacccagtattctactggccaagtcagcgtggagatcgagtgggagctgcagaaggaaaacagcaagcgctggaacccggagatccagtacacttccaactattacaagtctaataatgttgaatttgctgttaatactgaaggtgtatatagtgaaccccgccccattggcaccagatacctgactcgtaatctgtaattgcttgttaatcaataaaccgtttaattcgtttcagttgaactgcggcc

SEQ ID NO: 580 - DNA, 2601 bp, Artificial Sequence
  Description of Artificial Sequence: Synthetic polynucleotide
ccatcgacgtcagacgcggaagcttcgatcaactacgcggacaggtaccaaaacaaatgttctcgccacgtgggcatgaatctgatgctgtttccctgcagacaatgcgagagactgaatcagaattcaaatatctgcttcactcacggtgtcaaagactgtttagagtgctttcccgtgtcagaatctcaacccgtttctgtcgtcaaaaaggcgtatcagaaactgtgctacattcatcacatcatgggaaaggtgccagacgcttgcactgcttgcgacctggtcaatgtggacttggatgactgtgtttctgaacaataaatgacttaaaccaggtatggctgccgatggttatcttccagattggctcgaggacaaccttagtgaaggaattcgcgagtggtgggctttgaaacctggagcccctcaacccaaggcaaatcaacaacatcaagacaacgctcgaggtcttgtgcttccgggttacaaataccttggacccggcaacggactcgacaagggggagccggtcaacgcagcagacgcggcggccctcgagcacgacaaggcctacgaccagcagctcaaggccggagacaacccgtacctcaagtacaaccacgccgacgccgagttccaggagcggctcaaagaagatacgtcttttgggggcaacctcgggcgagcagtcttccaggccaaaaagaggcttcttgaacctcttggtctggttgaggaagcggctaagacggctcctggaaagaagaggcctgtagagcagtctcctcaggaaccggactcctccgcgggtattggcaaatcgggtgcacagcccgctaaaaagagactcaatttcggtcagactggcgacacagagtcagtcccagaccctcaaccaatcggagaacctcccgctgccccctcaggtgtgggatctcttacaatggcttcaggtggtggcgcaccagtggcagacaataacgaaggtgccgatggagtgggtagttcctcgggaaattggcattgcgattcccaatggctgggggacagagtcatcaccaccagcacccgaacctgggccctgcccacctacaacaatcacctctacaagcaaatctccaacagcacatctggaggatcttcaaatgacaacgcctacttcggctacagcaccccctgggggtattttgacttcaacagattccactgccacttctcaccacatgactggcagcgactcatcaacaacaactggggattccggcctaagcgactcaacttcaagctcttcaacattcaggtcaaagaggttacggacaacaatggagtcaagaccatcgccaataaccttaccagcacggtccaggtcttcacggactcagactatcagctcccgtacgtgctcgggtcggctcacgagggctgcctcccgccgttcccagcggacgttttcatgattcctcagtacgggtatctgacgcttaatgatggaagccaggccgtgggtcgttcgtccttttactgcctggaatatttcccgtcgcaaatgctaagaacgggtaacaacttccagttcagctacgagtttgagaacgtacctttccatagcagctacgctcacagccaaagcctggaccgactaatgaatccactcatcgaccaatacttgtactatctctcaaagactattaacggttctggacagaatcaacaaacgctaaaattcaatgtggccggacccagcaacatggctgtccagggaagaaactacatacctggacccagctaccgacaacaacgtgtctcaaccactgtgactcaaaacaacaacagcgaatttgcctggcctagagcttcttcttgggctctcaatggacgtaatagcttgatgaatcctggacctgctatggccagccacaaagaaggagaggaccgtttctttcctttgtctggatctttaatttttggcaaacaaggaactggaagagacaacgtggatgcggacaaagtcatgataaccaacgaagaagaaattaaaactactaacccggtagcaacggagtcctatggacaagtggccacaaaccaccagagtgcccaagcacaggcgcagaccggctgggttcaaaaccaaggaatacttccgggtatggtttggcaggacagagatgtgtacctgcaaggacccatttgggccaaaattcctcacacggacggcaactttcacccttctccgctgatgggagggtttggaatgaagcacccgcctcctcagatcctcatcaaaaacacacctgtacctgcggatcctccaacggccttcaacaaggacaagctgaactctttcatcacccagtattctactggccaagtcagcatggagatcgagtgggagctgcagaaggaaaacagcaagcgctggaacccggagatccagtacacttccaactattacaagtctaataatgttgaatttgctgttaatactgaaggtgtatatagtgaaccccgccccattggcaccagatacctgactcgtaatctgtaattgcttgttaatcaataaaccgtttaattcgtttcagttgaactgcggcc

SEQ ID NO: 581 - DNA, 2601 bp, Artificial Sequence
  Description of Artificial Sequence: Synthetic polynucleotide
ccatcgacgtcagacgcggaagcttcgatcaactacgcggacaggtaccaaaacaaatgttctcgtcacgtgggcatgaatctgatgctgtttccctgcagacaatgcgagagactgaatcagaattcaaatatctgcttcactcacggtgtcaaagactgtttagagtgctttcccgtgtcagaatctcaacccgtttctgtcgtcaaaaaggcgtatcagaaactgtgctacattcatcacatcatgggaaaggtgccagacgcttgcactgcttgcgacctggtcaatgtggacttggatgactgtgtttctgaacaataaatgacttaaaccaggtatggctgccgatggttatcttccagattggctcgaggacaaccttagtgaaggaattcgcgagtggtgggctttgaaacctggagcccctcaacccaaggcaaatcaacaacatcaagacaacgctcgaggtcttgtgcttccgggttacaaataccttggacccggcaacggactcgacaagggggagccggtcaacgcagcagacgcggcggccctcgagcacgacaaggcctacgaccagcagctcaaggccggagacaacccgtacctcaagtacaaccacgccgacgccgagttccaggagcggctcaaagaagatacgtcttttgggggcaacctcgggcgagcagtcttccaggccaaaaagaggcttcttgaacctcttggtctggttgaggaagcggctaagacggctcctggaaagaagaggcctgtagagcagtctcctcaggaaccggactcctccgcgggtattggcaaatcgggtgcacagcccgctaaaaagagactcaatttcggtcagactggcgacacagagtcagtcccagaccctcaaccaatcggagaacctcccgcagccccctcaggtgtgggatctcttacaatggcttcaggtggtggcgcaccagtggcagacaataacgaaggtgccgatggagtgggtagttcctcgggaaattggcattgcgattcccaatggctgggggacagagtcatcaccaccagcacccgaacctgggccctgcccacctacaacaatcacctctacaagcaaatctccaacagcacatctggaggatcttcaaatgacaacgcctacttcggctacagcaccccctgggggtattttgacttcaacagattccactgccacttctcaccacgtgactggcagcgactcatcaacaacaactggggattccggcctaagcgactcaacttcaagctcttcaacattcaggtcaaagaggttacggacaacaatggagtcaagaccatcgccaataaccttaccagcacggtccaggtcttcacggactcagactatcagctcccgtacgtgctcgggtcggctcacgagggctgcctcccgccgttcccagcggacgttttcatgattcctcagtacgggtatctgacgcttaatgatggaagccaggccgtgggtcgttcgtccttttactgcctggaatatttcccgtcgcaaatgctaagaacgggtaacaacttccagttcagctacgagtttgagaacgtacctttccatagcagctacgctcacagccaaagcctggaccgactaatgaatccactcatcgaccaatacttgtactatctctcaaagactattaacggttctggacagaatcaacaaacgctaaaattcagtgtggccggacccagcaacatggctgtccagggaagaaactacatacctggacccagctaccgacaacaacgtgtctcaaccactgtgactcaaaacaacaacagcgaatttgcttggcctagagcttcttcttgggctctcaatggacgtaatagcttgatgaatcctggacctgctatggccagccacaaagaaggagaggaccgtttctttcctttgtctggatctttaatttttggcaaacaaggaactggaagagacaacgtggatgcggacaaagtcatgataaccaacgaagaagaaattaaaactactaacccggtagcaacggagtcctatggacaagtggccacaaaccaccagagtgcccaagcacaggcgcagaccggctgggttcaaaaccaaggaatacttccgggtatggtttggcaggacagagatgtgtacctgcaaggacccatttgggccaaaattcctcacacggacggcaactttcacccttctccgctgatgggagggtttggaatgaagcacccgcctcctcagatcctcatcaaaaacacacctgtacctgcggatcctccaacggccttcaacaaggacaagctgaactctttcatcacccagtattctactggccaagtcagcgtggagatcgagtgggagctgcagaaggaaaacagcaagcgctggaacccggagatccagtacacttccaactattacaagtctaataatgttgaatttgctgttaatactgaaggtgtatatagtgaaccccgccccattggcaccagatacctgactcgtaatctgtaattgcttgttaatcaataaaccgtttaattcgtttcagttgaactgcggcc

SEQ ID NO: 582 - DNA, 2601 bp, Artificial Sequence
  Description of Artificial Sequence: Synthetic polynucleotide
ccatcgacgtcagacgcggaagcttcgatcaactacgcggacaggtaccaaaacaaatgttctcgtcacgtgggcatgaatctgatgctgtttccctgcagacaatgcgagagactgaatcagaattcaaatatctgcttcactcacggtgtcaaagactgtttagagtgctttcccgtgtcagaatctcaacccgtttctgtcgtcaaaaaggcgtatcagaaactgtgctacattcatcacatcatgggaaaggtgccagacgcttgcactgcttgcgacctggtcaatgtggacttggatgactgtgtttctgaacaataaatgacttaaaccaggtatggctgccgatggttatcttccagattggctcgaggacaaccttagtgaaggaattcgcgagtggtgggctttgaaacctggagcccctcaacccaaggcaaatcaacaacatcaagacaacgctcgaggtcttgtgcttccgggttacaaataccttggacccggcaacggactcgacaagggggagccggtcaacgcagcagacgcggcggccctcgagcacgacaaggcctacgaccagcagctcaaggccggagacaacccgtacctcaagtacaaccacgccgacgccgagttccaggagcggctcaaagaagatacgtcttttgggggcaacctcgggcgagcagtcttccaggccaaaaagaggcttcttgaacctcttggtctggttgaggaagcggctaagacggctcctggaaagaagaggcctgtagagcagtctcctcaggaaccggactcctccgcgggtattggcaaatcgggtgcacagcccgctaaaaagagactcaatttcggtcagactggcgacacagagtcagtcccagaccctcaaccaatcggagaacctcccgcagccccctcaggtgtgggatctcttacaatggcttcaggtggtggcgcaccagtggcagacaataacgaaggtgccgatggagtgggtagttcctcgggaaattggcattgcgattcccaatggctgggggacagagtcatcaccaccagcacccgaacctgggccctgcccacctacaacaatcacctctacaagcaaatctccaacagcacatctggaggatcttcaaatgacaacgcctacttcggctacagcaccccctgggggtattttgacttcaacagattccactgccacttctcaccacgtgactggcagcgactcatcaacaacaactggggattccggcctaagcgactcaacttcaagctcttcaacattcaggtcaaagaggttacggacaacaatggagtcaagaccatcgccaataaccttaccagcacggtccaggtcttcacggactcagactatcagctcccgtacgtgctcgggtcggctcacgagggctgcctcccgccgttcccagcggacgttttcatgattcctcagtacgggtatctgacgcttaatgatggaagccaggccgtgggtcgttcgtccttttactgcctggaatatttcccgtcgcaaatgctaagaacgggtaacaacttccagttcagctacgagtttgagaacgtacctttccatagcagctacgctcacagccaaagcctggaccgactaatgaatccactcatcgaccaatacttgtactatctctcaaagactattaacggttctggacagaatcaacaaacgctaaaattcagtgtggccggacccagcaacatggctgtccagggaagaaactacatacctggacccagctaccgacaacaacgtgtctcaaccactgtgactcaaaacaacaacagcgaatttgcttggcctagagcttcttcttgggctctcaatggacgtaatagcttgatgaatcctggacctgctatggccagccacaaagaaggagaggaccgtttctttcctttgtctggatctttaatttttggcaaacaaggaactggaagagacaacgtggatgcggacaaagtcatgataaccaacgaagaagaaattaaaactactaacccggtagcaacggagtcctatggacaagtggccacaaaccaccagagtgcccaagcacaggcgcagaccggctgggttcaaaaccaaggaatacttccgggtatggtttggcaggacagagatgtgtacctgcaaggacccatttgggccaaaattcctcacacggacggcaactttcacccttctccgctgatgggagggtttggaatgaagcacccgcctcctcagatcctcatcaaaaacacacctgtacctgcggatcctccaacggccttcaacaaggacaagctgaactctttcatcacccagtattctactggccaagtcagcgtggagatcgagtgggagcggcagaaggaaaacagcaagcgctggaacccggagatccagtacacttccaactattacaagtctaataatgttgaatttgctgttaatactgaaggtgtatatagtgaaccccgccccattggcaccagatacctgactcgtaatctgtaattgcttgttaatcaataaaccgtttaattcgtttcagttgaactgcggcc

SEQ ID NO: 583 - DNA, 2601 bp, Artificial Sequence
  Description of Artificial Sequence: Synthetic polynucleotide
ccatcgacgtcagacgcggaagcttcgatcaactacgcggacaggtaccaaaacaaatgttctcgtcacgtgggcatgaatctgatgctgtttccctgcagacaatgcgagagactgaatcagaattcaaatatctgcttcactcacggtgtcaaagactgtttagagtgctttcccgtgtcagaatctcaacccgtttctgtcgtcaaaaaggcgtatcagaaactgtgctacattcatcacatcatgggaaaggtgccagacgcttgcactgcttgcgacctggtcaatgtggacttggatgactgtgtttctgaacaataaatgacttaaaccaggtatggctgccgatggttatcttccagattggctcgaggacaaccttagtgaaggaattcgcgagtggtgggctttgaaacctggagcccctcaacccaaggcaaatcaacaacatcaagacaacgctcgaggtcttgtgcttccgggttacaaataccttggacccggcaacggactcgacaagggggagccggtcaacgcagcagacgcggcggccctcgagcacgacaaggcctacgaccagcagctcaaggccggagacaacccgtacctcaagtacaaccacgccgacgccgagttccaggagcggctcaaagaagatacgtcttttgggggcaacctcgggcgagcagtcttccaggccaaaaagaggcttcttgaacctcttggtctggttgaggaagcggctaagacggctcctggaaagaagaggcctgtagagcagtctcctcaggaaccggactcctccgcgggtattggcaaatcgggtgcacagcccgctaaaaagagactcaatttcggtcagactggcgacacagagtcagtcccagaccctcaaccaatcggagaacctcccgcagccccctcaggtgtgggatctcttacaatggcttcaggtggtggcgcaccagtggcagacaataacgaaggtgccgatggagtgggtagttcctcgggaaattggcattgcgattcccaatggctgggggacagagtcatcaccaccagcacccgaacctgggccctgcccacctacaacaatcacctctacaagcaaatctccaacagcacatctggaggatcttcaaatgacaacgcctacttcggctacagcaccccctgggggtattttgacttcaacagattccactgccacttctcaccacgtgactggcagcgactcatcaacaacaactggggattccggcctaagcgactcaacttcaagctcttcaacattcaggtcaaagaggttacggacaacaatggagtcaagaccatcgccaataaccttaccagcacggtccaggtcttcgcggactcagactatcagctcccgtacgtgctcgggtcggctcacgagggctgcctcccgccgttcccagcggacgttttcatgattcctcagtacgggtatctgacgcttaatgatggaagccaggccgtgggtcgttcgtccttttactgcctggaatatttcccgtcgcaaatgctaagaacgggtaacaacttccagttcagctacgagtttgagaacgtacctttccatagcagctacgctcacagccaaagcctggaccgactaatgaatccactcatcgaccaatacttgtactatctctcaaagactattaacggttctggacagaatcaacaaacgctaaaattcagtgtggccggacccagcaacatggctgtccagggaagaaactacatacctggacccagctaccgacaacaacgtgtctcaaccactgtgactcaaaacaacaacagcgaatttgcttggcctagagcttcttcttgggctctcaatggacgtaatagcttgatgaatcctggacctgctatggccagccacaaagaaggagaggaccgtttctttcctttgtctggatctttaatttttggcaaacaaggaactggaagagacaacgtggatgcggacaaagtcatgataaccaacgaagaagaaattaaaactactaacccggtagcaacggagtcctatggacaagtggccacaaaccaccagagtgcccaagcacaggcgcagaccggctgggttcaaaaccaaggaatacttccgggtatggtttggcaggacagagatgtgtacctgcaaggacccatttgggccaaaattcctcacacggacggcaactttcacccttctccgctgatgggagggtttggaatgaagcacccgcctcctcagatcctcatcaaaaacacacctgtacctgcggatcctccaacggccttcaacaaggacaagctgaactctttcatcacccagtattctactggccaagtcagcgtggagatcgagtgggagctgcagaaggaaaacagcaagcgctggaacccggagatccagtacacttccaactattacaagtctaataatgttgaatttgctgttaatactgaaggtgtatatagtgaaccccgccccattggcaccagatacctgactcgtaatctgtaattgcttgttaatcaataaaccgtttaattcgtttcagttgaactgcggcc

SEQ ID NO: 584 - DNA, 2601 bp, Artificial Sequence
  Description of Artificial Sequence: Synthetic polynucleotide
ccatcgacgtcagacgcggaagcttcgatcaactacgcggacaggtaccaaaacaaatgttctcgtcacgtgggcatgaatctgatgctgtttccctgcagacaatgcgagagactgaatcagaattcaaatatctgcttcactcacggtgtcaaagactgtttagagtgctttcccgtgtcagaatctcaacccgtttctgtcgtcaaaaaggcgtatcagaaactgtgctacattcatcacatcatgggaaaggtgccagacgcttgcactgcttgcgacctggtcaatgtggacttggatgactgtgtttctgaacaataaatgacttaaaccaggtatggctgccgatggttatcttccagattggctcgaggacaaccttagtgaaggaattcgcgagtggtgggctttgaaacctggagcccctcaacccaaggcaaatcaacaacatcaagacaacgctcgaggtcttgtgcttccgggttacaaataccttggacccggcaacggactcgacaagggggagccggtcaacgcagcagacgcggcggccctcgagcacgacaaggcctacgaccagcagctcaaggccggagacaacccgtacctcaagtacaaccacgccgacgccgagttccaggagcggctcaaagaagatacgtcttttgggggcaacctcgggcgagcagtcttccaggccaaaaagaggcttcttgaacctcttggtctggttgaggaagcggctaagacggctcctggaaagaagaggcctgtagagcagtctcctcaggaaccggactcctccgcgggtattggcaaatcgggtgcacagcccgctaaaaagagactcaatttcggtcagactggcgacacagagtcagtcccagaccctcaaccaatcggagaacctcccgcagccccctcaggtgtgggatctcttacaatggcttcaggtggtggcgcaccagtggcagacaataacgaaggtgccgatggagtgggtagttcctcgggaaattggcattgcgattcccaatggctgggggacagagtcatcaccaccagcacccgaacctgggccctgcccacctacaacaatcacctctacaagcaaatctccaacagcacatctggaggatcttcaaatgacaacgcctacttcggctacagcaccccctgggggtattttgacttcaacagattccactgccacttctcaccacgtgactggcagcgactcatcaacaacaactggggattccggcctaagcgactcaacttcaagctcttcaacattcaggtcaaagaggttacggacaacaatggagtcaagaccatcgccaataaccttaccagcacggtccaggtcttcacggactcagactatcagctcccgtacgtgctcgggtcggctcacgagggctgcctcccgccgttcccagcggacgttttcatgattcctcagtacgggtatctgacgcttaatgatggaagccaggccgtgggtcgttcgtccttttactgcctggaatatttcccgtcgcaaatgctaagaacgggtaacaacttccagttcagctacgagtttgagaacgtacctttccatagcagctacgctcacagccaaagcctggaccgactaatgaatccactcatcgaccaatacttgtactatctctcaaagactattaacggttctggacagaatcaacaaacgctaaaattcagtgtggccggacccagcaacatggctgtccagggaagaaactacatacctggacccagctaccgacaacaacgtgtctcaaccactgtgactcaaaacaacaacagcgaaattgcttggcctagagcttcttcttgggctctcaatggacgtaatagcttgatgaatcctggacctgctatggccagccacaaagaaggagaggaccgtttctttcctttgtctggatctttaatttttggcaaacaaggaactggaagagacaacgtggatgcggacaaagtcatgataaccaacgaagaagaaattaaaactactaacccagtagcaacggagtcctatggacaagtggccacaaaccaccagagtgcccaagcacaggcgcagaccggctgggttcaaaaccaaggaatacttccgggtatggtttggcaggacagagatgtgtacctgcaaggacccatttgggccaaaattcctcacacggacggcaactttcacccttctccgctgatgggagggtttggaatgaagcacccgcctcctcagatcctcatcaaaaacacacctgtacctgcggatcctccaacggccttcaacaaggacaagctgaactctttcatcacccagtattctactggccaagtcagcgtggagatcgagtgggagctgcagaaggaaaacagcaagcgctggaacccggagatccagtacacttccaactattgcaagtctaataatgttgaatttgctgttaatactgaaggtgtatatagtgaaccccgccccattggcaccagatacctgactcgtaatctgtaattgcttgttaatcaataaaccgtttaattcgtttcagttgaactgcggcc

SEQ ID NO: 585 - DNA, 2601 bp, Artificial Sequence
  Description of Artificial Sequence: Synthetic polynucleotide
ccatcgacgtcagacgcggaagcttcgatcaactacgcggacaggtaccaaaacaaatgttctcgtcacgtgggcatgaatctgatgctgtttccctgcagacaatgcgagagactgaatcagaattcaaatatctgcttcactcacggtgtcaaagactgtttagagtgctttcccgtgtcagaatctcaacccgtttctgtcgtcaaaaaggcgtatcagaaactgtgctacattcatcacatcatgggaaaggtgccagacgcttgcactgcttgcgacctggtcaatgtggacttggatgtctgtgtttctgaacaataaatgacttaaaccaggtatggctgccgatggttatcttccagattggctcgaggacaaccttagtgaaggaattcgcgagtggtgggctttgaaacctggagcccctcaacccaaggcaaatcaacaacatcaagacaacgctcgaggtcttgtgcttccgggttacaaataccttggacccggcaacggactcgataagggggagccggtcaacgcagcagacgcggcggccctcgagcacgacaaggcctacgaccagcagctcaaggccggagacaacccgtacctcaagtacaaccacgccgacgccgagttccaggagcggctcaaagaagatacgtcttttgggggcaacctcgggcgagcagtcttccaggccaaaaagaggcttcttgaacctcttggtctggttgaggaagcggctaagacggctcctggaaagaagaggcctgtagagcagtctcctcaggaaccggactcctccgcgggtattggcaaatcgggtgcacagcccgctaaaaagagactcaatttcggtcagactggcgacacagagtcagtcccagaccctcaaccaatcggagaacctcccgcagccccctcaggtgtgggatctcttacaatggcttcaggtggtggcgcaccagtggcagacaataacgaaggtgccgatggagtgggtagttcctcgggaaattggcattgcgattcccaatggctgggggacagagtcatcaccaccagcacccgaacctgggccctgcccacctacaacaatcacctctacaagcaaatctccaacagcacatctggaggatcttcaaatgacaacgcctacttcggctacagcaccccctgggggtattttgacttcaacagattccactgccacttctcaccacgtgactggcagcgactcatcaacaacaactggggattccggcctaagcgactcaacttcaagctcttcaacattcaggtcaaagaggttacggacaacaatggagtcaagaccatcgccaataaccttaccagcacggtccaggtcttcacggactcagactatcagctcccgtacgtgctcgggtcggctcacgagggctgcctcccgccgttcccagcggacgttttcatgattcctcagtacgggtatctgacgcttaatgatggaagccaggccgtgggtcgttcgtccttttactgcctggaatatttcccgtcgcaaatgctaagaacgggtaacaacttccagttcagctacgagtttgagaacgtacctttccatagcagctacgctcacagccaaagcctggaccgactaatgaatccactcatcgaccaatacttgtactatctctcaaagactattaacggttctggacagaatcaacaaacgctaaaattcagtgtggccggacccagcaacatggctgtccagggaagaaactacatacctggacccagctaccgacaacaacgtgtctcaaccactgtgactcaaaacaacaacagcgaatttgcttggcctagagcttcttcttgggctctcaatggacgtaatagcttgatgaatcctggacctgctatggccagccacaaagaaggagaggaccgtttctttcctttgtctggatctttaatttttggcaaacaaggaactggaagagacaacgtggatgcggacaaagtcatgataaccaacgaagaagaaattaaaactactaacccggtagcaacggagtcctatggacaagtggccacaaaccaccagagtgcccaagcacaggcgcagaccggctgggttcaaaaccaaggaatacttccgggtatggtttggcaggacagagatgtgtacctgcaaggacccatttgggccaaaattcctcacacggacggcaactttcacccttctccgctgatgggagggtttggaatgaagcacccgcctcctcagatcctcatcaaaaacacacctgtacctgcggatcctccaacggccttcaacaaggacaagctgaactctttcatcacccagtattctactggccaagtcagcgtggagatcgagtgggagctgcagaaggaaaacagcaagcgctggaacccggagatccagtacacttccaactattacaagtctaataatgttgaatttgctgttaatactgaaggtgtatatagtgaaccccgccccattggcaccagatacctgactcgtaatctgtaattgcttgttaatcaataaaccgtttaattcgtttcagttgaactgcggcc

SEQ ID NO: 586 - protein, 736 aa, Artificial Sequence
  Description of Artificial Sequence: Synthetic polypeptide
MTADGYLPDWLEDNLSEGIREWWALKPGAPQPKANQQHQDNARGLVLPGYKYLGPGNGLDKGEPVNAADAAALEHDKAYDQQLKAGDNPYLKYNHADAEFQERLKEDTSFGGNLGRAVFQAKKRLLEPLGLVEEAAKTAPGKKRPVEQSPQEPDSSAGIGKSGAQPAKKRLNFGQTGDTESVPDPQPIGEPPAAPSGVGSLTMASGGGAPVADNNEGADGVGSSSGNWHCDSQWLGDRVITTSTRTWALPTYNNHLYKQISNSTSGGSSNDNAYFGYSTPWGYFDFNRFHCHFSPRDWQRLINNNWGFRPKQLNFKLFNIQVKEVTDNNGVKTIANNLTSTVQVFTDSDYQLPYVLGSAHEGCLPPFPADVFMIPQYGYLTLNDGSQAVGRSSFYCLEYFPSQMLRTGNNFQFSYEFENVPFHSSYAHSQSLDRLMNPLIDQYLYYLSKTINGSGQNQQTLKFSVAGPSNMAVQGRNYIPGPSYRQQRVSTTVTQNNNSEFAWPGASSWALNGRNSLMNPGPAMASHKEGEDRFFPLSGSLIFGKQGTGRDNVDADKVMITNEEEIKTTNPVATESYGQVATNHQSAQAQAQTGWVQNQGILPGMVWQDRDVYLQGPIWAKIPHTDGNFHPSPLMGGFGMKHPPPQILIKNTPVPADPPTAFNKDKLNSFITQYSTGQVSVEIEWELQKENSKRWNPEIQYTSNYYKSNNVEFAVNTEGVYSEPRPIGTRYLTRNL

SEQ ID NO: 587 - protein, 736 aa, Artificial Sequence
  Description of Artificial Sequence: Synthetic polypeptide
MAADGYLPDWLEDNLSEGIREWWALKPGAPQPKANQQHQDNARGLVLPGYKYLGPGNGLDKGEPVNAADAAALEHDKAYDQQLKAGDNPYLKYNHADAEFQERLKEDTSFGGNLGRAVFQAKKRLLEPLGLVEEAAKTAPGKKRPVEQSPQEPDSSAGIGKSGAQPAKKRLNFGQTGDTESVPDPQPIGEPPAAPSGVGSLTMASGGGAPVADNNEGADGVGSSSGNWHCDSQWLGDRVITTSTRTWALPTYNNHLYKQISNSTSGGSSNDNAYFGYSTPWGYFDFNRFHCHFSPRDWQRLINNNWGFRPKRLNFKLFNIQVKEVTDNNGVKTIANNLTSTVQVFTDSDYQLPYVLGSAHEGCLPPFPADVFMIPQYGYLTLNDGSQAVGRSSFYCLEYFPSQMLRTGNNFQFSYEFENVPFHSSYAHSQSLDRLMNPLIDQYLYYLSKTINGSGQNQQTLKFSVAGPSNMAVQGRNYIPGPSYRQQRVSTTVTQNNNSEFAWPGASSWALNGRNSLMNPGPAMASHKEGEDRFFPLSGSLIFGKQGTGRDNVDADKVMITNEEEIKTTNPVATESYGQVATNHQSAQAQAQTGWVQNQGILPGMVWQDRDVYLQGPIWAKIPHTGGNFHPSPLMGGFGMKHPPPQILIKNTPVPADPPTAFNKDKLNSFITQYSTGQVSVEIEWELQKENSKRWNPEIQYTSNYYKSNNVEFAVNTGGVYSEPRPIGTRYLTRNL

SEQ ID NO: 588 - protein, 736 aa, Artificial Sequence
  Description of Artificial Sequence: Synthetic polypeptide
MAADGYLPDWLEDNLSEGIREWWALKPGAPQPKANQQHQDNARGLVLPGYKYLGPGNGLDKGEPVNAADAAALEHDKAYDQQLKAGDNPYLKYNHADAEFQERLKEDTSFGGNLGRAVFQAKKRLLEPLGLVEEAAKTAPGKKRPVEQSPQEPDSSAGIDKSGAQPAKKRLNFGQTGDTESVPDPQPIGEPPAAPSGVGSLTMASGGGAPVADNNEGADGVGSSSGNWHCDSQWLGDRVITTSTRTWALPTYNNHLYKQISNSTSGGSSNDNAYFGYSTPWGYFDFNRFHCHFSPRDWQRLINNNWGFRPKRLNFKLFNIQVKEVTDNNGVKTIANNLTSTVQVFTDSDYQLPYVLGSAHEGCLPPFPADVFMIPQYGYLTLNDGSQAVGRSSFYCLEYFPSQMLRTGNNFQFSYEFENVPFHSSYAHSQSLDRLMNPLIDQYLYYLSKTINGSGQNQQTLKFSVAGPSNMAVQGRNYIPGPSYRQQRVSTTVTQNNNSEFAWPGASSWALNGRNSLMNPGPAMASHKEGEDRFFPLSGSLIFGKQGTGRDNVDADKVMITNEEEIKTTNPVATESYGQVATNHQSAQAQAQTGWVQNQGILPGMVWQDRDVYLQGPIWAKIPHTDGNFHPSPLMGGFGMKHPPPQILIKNTPVPADPPTAFNKDKLNSFITQYSTGQVSVEIEWELQKENSKRWNPEIQYTSNYYKSNNVEFAVNTEGVYSEPRPIGTRYLTRNL

SEQ ID NO: 589 - protein, 736 aa, Artificial Sequence
  Description of Artificial Sequence: Synthetic polypeptide
MAADGYLPDWLEDNLSEGIREWWALKPGAPQPKANQQHQDNARGLVLPGYKYLGPGNGLDKGEPVNAADAAALEHDKAYDQQLKAGDNPYLKYNHADAEFQERLKEDTSFGGNLGRAVLQAKKRLLEPLGLVEEAAKTAPGKKRPVEQSPQEPDSSAGIGKSGAQPAKKRLNFGQTGDTESVPDPQPIGEPPAAPSGVGSLTMASGGGAPVADNNEGADGVGSSSGNWHCDSQWLGDRVITTSTRTWALPTYNNHLYKQISNSTSGGSSNDNAYFGYSTPWGYFDFNRFHCHFSPRDWQRLINNNWGFRPKRLNFKLFNIQVKEVTDNNGVKTIANNLTSTVQVFTDSDYQLPYVLGSAHEGCLPPFPADVFMIPQYGYLTLNDGSQAVGRSSFYCLEYFPSQMLRTGNNFQFSYEFENVPFHSSYAHSQSLDRLMNPLIDQYLYYLSKTINGSGQNQQTLKFSVAGSSNMAVQGRNYIPGPSYRQQRVSTTVTQNNNSEFAWPGASSWALNGRNSLMNPGPAMASHKEGEDRFFPLSGSLIFGKQGTGRDNVDADKVMITNEEEIKTTNPVATESYGQVATNHQSAQAQAQTGWVQNQGILPGMVWQDRDVYLQGPIWAKIPHTDGNFHPSPLMGGFGMKHPPPQILIKNTPVPADPPTAFNKDKLNSFITQYSTGQVSVEIEWELQKENSKRWNPEIQYTSNYYKSNNVEFAVNTEGVYSEPRPIGTRYLTRNL

SEQ ID NO: 590 - protein, 736 aa, Artificial Sequence
  Description of Artificial Sequence: Synthetic polypeptide
MAADGYLPDWLEDNLSEGIREWWALKPGAPQPKANQQHQDNARGLVLPGYKYLGPGNGLDKGEPVNAADAAALEHDRAYDQQLKAGDNPYLKYNHADAEFQERLKEDTSFGGNLGRAVFQAKKRLLEPLGLVEEAAKTAPGKKRPVEQSPQEPDSSAGIGKSGAQPAKKRLNFGQTGDTESVPDPQPIGEPPAAPSGVGSLTMASGGGAPVADNNEGADGVGSSSGNWHCDSQWLGDRVITTSTRTWALPTYNNHLYKQISNSTSGGSSNDNAYFGYSTPWGYFDFNRFHCHFSPRDWQRLINNNWGFRPKRLNFKLFNIQVKEVTDNNGVKTIANNLTSTVQVFTDSDYQLPYVLGSAHEGCLPPFPADVFMIPQYGYLTLNDGSQAVGRSSFYCLEYFPSQMLRTGNNFQFSYEFENVPFHSSYAHSQSLDRLMNPLIDQYLYYLSKTINGSGQNQQTLKFSVAGPSNMAVQGRNYIPGPSYRQQRVSTTVTQNNNSEFAWPGASSWALNGRNSLMNPGPAMASHKEGEDRFFPLSGSLIFGKQGTGRDNVDADKVMITNEEEIKTTNPVATESYGQVATNHQSAQAQAQTGWVQNQGILPGMVWQDRDVYLQGPIWAKIPHTDGNFHPSPLMGGFGMKHPPPQILIKNTPVPADPPTAFNKDKLNSFITQYSTGQVSVEIEWELQKKNSKRWNPEIQYTSNYYKSNNVEFAVNTEGVYSEPRPIGTRYLTRNL

SEQ ID NO: 591 - protein, 736 aa, Artificial Sequence
  Description of Artificial Sequence: Synthetic polypeptide
MAADGYLPDWLEDNLSEGIREWWALKPGAPQPKANQQHQDNARGLVLPGYKYLGPGNGLDKGEPVNAADAAALEHDKAYDQQLKAGDNPYLKYNHADAEFQERLKEDTSFGGNLGRAVFQAKKRLLEPLGLVEEAAKTAPGKKRPVEQSPQEPDSSAGIGKSGAQPAKKRLNFGQTGDTESVPDPQPIGEPPAAPSGVGSLTMASGGGAPVADNNEGADGVGSSSGNWHCDSQWLGDRVITTSTRTWALPTYNNHLYKQISNSTSGGSSNDNAYFGYSTPWGYFDFNRFHCHFSPRDWQRLINNNWGFRPKRLNFKLFNIQVKEVTDNNGVKTIANNLTSTVQVFTDSDYQLPYVLGSAHEGCLPPFPADVFMIPQYGYLTLNDGSQAVGRSSFYCLEYFPSQMLRTGNNFQFSYEFENVPFHSSYAHSQSLDRLMNPLIDQYLYYLSKTINGSGQNQQTLKFSVAGPSNMAVQGRNYIPGPSYRQQRVSTTVTQNNNSEFAWPGASSWALNGRNSLMNPGPAMASHKEGEDRFFPLSGSLIFGKQGTGRDNVDADKVMITNEEEIKTTNPVATESYGQVATNHQSAQARAQTGWVQNQGILPGMVWQDRDVYLQGPIWAKIPHTDGNFHPSPLMGGFGMKHPPPQILIKNTPVPADPPTAFNKDKLNSFITQYSTGQVSVEIEWELQKENSKRWNPEIQYTSNYYKSNNVEFAVNTEGVYSEPRPIGTRYLTRNL

SEQ ID NO: 592 - protein, 736 aa, Artificial Sequence
  Description of Artificial Sequence: Synthetic polypeptide
MAADGYLPDWLEDNLSEGIREWWALKPGAPQPKANQQHQDNARGLVLPGYKYLGPGNGLDKGEPVNAVDAAALEHDKAYDQQLKAGDNPYLKYNHADAEFQERLKEDTSFGGNLGRAVFQAKKRLLEPLGLVEEAAKTAPGKKRPVEQSPQEPDSSAGIGKSGAQPAKKRLNFGQTGDTESVPDPQPIGEPPAAPSGVGSLTMASGGGAPVADNNEGADGVGSSSGNWHCDSQWLGDRVITTSTRTWALPTYNNHLYKQISNSTSGGSSNDNAYFGYSTPWGYFDFNRFHCHFSPRDWQRLINNNWGFRPKRLNFKLFNIQVKEVTDNNGVKTIANNLTSTVQVFTDSDYQLPYVLGSAHEGCLPPFPADVFMIPQYGYLTLNDGSQAVGRSSFYCLEYFPSQMLRTGNNFQFSYEFENVPFHSSYAHSQSLDRLMNPLIDQYLYYLSKTINGSGQNQQTLKFSVAGPSNMAVQGRNYIPGPSYRQQRVSTTVTQNNNSEFAWPGASSWALNGRNSLMNPGPAMASHKEGEDRFFPLSGSLIFGKQGTGRDNVDADKVMITNEEEIKTTNPVATESYGQVATNHQSAQAQAQTGWVQNQGILPGMVWQDRDVYLQGPIWAKIPHTDGNFHPSPLMGGFGMKHPPPQILIKNTPVPADPPTAFNKDKLNSFITQYSTGQVSVEIEWELQKENSKRWNPEIQYTSNYYKSNNVEFAVNTEGVYSEPRPIGTRYLTRNL

SEQ ID NO: 593 - protein, 736 aa, Artificial Sequence
  Description of Artificial Sequence: Synthetic polypeptide
MAADGYLPDWLEDNLSEGIREWWALKPGAPQPKANQQHQDNARGLVLPGYKYLGPGNGLDKGEPVNAADAAALEHDKAYDQQLKAGDNPYLKYNHADAEFQERLKEDTSFGGNLGRAVFQAKKRLLEPLGLVEEAAKTAPGKKRPVEQSPREPDSSAGIGKSGAQPAKKRLNFGQTGDTESVPDPQPIGEPPAAPSGVGSLTMASGGGAPVADNNEGADGVGSSSGNWHCDSQWLGDRVITTSTRTWALPTYNNHLYKQISNSTSGGSSNDNAYFGYSTPWGYFDFNRFHCHFSPRDWQRLINNNWGFRPKRLNFKLFNIQVKEVTDNNGVKTIANNLTSTVQVFTDSDYQLPYVLGSAHEGCLPPFPADVFMIPQYGYLTLNDGSQAVGRSSFYCLEYFPSQMLRTGNNFQFSYEFENVPFHSSYAHSQSLDRLMNPLIDQYLYYLSKTINGSGQNQQTLKFSVAGPSNMAVQGRNYIPGPSYRQQRVSTTVTQNNNSEFAWPGASSWALNGRNSLMNPGPAMASHKEGEDRFFPLSGSLIFGKQGTGRDNVDADKVMITNEEEIKTTNPVATESYGQVATNHQSAQAQAQTGWVQNQGILPGMVWQDRDVYLQGPIWAKIPHTDGNFHPSPLMGGFGMKHPPPQILIKNTPVPADPPTAFNKDKLNSFITQYSTGQVSVEIEWELQKENSKRWNPEIQYTSNYYKSNNVEFAVNTEGVYSEPRPIGTRYLTRNL

SEQ ID NO: 594 - protein, 736 aa, Artificial Sequence
  Description of Artificial Sequence: Synthetic polypeptide
MAADGYLPDWLEDNLSEGIREWWALKPGAPQPKANQQHQDNARGLVLPGYKYLGPGNGLDKGEPVNAADAAALEHDKAYDQQLKAGDNPYLKYNHADAEFQERLKEDTSFGGNLGRAVFQAKKRLLEPLGLVEEAAKTAPGKKRPVEQSPQEPDSSAGIGKSGAQPAKKRLNFGQTGDTESVPDPQPIGEPPAAPSGVGSLTMASCGGAPVADNNEGADGVGSSSGNWHCDSQWLGDRVITTSTRTWALPTYNNHLYKQISNSTSGGSSNDNAYFGYSTPWGYFDFNRFHCHFSPRDWQRLINNNWGFRPKRLNFKLFNIQVKEVTDNNGVKTIANNLTSTVQVFTDSDYQLPYVLGSAHEGCLPPFPADVFMIPQYGYLTLNDGSQAVGRSSFYCLEYFPSQMLRTGNNFQFSYEFENVPFHSSYAHSQSLDRLMNPLIDQYLYYLSKTINGSGQNQQTLKFSVAGPSNMAVQGRNYIPGPSYRQQRVSTTVTQNNNSEFAWPGASSWALNGRNSLMNPGPAMASHKEGEDRFFPLSGSLIFGKQGTGRDNVDADKVMITNEEEIKTTNPVATESYGQVATNHQSAQAQAQTGWVQNQGILPGMVWQDRDVYLQGPIWAKIPHTDGNFHPSPLMGGFGMKHPPPQILIKNTPVPADPPTAFNKDKLNSFITQYSTGQVSVEIEWELQKENSKRWNPEIQYTSNYYKSNNVEFAVNTEGVYSEPRPIGTRYLTRNL

SEQ ID NO: 595 - protein, 736 aa, Artificial Sequence
  Description of Artificial Sequence: Synthetic polypeptide
MAADGYLPDWLEDNLSEGIREWWALKPGAPQPKANQQHQDNARGLVLPGYKYLGPGNGLDKGEPINAADAAALEHDKAYDQQLKAGDNPYLKYNHADAEFQERLKEDTSFGGNLGRAVFQAKKRLLEPLGLVEEAAKTAPGKKRPVEQSPQEPDSSAGIGKSGAQPAKKRLNFGQTGDTESVPDPQPIGEPPAAPSGVGSLTMASGGGAPVADNNEGADGVGSSSGNWHCDSQWLGDRVITTSTRTWALPTYNNHLYKQISNSTSGGSSNDNAYFGYSTPWGYFDFNRFHCHFSPRDWQRLINNNWGFRPKRLNFKLFNIQVKEVTDNNGVKTIANNLTSTVQVFTDSDYQLPYVLGSAHEGCLPPFPADVFMIPQYGYLTLNDGSQAVGRSSFYCLEYFPSQMLRTGNNFQFSYEFENVPFHSSYAHSQSLDRLMNPLIDQYLYYLSKTINGSGQNQQTLKFSVAGPSNMAVQGRNYIPGPSYRQQRVSTTVTQNNNSEFAWPGASSWALNGRNSLMNPGPAMASHKEGEDRFFPLSGSLIFGKQGTGRDNVDADKVMITNEEEIKTTNPVATESYGQVATNHQSAQAQAQTGWVQNQGILPGMVWQDRDVYLQGPIWAKIPHTYGNFHPSPLMGGFGMKHPPPQILIKNTPVPADPPTAFNKDKLNSFITQYSTGQVSVEIEWELQKENSKRWNPEIQYTSNYYKSNNVEFAVNTEGVYSEPRPIGTRYLTRNL

SEQ ID NO: 596 - protein, 736 aa, Artificial Sequence
  Description of Artificial Sequence: Synthetic polypeptide
MAADGYLPDWLEDNLSEGIREWWALKPGAPQPKANQQHQDNARGLVLPGYKYLGPGNGLDKGEPVNAADAAALEHDKAYDQQLKAGDNPYLKYNHADAEFQERLKEDTSFGGNLGRAVFQAKKRLLEPLGLVEEAAKTAPGKKRPVEQSPQEPDSSAGIGKSGAQPAKKRLNFGQTGDTESVPDPQPIGEPPAAPSGVGSLTMASGGGAPVADNNEGADGVGSSSGNWHCDSQWLGDRVITTSTRTWALPTYNNHLYKQISNSTSGGSSNDNAYFGYSTPWGYFDFNRFHCHFSPHDWQRLINNNWGFRPKRLNFKLFNIQVKEVTDNNGVKTIANNLTSTVQVFTDSDYQLPYVLGSAHEGCLPPFPADVFMIPQYGYLTLNDGSQAVGRSSFYCLEYFPSQMLRTGNNFQFSYEFENVPFHSSYAHSQSLDRLMNPLIDQYLYYLSKTINGSGQNQQTLKFNVAGPSNMAVQGRNYIPGPSYRQQRVSTTVTQNNNSEFAWPRASSWALNGRNSLMNPGPAMASHKEGEDRFFPLSGSLIFGKQGTGRDNVDADKVMITNEEEIKTTNPVATESYGQVATNHQSAQAQAQTGWVQNQGILPGMVWQDRDVYLQGPIWAKIPHTDGNFHPSPLMGGFGMKHPPPQILIKNTPVPADPPTAFNKDKLNSFITQYSTGQVSMEIEWELQKENSKRWNPEIQYTSNYYKSNNVEFAVNTEGVYSEPRPIGTRYLTRNL

SEQ ID NO: 597 - protein, 736 aa, Artificial Sequence
  Description of Artificial Sequence: Synthetic polypeptide
MAADGYLPDWLEDNLSEGIREWWALKPGAPQPKANQQHQDNARGLVLPGYKYLGPGNGLDKGEPVNAADAAALEHDKAYDQQLKAGDNPYLKYNHADAEFQERLKEDTSFGGNLGRAVFQAKKRLLEPLGLVEEAAKTAPGKKRPVEQSPQEPDSSAGIGKSGAQPAKKRLNFGQTGDTESVPDPQPIGEPPAAPSGVGSLTMASGGGAPVADNNEGADGVGSSSGNWHCDSQWLGDRVITTSTRTWALPTYNNHLYKQISNSTSGGSSNDNAYFGYSTPWGYFDFNRFHCHFSPRDWQRLINNNWGFRPKRLNFKLFNIQVKEVTDNNGVKTIANNLTSTVQVFTDSDYQLPYVLGSAHEGCLPPFPADVFMIPQYGYLTLNDGSQAVGRSSFYCLEYFPSQMLRTGNNFQFSYEFENVPFHSSYAHSQSLDRLMNPLIDQYLYYLSKTINGSGQNQQTLKFSVAGPSNMAVQGRNYIPGPSYRQQRVSTTVTQNNNSEFAWPRASSWALNGRNSLMNPGPAMASHKEGEDRFFPLSGSLIFGKQGTGRDNVDADKVMITNEEEIKTTNPVATESYGQVATNHQSAQAQAQTGWVQNQGILPGMVWQDRDVYLQGPIWAKIPHTDGNFHPSPLMGGFGMKHPPPQILIKNTPVPADPPTAFNKDKLNSFITQYSTGQVSVEIEWELQKENSKRWNPEIQYTSNYYKSNNVEFAVNTEGVYSEPRPIGTRYLTRNL

SEQ ID NO: 598 - protein, 736 aa, Artificial Sequence
  Description of Artificial Sequence: Synthetic polypeptide
MAADGYLPDWLEDNLSEGIREWWALKPGAPQPKANQQHQDNARGLVLPGYKYLGPGNGLDKGEPVNAADAAALEHDKAYDQQLKAGDNPYLKYNHADAEFQERLKEDTSFGGNLGRAVFQAKKRLLEPLGLVEEAAKTAPGKKRPVEQSPQEPDSSAGIGKSGAQPAKKRLNFGQTGDTESVPDPQPIGEPPAAPSGVGSLTMASGGGAPVADNNEGADGVGSSSGNWHCDSQWLGDRVITTSTRTWALPTYNNHLYKQISNSTSGGSSNDNAYFGYSTPWGYFDFNRFHCHFSPRDWQRLINNNWGFRPKRLNFKLFNIQVKEVTDNNGVKTIANNLTSTVQVFTDSDYQLPYVLGSAHEGCLPPFPADVFMIPQYGYLTLNDGSQAVGRSSFYCLEYFPSQMLRTGNNFQFSYEFENVPFHSSYAHSQSLDRLMNPLIDQYLYYLSKTINGSGQNQQTLKFSVAGPSNMAVQGRNYIPGPSYRQQRVSTTVTQNNNSEFAWPRASSWALNGRNSLMNPGPAMASHKEGEDRFFPLSGSLIFGKQGTGRDNVDADKVMITNEEEIKTTNPVATESYGQVATNHQSAQAQAQTGWVQNQGILPGMVWQDRDVYLQGPIWAKIPHTDGNFHPSPLMGGFGMKHPPPQILIKNTPVPADPPTAFNKDKLNSFITQYSTGQVSVEIEWERQKENSKRWNPEIQYTSNYYKSNNVEFAVNTEGVYSEPRPIGTRYLTRNL

SEQ ID NO: 599 - protein, 736 aa, Artificial Sequence
  Description of Artificial Sequence: Synthetic polypeptide
MAADGYLPDWLEDNLSEGIREWWALKPGAPQPKANQQHQDNARGLVLPGYKYLGPGNGLDKGEPVNAADAAALEHDKAYDQQLKAGDNPYLKYNHADAEFQERLKEDTSFGGNLGRAVFQAKKRLLEPLGLVEEAAKTAPGKKRPVEQSPQEPDSSAGIGKSGAQPAKKRLNFGQTGDTESVPDPQPIGEPPAAPSGVGSLTMASGGGAPVADNNEGADGVGSSSGNWHCDSQWLGDRVITTSTRTWALPTYNNHLYKQISNSTSGGSSNDNAYFGYSTPWGYFDFNRFHCHFSPRDWQRLINNNWGFRPKRLNFKLFNIQVKEVTDNNGVKTIANNLTSTVQVFADSDYQLPYVLGSAHEGCLPPFPADVFMIPQYGYLTLNDGSQAVGRSSFYCLEYFPSQMLRTGNNFQFSYEFENVPFHSSYAHSQSLDRLMNPLIDQYLYYLSKTINGSGQNQQTLKFSVAGPSNMAVQGRNYIPGPSYRQQRVSTTVTQNNNSEFAWPRASSWALNGRNSLMNPGPAMASHKEGEDRFFPLSGSLIFGKQGTGRDNVDADKVMITNEEEIKTTNPVATESYGQVATNHQSAQAQAQTGWVQNQGILPGMVWQDRDVYLQGPIWAKIPHTDGNFHPSPLMGGFGMKHPPPQILIKNTPVPADPPTAFNKDKLNSFITQYSTGQVSVEIEWELQKENSKRWNPEIQYTSNYYKSNNVEFAVNTEGVYSEPRPIGTRYLTRNL

SEQ ID NO: 600 - protein, 736 aa, Artificial Sequence
  Description of Artificial Sequence: Synthetic polypeptide
MAADGYLPDWLEDNLSEGIREWWALKPGAPQPKANQQHQDNARGLVLPGYKYLGPGNGLDKGEPVNAADAAALEHDKAYDQQLKAGDNPYLKYNHADAEFQERLKEDTSFGGNLGRAVFQAKKRLLEPLGLVEEAAKTAPGKKRPVEQSPQEPDSSAGIGKSGAQPAKKRLNFGQTGDTESVPDPQPIGEPPAAPSGVGSLTMASGGGAPVADNNEGADGVGSSSGNWHCDSQWLGDRVITTSTRTWALPTYNNHLYKQISNSTSGGSSNDNAYFGYSTPWGYFDFNRFHCHFSPRDWQRLINNNWGFRPKRLNFKLFNIQVKEVTDNNGVKTIANNLTSTVQVFTDSDYQLPYVLGSAHEGCLPPFPADVFMIPQYGYLTLNDGSQAVGRSSFYCLEYFPSQMLRTGNNFQFSYEFENVPFHSSYAHSQSLDRLMNPLIDQYLYYLSKTINGSGQNQQTLKFSVAGPSNMAVQGRNYIPGPSYRQQRVSTTVTQNNNSEIAWPRASSWALNGRNSLMNPGPAMASHKEGEDRFFPLSGSLIFGKQGTGRDNVDADKVMITNEEEIKTTNPVATESYGQVATNHQSAQAQAQTGWVQNQGILPGMVWQDRDVYLQGPIWAKIPHTDGNFHPSPLMGGFGMKHPPPQILIKNTPVPADPPTAFNKDKLNSFITQYSTGQVSVEIEWELQKENSKRWNPEIQYTSNYCKSNNVEFAVNTEGVYSEPRPIGTRYLTRNL

SEQ ID NO: 601 - protein, 736 aa, Artificial Sequence; identical to SEQ ID NO: 597
  Description of Artificial Sequence: Synthetic polypeptide

SEQ ID NO: 602 - DNA, 2208 bp, Artificial Sequence
  Description of Artificial Sequence: Synthetic polynucleotide
atggctgccgatggttatcttccagattggctcgaggacaaccttagtgaaggaattcgcgagtggtgggctttgaaacctggagcccctcaacccaaggcaaatcaacaacatcaagacaacgctcgaggtcttgtgcttccgggttacaaataccttggacccggcaacggactcgacaagggggagccggtcaacgcagcagacgcggcggccctcgagcacgacaaggcctacgaccagcagctcaaggccggagacaacccgtacctcaagtacaaccacgccgacgccgagttccaggagcggctcaaagaagatacgtcttttgggggcaacctcgggcgagcagtcttccaggccaaaaagaggcttcttgaacctcttggtctggttgaggaagcggctaagacggctcctggaaagaagaggcctgtagagcagtctcctcaggaaccggactcctccgcgggtattggcaaatcgggtgcacagcccgctaaaaagagactcaatttcggtcagactggcgacacagagtcagtcccagaccctcaaccaatcggagaacctcccgcagccccctcaggtgtgggatctcttacaatggcttcaggtggtggcgcaccagtggcagacaataacgaaggtgccgatggagtgggtagttcctcgggaaattggcattgcgattcccaatggctgggggacagagtcatcaccaccagcacccgaacctgggccctgcccacctacaacaatcacctctacaagcaaatctccaacagcacatctggaggatcttcaaatgacaacgcctacttcggctacagcaccccctgggggtattttgacttcaacagattccactgccacttctcaccacgtgactggcagcgactcatcaacaacaactggggattccggcctaagcgactcaacttcaagctcttcaacattcaggtcaaagaggttacggacaacaatggagtcaagaccatcgccaataaccttaccagcacggtccaggtcttcacggactcagactatcagctcccgtacgtgctcgggtcggctcacgagggctgcctcccgccgttcccagcggacgttttcatgattcctcagtacgggtatctgacgcttaatgatggaagccaggccgtgggtcgttcgtccttttactgcctggaatatttcccgtcgcaaatgctaagaacgggtaacaacttccagttcggctacgagtttgagaacgtacctttccatagcagctacgctcacagccaaagcctggaccgactaatgaatccactcatcgaccaatacttgtactatctctcaaagactattaacggttctggacagaatcaacaaacgctaaaattcagtgtggccggacccagcaacatggctgtccagggaagaaactacatacctggacccagctaccgacaacaacgtgtctcaaccactgtgactcaaaacaacaacagcgaatttgcttggcctggagcttcttcttgggctctcaatggacgtaatagcttgatgaatcctggacctgctatggccagccacaaagaaggagaggaccgtttctttcctttgtctggatctttaatttttggcaaacaaggaactggaagagacaacgtggatgcggacaaagtcatgataaccaacgaagaagaaattaaaactactaacccggtagcaacggagtcctatggacaagtggccacaaaccaccagagtgcccaagcacaggcgcagaccggctgggttcaaaaccaaggaatacttccgggtatggtttggcaggacagagatgtgtacctgcaaggacccatttgggccaaaattcctcacacggacggcaactttcacccttctccgctgatgggagggtttggaatgaagcacccgcctcctcagatcctcatcaaaaacacacctgtacctgcggatcctccaacggccttcaacaaggacaagctgaactctttcatcacccagtattctactggccaagtcagcgtggagatcgagtgggagctgcagaaggaaaacagcaagcgctgggacccggagatccagtacacttccaactattacaagtctaataatgttgaatttgctgttaatactgaaggtgtatatagtgaaccccgccccattggcaccagatacctgactcgtaatctg

SEQ ID NO: 603 - DNA, 2208 bp, Artificial Sequence
  Description of Artificial Sequence: Synthetic polynucleotide
atggctgccgatggttatcttccagattggctcgaggacaaccttagtgaaggaattcgcgagtggtgggctttgaaacctggagcccctcaacccaaggcaaatcaacaacatcaagacaacgctcgaggtcttgtgcttccgggttacaaataccttggacccggcaacggactcgacaagggggagccggtcaacgcagcagacgcggcggccctcgagcacgacaaggcctacgaccagcagctcaaggccggagacaacccgtacctcaagtacaaccacgccgacgccgagttccaggagcggctcaaagaagatacgtcttttgggggcaacctcgggcgagcagtcttccaggccaaaaagaggcttcttgaacctcttggtctggttgaggaagcggctaagacggctcctggaaagaagaggcctgtagagcagtctcctcaggaaccggactcctccgcgggtattggcaaatcgggtgcacagcccgctaaaaagagactcaatttcggtcagactggcgacacagagtcagtcccagaccctcaaccaatcggagaacctcccgcagccccctcaggtgtgggatctcttacaatggcttcaggtggtggcgcaccagtggcagacaataacgaaggtgccgatggagtgggtagttcctcgggaaattggcattgcgattcccaatggctgggggacagagtcatcaccaccagcacccgaacctgggccctgcccacctacaacaatcacctctacaagcaaatctccaacagcacatctggaggatcttcaaatgacaacgcctacttcggctacagcaccccctgggggtattttgacttcaacagattccactgccgcttctcaccacgtgactggcagcgactcatcaacaacaactggggattccggcctaagcgactcaacttcaagctcttcaacattcaggtcaaagaggttacggacaacaatggagtcaagaccatcgccaataaccttaccagcacggtccaggtcttcacggactcagactatcagctcccgtacgtgctcgggtcggctcacgagggctgcctcccgccgttcccagcggacgttttcatgattcctcagtacgggtatctgacgcttaatgatggaagccaggccgtgggtcgttcgtccttttactgcctggaatatttcccgtcgcaaatgctaagaacgggtaacaacttccagttcagctacgagtttgagaacgtacctttccatagcagctacgctcacagccaaagcctggaccgactaatgaatccactcatcgaccaatacttgtactatctctcaaagactattaacggttctggacagaatcaacaaacgctaaaattcagtgtggccggacccagcaacatggctgtccagggaagaaactacatacctggacccagctaccgacaacaacgtgtctcaaccactgtgactcaaaacaacaacagcgaatttgcttggcctggagcttcttcttgggctctcaatggacgtaatagcttgatgaatcctggacctgctatggccagccacaaagaaggagaggaccgtttctttcctttgtctggatctttaatttttggcaaacaaggaactggaagagacaacgtggatgcggacaaagtcatgataaccaacgaagaagaaattaaaactactaacccggtagcaacggagtcctatggacaagtggccacaaaccaccagagtgcccaagcacaggcgcagaccggctgggttcaaaaccaaggaatacttccgggtatggtttggcaggacagagatgtgtacctgcaaggacccatttgggccaaaattcctcacacggacggcaactttcacccttctccgctgatgggagggtttggaatgaagcacccgcctcctcagatcctcatcaaaaacgcccctgtacctgcggatcctccaacggccttcaacaaggacaagctgaactctttcatcacccagtattctactggccaagtcagcgtggagatcgagtgggagctgcagaaggaaaacagcaagcgctggaacccggagatccagtacacttccaactattacaagtctaataatgttgaatttgctgttaatactgaaggtgtatatagtgaaccccgccccattggcaccagatacctgactcgtaatctg

SEQ ID NO: 604 - DNA, 2208 bp, Artificial Sequence
  Description of Artificial Sequence: Synthetic polynucleotide
atggctgccgatggttatcttccagattggctcgaggacaaccttagtgaaggaattcgcgagtggtgggctttgaaacctggagcccctcaacccaaggcaaatcaacaacatcaagacaacgctcgaggtcttgtgcttccgggttacaaataccttggacccggcaacggactcgacaagggggagccggtcagcgcagcagacgcggcggccctcgagcacgacaaggcctacgaccagcagctcaaggccggagacaacccgtacctcaagtacaaccacgccgacgccgagttccaggagcggctcaaagaagatacgtcttttgggggcaacctcgggcgagcagtcttccaggccaaaaagaggcttcttgaacctcttggtctggttgaggaagcggctaagacggctcctggaaagaagaggcctgtagagcagtctcctcaggaaccggactcctccgcgggtattggcaaatcgggtgcacagcccgctaaaaagagactcaatttcggtcagactggcgacacagagtcagtcccagaccctcaaccaatcggagaacctcccgcagccccctcaggtgtgggatctcttacaatggcttcaggtggtggcgcaccagtggcagacaataacgaaggtgccgatggagtgggtagttcctcgggaaattggcattgcgattcccaatggctgggggacagagtcatcaccaccagcacccgaacctgggccctgcccacctacaacaatcacctctacaagcaaatctccaacagcacatctggaggatcttcaaatgacaacgcctacttcggctacagcaccccctgggggtattttgacttcaacagattccactgccacttctcaccgcgtgactggcagcgactcatcaacaacaactggggattccggcctaagcgactcaacttcaagctcttcaacattcaggtcaaagaggttacggacaacaatggagtcaagaccatcgccaataaccttaccagcacggtccaggtcttcacggactcagactatcagctcccgtacgtgctcgggtcggctcacgagggctgcctcccgccgttcccagcggacgttttcatgattcctcagtacgggtatctgacgcttaatgatggaagccaggccgtgggtcgttcgtccttttactgcctggaatatttcccgtcgcaaatgctaagaacgggtaacaacttccagttcagctacgagtttgagaacgtacctttccatagcagctacgctcacagccaaagcctggaccgactaatgaatccactcatcgaccaatacttgtactatctctcaaagactattaacggttctggacagaatcaacaaacgctaaaattcagtgtggccggacccagcaacatggctgtccagggaagaaactacatacctggacccagctaccgacaacaacgtgtctcaaccactgtgactcaaaacaacaacagcgaatttgcttggcctggagcttcttcttgggctctcaatggacgtaatagcttgatgaatcctggacctgctatggccagccacaaagaaggagaggaccgtttctttcctttgtctggatctttaatttttggcaaacaaggaactggaagagacaacgtggatgcggacaaagtcatgataaccaacgaagaagaaattaaaactactaacccggtagcaacggagtcctatggacaagtggccacaaaccaccagagtgcccaagcacaggcgcagaccggctgggttcaaaaccaaggaatacttccgggtatggtttggcaggacagagatgtgtacctgcaaggacccatttgggccaaaattcctcacacggacggcaactttcacccttctccgctgatgggagggtttggaatgaagcacccgcctcctcagatcctcatcaaaaacacacctgtacctgcggatcctccaacggccttcaacaaggacaagctgaactctttcatcacccagtattctactggccaagtcagcgtggagatcgagtgggagctgcagaaggaaaacagcaagcgctggaacccggagatccagtacacttccaactattacaagtctaataatgttgaatttgctgttaatactgaaggtgtatatagtgaaccccgccccattggcaccagatacctgactcgtaatctg

SEQ ID NO: 605 - DNA, 2208 bp, Artificial Sequence
  Description of Artificial Sequence: Synthetic polynucleotide
atggctgccgatggttatcttccagattggctcgaggacaaccttagtgaaggaattcgcgagtggtgggctttgaaacctggagcccctcaacccaaggcaaatcaacaacatcaagacaacgctcgaggtcttgtgcttccgggttacaaataccttggacccggcaacggactcgacaagggggagccggtcaacgcagcagacgcggcggccctcgagcacgacaaggcctacgaccagcagctcaaggccggagacaacccgtacctcaagtacaaccacgccgacgccgagttccaggagcggctcaaagaagatacgtcttttgggggcaacctcgggcgagcagtcttccaggccaaaaagaggcttcttgaacctcttggtctggttgaggaagcggctaagacggctcctggaaagaagaggcctgtagagcagtctcctcaggaaccggactcctccgcgggtattggcaaatcgggtgcacagcccgctaaaaagagactcaatttcggtcagactggcgacacagagtcagtcccagaccctcaaccaatcggagaacctcccgcagccccctcaggtgtgggatctcttacaatggcttcaggtggtggcgcaccagtggcagacaataacgaaggtgccgatggagtgggtagttcctcgggaaattggcattgcgattcccaatggctgggggacagagtcatcaccaccagcacccgaacctgggccctgcccacctacaacaatcacctctacaagcaaatctccaacagcacatctggaggatcttcaaatgacaacgcctacttcggctacagcaccccctgggggtattttgacttcaacagattccactgccacttctcaccacgtgactggcagcgactcatcaacaacaactggggattccggcctaagcgactcaacttcaagctcttcaacattcaggtcaaagaggttacggacaacaatggagtcaagaccatcgccaataaccttaccagcacggtccaggtcttcacggactcagactatcagctcccgtacgtgctcgggtcggctcacgagggctgcctcccgccgttcccagcggacgttttcatgattcctcagtacgggtatctgacgcttaatgatggaagccaggccgtgggtcgttcgtccttttactgcctggaatatttcccgtcgcaaatgctaagaacgggtaacaacttccagttcagctacgagtttgagaacgtacctttccatagcagctacgctcacagccaaagcctggaccgactaatgaatccactcatcgaccaatacttgtactatctctcaaagactattaacggttctggacagaatcaacaaacgctaaaattcagtgtggccggacccagcaacacggctgtccagggaagaaactacatacctggacccagctaccgacaacaacgtgtctcaaccactgtgactcaaaacaacaacagcgaatttgcttggcctggagcttcttcttgggctctcaatggacgtaatagcttgatgaatcctggacctgctatggccagccacaaagaaggagaggaccgtttctttcctttgtctggatctttaatttttggcaaacaaggaactggaagagacaacgtggatgcggacaaagtcatgataaccaacgaagaagaaattaaaactactaacccggtagcaacggagtcctatggacaagtggccacaaaccaccagagtgcccaagcacaggcgcagaccggctgggttcaaaaccaaggaatacttccgggtatggtttggcaggacagagatgtgtacctgcaaggacccatttgggccaaaattcctcacacggacggcaactttcacccttctccgctgatgggagggtttggaatgaagcacccgcctcctcagatcctcatcaaaaacacacctgtacctgcggatcctccaacggccttcaacaaggacaagctgaactctttcatcacccagtattctactggccaagtcagcgtggagatcgagtgggagctgcagaaggaaaacagcaagcgctggaacccggagatccagtacacttccaactattacaagtctaataatgttgaatttgctgttaatactgaaggtgtatatagtgaaccccgccccattggcaccagatacctgactcgtaatctg

SEQ ID NO: 606 - DNA, 2208 bp, Artificial Sequence
  Description of Artificial Sequence: Synthetic polynucleotide
atggctgccgatggttatcttccagattggctcgaggacaaccttagtgaaggaattcgcgagtggtgggctttgaaacctggagcccctcaacccaaggcaaatcaacaacatcaagacaacgctcgaggtcttgtgcttccgggttacaaataccttggacccggcaacggactcgacaagggggagccggtcaacgcagcagacgcggcggccctcgagcacgacaaggcctacgaccagcagctcaaggccggagacaacccgtacctcaagtacaaccacgccgacgccgagttccaggagcggctcaaagaagatacgtcttttgggggcaacctcgggcgagcagtcttccaggccaaaaagaggcttcttgaacctcttggtctggttgaggaagcggctaagacggctcctggaaagaagaggcctgtagagcagtctcctcaggaaccggactcctccgcgggtattggcaaatcgggtgcacagcccgctaaaaagagactcaatttcggtcagactggcgacacagagtcagtcccagaccctcaaccaatcggagaacctcccgcagccccctcaggtgtgggatctcttacaatggcttcaggtggtggcgcaccagtggcagacaataacgaaggtgccgatggagtgggtagttcctcgggaaattggcattgcgattcccaatggctgggggacagagtcatcaccaccagcacccgaacctgggccctgcccacctacaacaatcacctctacaagcaaatctccaacagcacatctggaggatcttcaaatgacaacgcctacttcggctacagcaccccctgggggtattttgacttcaacagattccactgccacttctcaccacgtgactggcagcgactcatcaacaacaactggggattccggcctaagcggctcaacttcaagctcttcaacattcaggtcaaagaggttacggacaacaatggagtcaagaccatcgccaataaccttaccagcacggtccaggtcttcacggactcagactatcagctcccgtacgtgctcgggtcggctcacgagggctgcctcccgccgttcccagcggacgttttcatgattcctcagtacgggtatctgacgcttaatgatggaagccaggccgtgggtcgttcgtccttttactgcctggaatatttcccgtcgcaaatgctaagaacgggtagcaacttccagttcagctacgagtttgagaacgtacctttccatagcagctacgctcacagccaaagcctggaccgactaatgaatccactcatcgaccaatacttgtactatctctcaaagactattaacggttctggacagaatcaacaaacgctaaaattcagtgtggccggacccagcaacatggctgtccagggaagaaactacatacctggacccagctaccgacaacaacgtgtctcaaccactgtgactcaaaacaacaacagcgaatttgcttggcctggagcttcttcttgggctctcaatggacgtaatagcttgatgaatcctggacctgctatggccagccacaaagaaggagaggaccgtttctttcctttgtctggatctttaatttttggcaaacaaggaactggaagagacaacgtggatgcggacaaagtcatgataaccaacgaagaagaaattaaaactactaacccggcagcaacggagtcctatggacaagtggccacaaaccaccagagtgcccaagcacaggcgcagaccggctgggttcaaaaccaaggaatacttccgggtatggtttggcaggacagagatgtgtacctgcaaggacccatttgggccaaaattcctcacacggacggcaactttcacccttctccgctgatgggagggtttggaatgaagcacccgcctcctcagatcctcatcaaaaacacacctgtacctgcggatcctccaacggccttcaacaaggacaagctgaactctttcatcacccagtattctactggccaagtcagcgtggagatcgagtgggagctgcagaaggaaaacagcaagcgctggaacccggagatccagcacacttccaactattacaagtctaataatgttgaatttgctgttaatactgaaggtgtatatagtgaaccccgccccattggcaccagatacctgactcgtaatctg

SEQ ID NO: 607 - DNA, 2208 bp, Artificial Sequence
  Description of Artificial Sequence: Synthetic polynucleotide
atggctgccgatggttatcttccagattggctcgaggacaaccttagtgaaggaattcgcgagtggtgggctttgaaacctggagcccctcaacccaaggcaaatcaacaacatcaagacaacgctcgaggtcttgtgcttccgggttacaaataccttggacccggcaacggactcgacaagggggagccggtcaacgcagcagacgcggcggccctcgagcacgacaaggcctacgaccagcagctcaaggccggagacaacccgtacctcaagtacaaccacgccgacgccgagttccaggagcggctcaaagaagatacgtcttttgggggcaacctcgggcgagcagtcttccaggccaaaaagaggcttcttgaacctcttggtctggttgaggaagcggctaagacggctcctggaaagaagaggcctgtagagcagtctcctcaggaaccggactcctccgcgggtattggcaaatcgggtgcacagcccgctaaaaagagactcaatttcggtcagactggcgacacagagtcagtcccagaccctcaaccaatcggagaacctcccgcagccccctcaggtgtgggatctcttacaatggcttcaggtggtggcgcaccagtggcagacaataacgaaggtgccgatggagtgggtagttcctcgggaaattggcattgcgattcccaatggctgggggacagagtcatcaccaccagcacccgaacctgggccctgcccacctacaacaatcacctctacaagcaaatctccaacagcacatctggaggatcttcaaatgacaacgcctacttcggctacagcaccccctgggggtattttgacttcaacagattccactgccacttctcaccacgtgactggcagcgactcatcaacaacaactggggattccggcctaagcgactcaacttcaggctcttcaacattcaggtcaaagaggttacggacaacaatggagtcaagaccatcgccaataaccttaccagcacggtccaggtcttcacggactcagactatcagctcccgtacgtgctcgggtcggctcacgagggctgcctcccgccgttcccagcggacgttttcatgattcctcagtacgggtatctgacgcttaatgatggaagccaggccgtgggtcgttcgtccttttactgcctggaatatttcccgtcgcaaatgctaagaacgggtaacaacttccagttcagctacgagtttgagaacgtacctttccatagcagctacgctcacagccaaagcctggaccgactaatgaatccactcatcgaccaatacttgtactatctctcaaagactattaacggttctggacagaatcaacaaacgctaaaattcagtgtggccggacccagcaacatggctgtccagggaagaaactacatacctggacccagctaccgacaacaacgtgtctcaaccactgtgactcaaaacaacaacagcgaatttgcttggcctggagcttcttcttgggctctcaatggacgtaatagcttgatgaatcctggacctgctatggccagccacaaagaaggagaggaccgtttctttcctttgtctggatctttaatttttggcaaacaaggaactggaagagacaacgtggatgcggacaaagtcatgataaccaacgaagaagaaattaaaactactaacccggtagcaacggagtcctatggacaagtggccacaaaccaccagagtgcccaagcacaggcgcagaccggctgggttcaaagccaaggaatacttccgggtatggtttggcaggacagagatgtgtacctgcaaggacccatttgggccaaaattcctcacacggacggcaactttcacccttctccgctgatgggagggtttggaatgaagcacccgcctccccagatcctcatcaaaaacacacctgtacctgcggatcctccaacggccttcaacaaggacaagctgaactctttcatcacccagtattctactggccaagtcagcgtggagatcgagtgggagctgcagaaggaaaacagcaagcgctggaacccggagatccagtacacttccaactattacaagtctaataatgttgaatttgctgttaatactgaaggtgtatatagtgaaccccgccccattggcaccagatacctgactcgtaatctg

SEQ ID NO: 608 - DNA, 2205 bp, Artificial Sequence
  Description of Artificial Sequence: Synthetic polynucleotide
atggctgccgatggttatcttccagattggctcgaggacaaccttagtgaaggaattcgcgagtggtgggctttgaaacctggagcccctcaacccaaggcaaatcaacaacatcaagacaacgcccgaggtcttgtgcttccgggttacaaataccttggacccggcaacggactcgacaagggggagccggtcaacgcagcagacgcggcggccctcgagcacgacaaggcctacgaccagcagctcaaggccggagacaacccgtacctcaagtacaaccacgccgacgccgagttccaggagcggctcaaagaagatacgtcttttgggggcaacctcgggcgagcagtcttccaggccaaaaagaggcttcttgaacctcttggtctggttgaggaagcggctaagacggctcctggaaagaagaggcctgtagagcagtctcctcaggaaccggactcctccgcgggtattggcaaatcgggtgcacagcccgctaaaaagagactcaatttcggtcagactggcgacacagagtcagtcccagaccctcaaccaatcggagaacctcccgcagccccctcaggtgtgggatctcttacaatggcttcaggtggtggcgcaccagtggcagacaataacgaaggtgccgatggagtgggtagttcctcgggaaattggcattgcgattcccaatggctgggggacagagtcatcaccaccagcacccgaacctgggccctgcccacctacaacaatcacctctacaagcaaatctccaacagcacatctggaggatcttcaaatgacaacgcctacttcggctacagcaccccctggaggtattttgacttcaacagattccactgccacttctcaccacgtgactggcagcgactcatcaacaactggggattccggcctaagcgactcaacttcaagctcttcaacattcaggtcaaagaggttacggacaacaatggagtcaagaccatcgccaataaccttaccagcacggtccaggccttcacggactcagactatcagctcccgtacgtgctcgggtcggctcacgagggctgcctcccgccgttcccagcggacgttttcatgattcctcagtacgggtatctgacgcttaatgatggaagccaggccgtgggtcgttcgtccttttactgcctggaatatttcccgtcgcaaatgctaagaacgggtaacaacttccagttcagctacgagtttgagaacgtacctttccatagcagctacgctcacagccaaagcctggaccgactaatgaatccactcatcgaccaatacttgtactatctctcaaagactattaacggttctggacagaatcaacaaacgctaaaattcagtgtggccggacccagcaacatggctgtccagggaagaaactacatacctggacccagctaccgacaacaacgtgtctcaaccactgtgactcaaaacaacaacagcgaatttgcttggcctggagcttcttcttgggctctcaatggacgtaatagcttgatgaatcctggacctgctatggccagccacaaagaaggagaggaccgtttctttcctttgtctggatctttaatttttggcaaacaaggaactggaagagacaacgtggatgcggacaaagtcatgataaccaacgaagaagaaattaaaactactaacccggtagcaacggagtcctatggacaagtggccacaaaccaccagagtgcccaagcacaggcgcagaccggctgggttcaaaaccaaggaatacttccgggtatggtttggcaggacagagatgtgtacctgcaaggacccatttgggccaaaattcctcacacggacggcaactttcacccttctccgctgatgggagggtttggaatgaagcacccgcctcctcagatcctcatcaaaaacacacctgtacctgcggatcctccaacggccttcaacaaggacgagctgaactctttcatcacccagtattctactggccaagtcagcgtggagatcgagtgggagctgcagaaggaaaacagcaagcgctggaacccggagatccagtacacttccaactattacaagtctaataatgttgaatttgctgttaatactgaaggtgtatatagtgaaccccgccccattggcaccagatacctgactcgtaatctg

SEQ ID NO: 609 - DNA, 2205 bp, Artificial Sequence
  Description of Artificial Sequence: Synthetic polynucleotide
atggctgccgatggttatcttccagattggctcgaggacaaccttagtgaaggaattcgcgagtggtgggctttgaaacctggagcccctcaacccaaggcaaatcaacaacatcaagacaacgctcgaggtcttgtgcttccgggttacaaataccttggacccggcaacggactcgacaagggggagccggtcaacgcagcagacgcggcggccctcgagcacgacaaggcctacgaccagcagctcaaggccggagacaacccgtacctcaagtacaaccacgccgacgccgagttccaggagcggctcaaagaagatacgtcttttgggggcaacctcgggcgagcagtcttccaggacaaaaagaggcttcttgaacctcttggtctggttgaggaagcggctaagacggctcctggaaagaagaggcctgtagagcagtctcctcaggaaccggactcctccgcgggtattggcaaatcgggtgcacagcccgctaaaaagagactcaatttcggtcagactggcgacacagagtcagtcccagaccctcaaccaatcggagaacctcccgcagccccctcaggtgtgggatctcttacaatggcttcaggtggtggcgcaccagtggcagacaataacgaaggtgccgatggagtgggtagttcctcgggaaattggcattgcgattcccaatggctgggggacagagtcatcaccaccagcacccgaacctgggccctgcccacctacaacaatcacctctacaagcaaatctccaacagcacatctggaggatcttcaaatgacaacgcctacttcggctacagcaccccctgggggtattttgacttcaacagattccactgccacttctcaccacgtgactggcagcgactcatcaacaactggggattccggcctaagcgactcaacttcaagctcttcaacattcaggtcaaagaggttacggacaacaatggagtcaagaccatcgccaataaccttaccagcacggtccaggtcttcacggactcagactatcagctcccgtacgtgctcgggtcggctcacgagggctgcctcccgccgttcccagcggacgttttcatgattcctcagtacgggtatctgacgcttaatgatggaagccaggccgtgggtcgttcgtccttttactgcctggaatatttcccgtcgcaaatgctaagaacgggtaacaacttccaattcagctacgagtttgagaacgtacctttccatagcagctacgctcacagccaaagcctggaccgactaatgaatccactcatcgaccaatacttgtactatctctcaaagactattaacggttctggacagaatcaacaaacgctaaaattcagtgtggccggacccagcaacatggctgtccagggaagaaactacatacctggacccagctaccgacaacaacgtgtctcaaccactgtgactcaaaacaacaacagcgaatttgcttggcctggagcttcttcttgggctctcaatggacgtaatagcttgatgaatcctggacctgctatggccagccacaaagaaggagaggaccgtttctttcctttgtctggatctttaatttttggcaaacaaggaactggaagagacaacgtggatgcggacaaagtcatgataaccaacgaagaagaaattaaaactactaacccggtagcaacggagtcctatggacaagtggccacaaaccaccagagtgcccaagcacaggcgcagaccggctgggttcaaaaccaaggaatacttccgggtatggtttggcaggacagagatgtgtacctgcaaggacccatttgggccaaaattcctcacacggacggcaactttcacccttctccgctgatgggagggtttggaatgaagcacccgcctcctcagatcctcatcaaaaacacacctgtacctgcggatcctccaacggccttcaacaaggacaagctgaactctttcatcacccagtattctactggccaagtcagcgtggagatcgagtgggagctgcagaaggaaaacagcaagcgctggaacccggagatccagtacacttccaactattacaagtctaataatgttgaatttgctgttaatactgaaggtgtatatagtgaaccccgccccattggcaccagatacctgactcgtaatctg

SEQ ID NO: 610 - DNA, 2208 bp, Artificial Sequence
  Description of Artificial Sequence: Synthetic polynucleotide
atggctgccgatggttatcttccagattggctcgaggacaaccttagtgaaggaattcgcgagtggtgggctttgaaacctggagcccctcaacccaaggcaaatcaacaacatcaagacaacgctcgaggtcttgtgcttccgggttacaaataccttggacccggcaacggactcgacaagggggagccggtcaacgcagcagacgcggcggccctcgagcacgacaaggcctacgaccagcagctcaaggccggagacaacccgtacctcaagtacaaccacgccgacgccgagttccaggagcggctcaaagaagatacgtcttttgggggcaacctcgggcgagcagtcttccaggccaaaaagaggcttcttgaacctcttggtctggttgaggaagcggctaagacggctcctggaaagaagaggcctgtagagcagtctcctcaggaaccggactcctccgcgggtattggcaaatcgggtgcacagcccgctaaaaagagactcaatttcggtcagactggcgacacagagtcagtcccagaccctcaaccaatcggagaacctcccgcagccccctcaggtgtgggatctcttacaatggcttcaggtggtggcgcaccagtggcagacaataacgaaggtgccgatggagtgggtagttcctcgggaaattggcattgcgattcccaatggctgggggacagagccatcaccaccagcacccgaacctgggccctgcccacctacaacaatcacctctacaagcaaatctccaacagcacatctggaggatcttcaaatgacaacgcctacttcggctacagcaccccctgggggtattttgacttcaacagattccactgccacttctcaccacgtgactggcagcggctcatcaacaacaactggggattccggcctaagcgactcaacttcaagctcttcaacattcaggtcaaagaggttacggacaacaatggagtcaagaccatcgccaataaccttaccagcacggtccaggtcttcacggactcagactatcagctcccgtacgtgctcgggtcggctcacgagggctgcctcccgccgttcccagcggacgttttcatgattcctcagtacgggtatctgacgcttaatgatggaagccaggccgtgggtcgttcgtccttttactgcctggaatatttcccgtcgcaaatgctaagaacgggtaacaacttccagttcagctacgagtttgagaacgtacctttccatagcagctacgctcacagccaaagcctggaccgactaatgaatccactcatcgaccaatacttgtactatctctcaaagactattaacggttctggacagaatcaacaaacgctaaaattcagtgtggccggacccagcaacatggctgtccagggaagaaactacatacctggacccagctaccgacaacaacgtgtctcaaccactgtgactcaaaacaacaacagcgaatttgcttggcctggagcttcttcttgggctctcaatggacgtaatagcttgatgaatcctggacctgctatggccagccacaaagaaggagaggaccgtttctttcctttgtctggatctttaatttttggcaaacaaggaactggaagagacaacgtggatgcggacaaagtcatgacaaccaacgaagaagaaattaaaactactaacccggtagcaacggagtcctatggacaagtggccacaaaccaccagagtgcccaagcacaggcgcagaccggctgggttcaaaaccaaggaatacttccgggtatggtttggcaggacagagatgtgtacctgcaaggacccatttgggccaaaattcctcacacggacggcaactttcacccttctccgctgatgggagggtttggaatgaagcacccgcctcctcagatcctcatcaaaaacacacctgtacctgcggatcctccaacggccttcaacaaggacaagctgaactctttcatcacccagtattctactggccaagtcagcgtggagatcgagtgggagctgcagaaggaaaacagcaagcgctggaacccggagatccagtacacttccaactattacaagtctaataatgttgaatttgctgttaatactgaaggtgtatatagtgaaccccgccccattggcaccagatacctgactcgtaatctg

SEQ ID NO: 611 - DNA, 2208 bp, Artificial Sequence
  Description of Artificial Sequence: Synthetic polynucleotide
atggctgccgatggttatcttccagattggctcgaggacaaccttagtgaaggaattcgcgagtggtgggctttgaaacctggagcccctcaacccaaggcaaatcaacaacatcaagacaacgctcgaggtcttgtgcttccgggttacaaataccttggacccggcaacggactcgacaagggggagccggtcaatgcagcagacgcggcggccctcgagcacgacaaggcctacgaccagcagctcaaggccggagacaacccgtacctcaagtacaaccacgccgacgccgagttccaggagcggctcaaagaagatacgtcttttgggggcaacctcgggcgagcagtcttccagaccaaaaagaggcttcttgaacctcttggtctggttgaggaagcggctaagacggctcctggaaagaagaggcctgtagagcagtctcctcaggaaccgggctcctccgcgggtattggcaaatcgggtgcacagcccgctaaaaagagactcaatttcggtcagactggcgacacagagtcagtcccagaccctcaaccaatcggagaacctcccgcagccccctcaggtgtgggatctcttacaatggcttcaggtggtggcgcaccagtggcagacaataacgaaggtgccgatggagtgggtagttcctcgggaaattggcattgcgattcccaatggctgggggacagagtcatcaccaccagcacccgaacctgggccctgcccacctacaacaatcacctctacaagcaaatctccaacagcacatctggaggatcttcaaatgacaacgcctacttcggctacagcaccccctgggggtattttgacttcaacagattccactgccacttctcaccacgtgactggcagcgactcatcaacaacaactggggattccggcctaagcgactcaacttcaagctcttcaacattcaggtcaaagaggttacggacaacaatggagtcaagaccatcgccaataaccttaccagcacggtccaggtcttcacggactcagactatcagctcccgtacgtgctcgggtcggctcacgagggctgcctcccgccgttcccagcggacgttttcatgattcctcagtacgggtatctgacgcttaatgatggaagccaggccgtgggtcgttcgtccttttactgcctggaatatttcccgtcgcaaatgctaagaacgggtaacaacttccagttcagctacgagtttgagaacgtacctttccatagcagctacgctcacagccaaagcctggaccgactaatgaatccactcatcgaccaatacttgcactatctctcaaagactattaacggttctggacagaatcaacaaacgctaaaattcagtgtggccggacccagcaacatggctgtccagggaagaaactacatacctggacccagctaccgacaacaacgtgtctcaaccactgtgactcaaaacaacaacagcgaatttgcttggcctggagcttcttcttgggctctcaatggacgtaatagcttgatgaatcctggacctgctatggccagccacaaagaaggagaggaccgtttctttcctttgtctggatctttaatttttggcaaacaaggaactggaagagacaacgtggatgcggacaaagtcatgataaccaacgaagaagaaattaaaactactaacccggtagcaacggagtcctatggacaagtggccacaaaccaccagagtgcccaagcacaggcgcagaccggctgggttcaaaaccaaggaatacttccgggtatggtttggcaggacagagatgtgtacctgcaaggacccatttgggccaaaattcctcacacggacggcaactttcacccttctccgctgatgggagggtttggaatgaagcacccgcctcctcagatcctcatcaaaaacacacctgtacctgcggatcctccaacggccttcaacaaggacaagctgaactctttcatcacccagtattctactggccaagtcagcgtggagatcgagtgggagctgcagaaggaaaacagcaagcgctggaacccggagatccagtacacttccaactattacaagtctaataatgttgaatttgctgttaatactgaaggtgtatatagtgaaccccgccccattggcaccagatacctgactcgtaatctg

SEQ ID NO: 612 - DNA, 2208 bp, Artificial Sequence
  Description of Artificial Sequence: Synthetic polynucleotide
atggctgccgatggttattttccagattggctcgaggacaaccttagtgaaggaattcgcgagtggtgggctttgaaacctggagcccctcaacccaaggcaaatcaacaacatcaagacaacgctcgaggtcttgtgcttccgggttacaaataccttggacccggcaacggactcgacaagggggagccggtcaacgcagcagacgcggcggccctcgagcacgacaaggcctacgaccagcagctcaaggccggagacaacccgtacctcaagtacaaccacgccgacgccgagttccaggagcggctcaaagaagatacgtcttttgggggcaacctcgggcgagcagtcttccaggccaaaaagaggcttcttgaacctcttggtctggttgaggaagcggctaagacggctcctggaaagaagaggcctgtagagcagtctcctcaggaaccggactcctccgcgggtattggcaaatcgggtgcacagcccgctaaaaagagactcaatttcggtcagactggcgacacagagtcagtcccagaccctcaaccaatcggagaatctcccgcagccccctcaggtgtgggatctcttacaatggcttcaggtggtggcgcaccagtggcagacaataacgaaggtgccgatggagtgggtagttcctcgggaaattggcattgcgattcccaatggctgggggacagagtcatcaccaccagcacccgaacctgggccctgcccacctacaacaatcacctctacaagcaaatctccaacagcacatctggaggatcttcaaatgacaacgcctacttcggctacagcaccccctgggggtattttgacttcaacagattccactgccacttctcaccacgtgactggcagcgactcatcaacaacaactggggattccggcctaagcgactcaacttcaagctcttcaacattcaggtcaaagaggttacggacaacaatggagtcaagaccatcgccaataaccttaccagcacggtccaggtcttcacggactcagactatcagctcccgtacgtgctcgggtcggctcacgagggctgcctcccgccgttcccagcggacgttttcatgattcctcagtacgggtatctgacgcttaatgatggaagccaggccgtgggtcgttcgtccttttactgcctggaatatctcccgtcgcaaatgctaagaacgggtaacaacttccagttcagctacgagtttgagaacgtacctttccatagcagctacgctcacagccaaagcctggaccgactaatgaatccactcatcgaccaatacttgcactatctctcaaagactattaacggttctggacagaatcaacaaacgctaaaattcagtgtggccggacccagcaacatggctgtccagggaagaaactacatacctggacccagctaccgacaacaacgtgtctcaaccactgtgactcaaaacaacaacagcgaatttgcttggcctggagcttcttcttgggctctcaatggacgtaatagcttgatgaatcctggacctgctgtggccagccacaaagaaggagaggaccgtttctttcctttgtctggatctttaatttttggcaaacaaggaactggaagagacaacgtggatgcggacaaagtcatgataaccaacgaagaagaaattaaaactactaacccggtagcaacggagtcctatggacaagtggccacaaaccaccagagtgcccaagcacaggcgcagaccggctgggttcaaaaccaaggaatacttccgggtatggtttggcaggacagagatgtgtacctgcaaggacccatttgggccaaaattcctcacacggacggcaactttcacccttctccgctgatgggagggtttggaatgaagcacccgcctcctcagatcctcatcaaaaacacacctgtacctgcggatcctccaacggccttcaacaaggacaagctgaactctttcatcacccagtattctactggccaagtcagcgtggagatcgagtgggagctgcagaaggaaaacagcaagcgctggaacccggagatccagtacacttccaactattacaagtctaataatgttgaatttgctgttaatactgaaggtgtatatagtgaaccccgccccattggcaccagatacctgactcgtaatctg

SEQ ID NO: 613 - DNA, 2208 bp, Artificial Sequence
  Description of Artificial Sequence: Synthetic polynucleotide
atggctgccgatggttatcttccagattggctcgaggacaaccttagtgaaggaattcgcgagtggtgggctttgaaacctggagcccctcaacccaaggcaaatcaacaacatcaagacaacgctcgaggtcttgtgcttccgggttacaaataccttggacccggcaacggactcgacaagggggagccggtcaacgcagcagacgcggcggccctcgagcacgacaaggcctacgaccagcagctcaaggccggagacaacccgtacctcaagtacaaccacgccgacgccgagttccaggagcggctcaaagaagatacgtcttttgggggcaacctcgggcgagcagtcttccaggccaaaaagaggcttcttgaacctcttggtccggttgaggaagcggctaagacggctcctggaaagaagaggcctgtagagcagtctcctcaggaaccggactcctccgcgggtattggcaaatcgggtgcacagcccgctaaaaagagactcaatttcggtcagactggcgacacagagtcagtcccagaccctcaaccaatcggagaacctcccgcagccccctcaggtgtgggatctcttacaatggcttcaggtggtggcgcaccagtggcagacaataacgaaggtgccgatggagtgggtagttcctcgggaaattggcattgcgattcccaatggctgggggacagagtcatcaccaccagcacccgaacctgggccctgcccacctacaacaatcacctctacaagcaaatctccaacagcacatctggaggatcttcaaatgacaacgcctacttcggctacagcaccccctgggggtattttgacttcaacagattccactgccacttctcaccacgtgactggcagcgactcatcaacaacaactggggattccggcctaagcgactcaacttcaagctcttcaacattcaggtcaaagaggttacggacaacaatggagtcaagaccatcgccaataaccttaccagcacggtccaggtcttcacggactcagactatcagctcccgtacgtgctcgggtcggctcacgagggctgcctcccgccgttcccagcggacgttttcatgattcctcagtacgggtatctgacgcttaatgatggaagccaggccgtgggtcgttcgtccttttactgcctggaatatttcccgtcgcaaatgctaagaacgggtaacaacttccagttcagctacgagtttgagaacgtacctttccatagcagctacgctcacagccaaagcctggaccgactaatgaatccactcatcgaccaatacttgtactatctctcaaagactattaacggttctggacagaatcaacaaacgctaaaattcagtgtggccggacccagcaacatggctgtccagggaagaaactacatacctggacccagctaccgacaacaacgtgtctcaaccactgtgactcaaaacaacaacagcgaatttgcttggcctggagcttcttcttgggctctcaatggacgtaatagcttgatgaatcctggacctgctatggccagccacaaagaaggagaggaccgtttctttcctttgtctggatctttaatttttggcaaacaaggaactggaagagacaacgtggatgcggacaaagtcatgataaccaacgaagaagaaattaaaactactaacccggtagcaacggagtcctatggacaagcggccacaaaccaccagagtgcccaagcacaggcgcagaccggctgggttcaaaaccaaggaatacttccgggtatggtttggcaggacagagatgtgtacctgcaaggacccatttgggccaaaattcctcacacggacggcaactttcacccttctccgctgatgggagggtttggaatgaagcacccgcctcctcagatcctcatcaaaaacacacctgtacctgcggatcctccaacggccttcaacaaggacaagctgaactctttcatcacccagtattctactggccaagtcagcgtggagatcgagtgggagctgcagaaggaaaacagcaagcgctggaacccggagatccagtacacttccaactattacaagtctaataatgttgaatttgctgttaatactgaaggtgtatatagtgaaccccgccccattggcaccagatacctgactcgtaatctg

SEQ ID NO: 614 - DNA, 2208 bp, Artificial Sequence
  Description of Artificial Sequence: Synthetic polynucleotide
atggctgccgatggttatcttccagattggctcgaggacaaccttagtgaaggaattcgcgagtggtgggctttgaaacctggagcccctcaacccaaggcaaatcaacaacatcaagacaacgctcggggtcttgtgcttccgggttacaaataccttggacccggcaacggactcgacaagggggagccggtcaacgcagcagacgcggcggccctcgagcacgacaaggcctacgaccagcagctcaaggccggagacaacccgtacctcaagtacaaccacgccgacgccgagttccaggagcggctcaaagaagatacgtcttttgggggcaacctcgggcgagcagtcttccaggccaaaaagaggcttcttgaacctcttggtccggttgaggaagcggctaagacggctcctggaaagaagaggcctgtagagcagtctcctcaggaaccggactcctccgcgggtattggcaaatcgggtgcacagcccgctaaaaagagactcaatttcggtcagactggcgacacagagtcagtcccagaccctcaaccaatcggagaacctcccgcagccccctcaggtgtgggatctcttacaatggcttcaggtggtggcgcaccagtggcagacaataacgaaggtgccgatggagtgggtagttcctcgggaaattggcattgcgattcccaatggctgggggacagagtcatcaccaccagcacccgaacctgggccctgcccacctacaacaatcacctctacaagcaaatctccaacagcacatctggaggatcttcaaatgacaacgcctacttcggctacagcaccccctgggggtattttgacttcaacagattccactgccacttctcaccacgtgactggcggcgactcatcaacaacaactggggattccggcctaagcgactcaacttcaagctcttcaacattcaggtcaaagaggttacggacaacaatggagtcaagaccatcgccaataaccttaccagcacggtccaggtcttcacggactcagactatcagctcccgtacgtgctcgggtcggctcacgagggctgcctcccgccgttcccagcggacgttttcatgattcctcagtacgggtatctgacgcttaatgatggaagccaggccgtgggtcgttcgtccttttactgcctggaatatttcccgtcgcaaatgctaagaacgggtaacaacttccagttcagctacgagtttgagaacgtacctttccatagcagctacgctcacagccaaagcctggaccgactaatgaatccactcatcgaccaatacttgtactatctctcaaagactattaacggttctggacagaatcaacaaacgctaaaattcagtgtggccggacccagcaacatggctgtccagggaagaaactacatacctggacccagctaccgacaacaacgtgtctcaaccactgtgactcaaaacaacaacagcgaatttgcttggcctggagcttcttcttgggctctcaatggacgtaatagcttgatgaatcctggacctgctatggccagccacaaagaaggagaggaccgtttctttcctttgtctggatctttaatttttggcaaacaaggaactggaagagacaacgtggatgcggacaaagtcatgataaccaacgaagaagaaattaaaactactaacccggtagcaacggagtcctatggacaagtggccacaaaccaccagagtgcccaagcacaggcgcagaccggctgggttcaaaaccaaggaatacttccgggtatggtttggcaggacagagatgtgtacctgcaaggacccatttgggccaaaattcctcacacggacggcaactttcacccttctccgctgatgggagggtttggaatgaagcacccgcctcctcagatcctcatcaaaaacacacctgtacctgcggatcctccaacggccttcaacaaggacaagctgaactctttcatcacccagtattctactggccaagtcagcgtggagatcgagtgggagctgcagaaggaaaacagcaagcgctggaacccggagatccagtacacttccaactattacaagtctaataatgttgaatttgctgttaatactgaaggtgtatatagtgaaccccgccccattggcaccagatacctgactcgtaatctg

SEQ ID NO: 615 - DNA, 2208 bp, Artificial Sequence
  Description of Artificial Sequence: Synthetic polynucleotide
atggctgccgatggttatcttccagattggctcgaggacaaccttagtgaaggaattcgcgagtggtgggctttgaaacctggagcccctcaacccaaggcaaatcaacaacatcaagacaacgctcgaggtcttgtgcttccgggttacaaataccttggacccggcaacggactcgacaagggggagccggtcaacgcagcagacgcggcggccctcgagcacgacaaggcctacgaccagcagctcaaggccggagacaacctgtacctcaagtacaaccacgccgacgccgagttccaggagcggctcaaagaagatacgtcttttgggggcaacctcgggcgagcagtcttccaggccaaaaagaggcttcttgaacctcttggtctggttgaggaagcggctaagacggctcctggaaagaagaggcctgtagagcagtctcctcaggaaccggactcctccgcgggtattggcaaatcgggtgcacagcccgctaaaaagagactcaatttcggtcagactggcgacacagagtcagtcccagaccctcaaccaatcggagaacctcccgcagccccctcaggtgtgggatctcttacaatggcttcaggtggtggcgcaccagtggcagacaataacgaaggtgccgatggagtgggtagttcctcgggaaattggcattgcgattcccaatggctgggggacagagtcatcaccaccagcacccgaacctgggccctgcccacctacaacaatcacctctacaagcaaatctccaacagcacatctggaggatcttcaaatgacaacgcctacttcggctacagcaccccctgggggtattttgacttcaacagattccactgccacttctcaccacgtgactggcagcgactcatcaacaacaactggggattccggcctaagcgactcaacttcaagctcttcaacattcaggtcaaagaggttacggacaacaatggagtcaagaccatcgccaataaccttaccagcacggtccaggtcttcacggactcagactatcagctcccgtacgtgctcgggtcggctcacgagggctgcctcccgccgttcccagcggacgttttcatgattcctcagtacgggtatctgacgcttaatgatggaagccaggccgtgggtcgttcgtccttttactgcctggaatatttcccgtcgcaaatgctaagaacgggtaacaacttccagttcagctacgagtttgagaacgtacctttccatagcagctacgctcacagccaaagcctggaccgactaatgaatccactcatcgaccaatacttgcactatctctcaaagactattaacggttctggacagaatcaacaaacgctaaaattcagtgtggccggacccagcaacatggctgtccagggaagaaactacatacctggacccagctaccgacaacaacgtgtctcaaccactgtgactcaaaacaacaacagcgaatttgcttggcctggagcttcttcttgggctctcaatggacgtaatagcttgatgaatcctggacctgctatggccagccacaaagaaggagaggaccgtttctttcctttgtctggatctttaatttttggcaaacaaggaactggaagagacaacgtggatgcggacaaagtcatgataaccaacgaagaagaaattaaaactactaacccggtagcaacggagtcctatggacaagtggccacaaaccaccagagtgcccaagcacaggcgcagaccggctgggttcaaaaccaaggaatacttccgggtatggtttggcaggacagagatgtgtacctgcaaggacccatttgggccaaaattcctcacacggacggcaactttcacccttctccgctgatgggagggtttggaatgaagcacccgcctcctcagatcctcatcaaaaacacacctgtacctgcggatcctccaacggccttcaacaaggacaagctgaactctttcatcacccagtattctactggccaagtcagcgtggagatcgagtgggagctgcagaaggaaaacagcaagcgctggaacccggagatccagtacacttccaactattacaagtctaataatgttgaatttgctgttaatactgaaggtgtatatagtgaaccccgccccattggcaccagatacctgactcgtaatctg

SEQ ID NO: 616 - DNA, 2208 bp, Artificial Sequence
  Description of Artificial Sequence: Synthetic polynucleotide
atggctgccgatggttatcttccagattggctcgaggacaaccttagtgaaggaattcgcgagtggtgggctttgaaacctggagcccctcaacccaaggcaaatcaacaacatcaagacaacgctcgaggtcttgtgcttccgggttacaaataccttggacccggcaacggactcgacaagggggagccggtcaacgcagcagacgcggcggccctcgagcacgacaaggcctacgaccagcagctcaaggccggagacaacccgtacctcaagtacaaccacgccgacgccgagttccaggagcggctcaaagaagatacgtcttttgggggcaacctcgggcgagcagtcttccaggccaaaaagaggcttcttgaacctcttggtctggttgaggaagcggctaagacggctcctggaaagaagaggcctgtagagcagtctcctcaagaaccggactcctccgcgggtattggcaaatcgggtgcacagcccgctaaaaagagactcaatttcggtcagactggcgacacagagtcagtcccagaccctcaaccaatcggagaacctcccgcagccccctcaggtgtgggatctcttacaatggcttcaggtggtggcgcaccagtggcagacaataacgaaggtgccgatggagtgggtagttcctcgggaaattggcattgcgattcccaatggctgggggacagagtcatcaccaccagcacccgaacctgggccctgcccacctacaacaatcacctctacaagcaaatctccaacagcacatctggaggatcttcaaatgacaacgcctacttcggctacagcaccccctgggggtattttgacttcaacagattccactgccacttctcaccacgtgactggcagcgactcatcaacaacaactggggattccggcctaagcgactcaacttcaagctcttcaacattcaggtcaaagaggttacggacaacaatggagtcaagaccatcgccaataaccttaccagcacggtccaggtcttcacggactcagactatcagctcccgtacgtgctcgggtcggctcacgagggctgcctcccgccgttcccagcggacgttttcatgattcctcagtacgggtatctgacgcttaatgatggaagccaggccgtgggtcgttcgtccttttactgcctggaatatttcccgtcgcaaatgctaagaacgggtaacaacttccagttcagctacgagtttgagaacgtacctttccatagcagctacgctcacagccaaagcctggaccgactaatgaatccactcatcgaccaatacttgcactatctctcaaagactattaacggttctggacagaatcaacaaacgctaaaattcagtgtggccggacccagcaacatggctgtccagggaagaaactacatacctggacccagctaccgacaacaacgtgtctcaaccactgtgactcaaaacaacaacagcgaatttgcttggcctggagcttcttcttgggctctcaatggacgtaatagcttgatgaatcctggacctgctatggccagccacaaagaaggagaggaccgtttctttcctttgtctggatctttaatttttggcaaacaaggaactggaagagacaacgtggatgcggacaaagtcatgataaccaacgaagaagaaattaaaactactaacccggtagcaacggagtcctatggacaagtggccacaaaccaccagagtgcccaagcacaggcgcagaccggctgggttcaaaaccaaggaatacttccgggtatggtttggcaggacagagatgtgtacctgcaaggacccatttgggccaaaattcctcacacggacggcaactttcacccttctccgctgatgggagggtttggaatgaagcacccgcctcctcagatcctcatcaaaaacacacctgtacctgcggatcctccaacggccttcaacaaggacaagctgaactctttcatcacccagtattctactggccaagtcagcgtggagatcgagtgggagctgcagaaggaaaacagcaagcgctggaacccggagatccagtacacttccaactattacaagtctaataatgttgaatttgctgttaatactgaaggtgtatatagtgaaccccgccccattggcaccagatacctgactcgtaatctg

SEQ ID NO: 617 - DNA, 2208 bp, Artificial Sequence
  Description of Artificial Sequence: Synthetic polynucleotide
  misc_feature (1325)..(1325): n is a, c, t, or g
atggctgccgatggttatcttccagattggctcgaggacaaccttagtgaaggaattcgcgagtggtgggctttgaaacctggagcccctcaacccaaggcaaatcaacaacatcaagacaacgctcgaggtcttgtgcttccgggttacaaataccttggacccggcaacggactcgacaagggggagccggtcaacgcagcagacgcggcggccctcgagcacgacaaggcctacgaccagcagctcaaggccggagacaacccgtacctcaagtacaaccacgccgacgccgagttccaggagcggctcaaagaagatacgtcttttgggggcaacctcgggcgagcagtcttccaggccaaaaagaggcttcttgaacctcttggtctggttgaggaagcggctaagacggctcctggaaagaagaggcctgtagagcagtctcctcaggaaccggactcctccgcgggtattggcaaatcgggtgcacagcccgctaaaaagagactcaatttcggtcagactggcgacacagagtcagtcccagaccctcaaccaatcggagaacctcccgcagccccctcaggtgtgggatctcttacaatggcttcaggtggtggcgcaccagtggcagacaataacgaaggtgccgatggagtgggtagttcctcgggaaattggcattgcgattcccaatggctgggggacagagtcatcaccaccagcacccgaacctgggccctgcccacctacaacaatcacctctacaagcaaatctccaccagcacatctggaggatcttcaaatgacaacgcctacttcggctacagcaccccctgggggtattttgacttcaacagattccactgccacttctcaccacgtgactggcagcgactcatcaacaacaactggggattccggcctaagcgactcaacttcaagctcttcaacattcaggtcaaagaggttacggacaacaatggagtcaagaccatcgccaataaccttaccagcacggtccaggtcttcacggactcagactatcagctcccgtacgtgctcgggtcggctcacgagggctgcctcccgccgttcccagcggacgttttcatgattcctcagtacgggtatctgacgcttaatgatggaagccaggccgtgggtcgttcgtccttttactgcctggaatatttcccgtcgcaaatgctaagaacgggtaacaacttccagttcagctacgagtttgagaacgtacctttccatagcagctacgctcacagccaaagcctggaccgactaatgaatccactcatcgaccnatacttgcactatctctcaaagactattaacggttctggacagaatcaacaaacgctaaaattcagtgtggccggacccagcaacatggctgtccagggaagaaactacatacctggacccagctaccgacaacaacgtgtctcaaccactgtgactcaaaacaacaacagcgaatttgcttggcctggagcttcttcttgggctctcaatggacgtaatagcttgatgaatcctggacctgctatggccagccacaaagaaggagaggaccgtttctttcctttgtctggatctttaatttttggcaaacaaggaactggaagagacaacgtggatgcggacaaagtcatgataaccaacgaagaagaaattaaaactactaacccggtagcaacggagtcctatggacaagtggccacaaaccaccagagtgcccaagcacaggcgcagaccggctgggttcaaaaccaaggaatacttccggatatggtttggcaggacagagatgtgtacctgcaaggacccatttgggccaaaattcctcacacggacggcaactttcacccttctccgctgatgggagggtttggaatgaagcacccgcctcctcagatcctcatcaaaaacacacctgtacctgcggatcctccaacggccttcaacaaggacaagctgaactctttcatcacccagtattctactggccaagtcagcgtggagatcgagtgggagctgcagaaggaaaacagcaagcgctggaacccggagatccagtacacttccaactattacaagtctaataatgttgaatttgctgttaatactgaaggtgtatatagtgaaccccgccccattggcaccagatacctgactcgtaatctg

SEQ ID NO: 618 - DNA, 2208 bp, Artificial Sequence
  Description of Artificial Sequence: Synthetic polynucleotide
atggctgccgatggttatcttccagattggctcgaggacaaccttagtgaaggaattcgcgagtggtgggctttgaaacctggagcccctcaacccaaggcaaatcaacaacatcaagacaacgctcgaggtcttgtgcttccgggttacaaataccttggacccggcaacggactcgacaagggggagccggtcaacgcagcagacgcggcggccctcgagcacgacaaggcctacgaccagcagctcaaggccggagacaacccgtacctcaagtacaaccacgccgacgccgagttccaggagcggctcaaagaagatacgtcttttgggggcaacctcgggcgagcagtcttccaggccaaaaagaggcttcttgaacctcttggtctggttgaggaagcggctaagacggctcctggaaagaagaggcctgtagagcagtctcctcaggaaccggactcctccgcgggtattggcaaatcgggtgcacagcccgctaaaaagagactcaatttcggtcagactggcgacacagagtcagtcccagaccctcaaccaatcggagaacctcccgcagccccctcaggtgtgggatctcttacaatggcttcaggtggtggcgcaccagtggcagacaataacgaaggtgccgatggagtgggtagttcctcgggaaattggcattgcgattcccaatggctgggggacagagtcatcaccaccagcacccgaacctgggccctgcccacctacaacaatcacctctacaagcaaatctccaacagcacatctggaggatcttcaaatgacaacgcctacttcggctacagcaccccctgggggtattttgacttcaacagattccactgccacttctcaccacgtgactggcagcgactcatcaacaacaactggggattccggcctaagcgactcaacttcaagctcttcaacattcaggtcaaagaggttacggacaacaatggagtcaagaccatcgccaataaccttaccagcacggtccaggtcttcacggactcagactatcagctcccgtacgtgctcgggtcggctcacgagggctgcctcccgccgttcccagcggacgttttcatgattcctcagtacgggtatctgacgcttaatgatggaagccaggccgtgggtcgttcgtccttttactgcctggaatatttcccgtcgcaaatgctaagaacgggtaacaacttccagttcagctacgagtttgagaacgtacctttccatagcagctacgctcacagccaaagcctggaccgactaatgaatccactcatcgaccaatacttgcactatctctcaaagactattaacggttctggacagaatcaacaaacgctaaaattcagtgtggccggacccagcaacatggctgtccagggaagaaactacatacctggacccagctaccgacaacaacgtgtctcaaccactgtgactcaaaacaacaacagcgaatttgcttggcctggagcttcttcttgggctctcaatggacgtaatagcttgatgaatcctggacctgctatggccagctacaaagaaggagaggacagtttctttcctttgtctggatctttaatttttggcaaacaaggaactggaagagacaacgtggatgcggacaaagtcatgataaccaacgaagaagaaattaaaactactaacccggtagcaacggagtcctatggacaagtggccacaaaccaccagagtgcccaagcacaggcgcagaccggctgggttcaaaaccaaggaatacttccgggtatggtttggcaggacagagatgtgtacctgcaaggacccatttgggccaaaattcctcacacggacggcaactttcacccttctccgctgatgggagggtttggaatgaagcacccgcctcctcagaccctcatcaaaaacacacctgtacctgcggatcctccaacggccttcaacaaggacaagctgaactctttcatcacccagtattctactggccaagtcagcgtggagatcgagtgggagctgcagaaggaaaacagcaagcgctggaacccggagatccagtacacttccaactattacaagtctaataatgttgaatttgctgttaatactgaaggtgtatatagtgaaccccgccccattggcaccagatacctgactcgtaatctg

SEQ ID NO: 619 - DNA, 2208 bp, Artificial Sequence; identical to SEQ ID NO: 602
  Description of Artificial Sequence: Synthetic polynucleotide

SEQ ID NO: 620 - DNA, 2208 bp, Artificial Sequence
  Description of Artificial Sequence: Synthetic polynucleotide
atggctgccgatggttatcttccagattggctcgaggacaaccttagtgaaggaattcgcgagtggtgggctttgaaacctggagcccctcaacccagggcaaatcaacaacatcaagacaacgctcgaggtcttgtgcttccgggttacaaataccttggacccggcaacggactcgacaagggggagccggtcaacgcagccgacgcggcggccctcgagcacgacaaggcctacgaccagcagctcaaggccggagacaacccgtacctcaagtacaaccacgccgacgccgagttccaggagcggctcaaagaagatacgtcttttgggggcaacctcgggcgagcagtcttccaggccaaaaagaggcttcttgaacctcttggtctggttgaggaagcggctaagacggctcctggaaagaagaggcctgtagagcagtctcctcaggaaccggactcctccgcgggtattggcaaatcgggtgcacagcccgctaaaaagagactcaatttcggtcagactggcgacacagagtcagtcccagaccctcaaccaatcggagaacctcccgcagccccctcaggtgtgggatctcttacaatggcttcaggtggtggcgcaccagtggcagacaataacgaaggtgccgatggagtgggtagttcctcgggaaattggcattgcgattcccaatggctgggggacagagtcatcaccaccagcacccgaacctgggccctgcccacctacaacaatcacctctacaagcaaatctccaacagcacatctggaggatcttcaaatgacaacgcctacttcggctacagcaccccctgggggtattttgacttcaacagattccactgccacttctcaccacgtgactggcagcgactcatcaacaacaactggggattccggcctaagcgactcaacttcaagctcttcaacattcaggtcaaagaggttacggacaacaatggagtcaagaccatcgccaataaccttaccagcacggtccaggtcttcacggactcagactgtcagctcccgtacgtgctcgggtcggctcacgagggctgcctcccgccgttcccagcggacgttttcatgattcctcagtacgggtatctgacgcttaatgatggaagccaggccgtgggtcgttcgtccttttactgcctggaatatttcccgtcgcaaatgctaagaacgggtaacaacttccagttcagctacgagtttgagaacgtacctttccatagcagctacgctcacagccaaagcctggaccgactaacgaatccactcatcgaccaatacttgtactatctctcaaagactattaacggttctggacagaatcaacaaacgctaaaattcagtgtggccggacccagcaacatggctgtccagggaagaaactacatacctggacccagctaccgacaacaacgtgtctcaaccactgtgactcaaaacaacaacagcgaatttgcttggcctggagcttcttcttgggctctcaatggacgtaatagcttgatgaatcctggacctgctatggccagccacaaagaaggagaggaccgtttctttcctttgtctggatctttaatttttggcaaacaaggaactggaagagacaacgtggatgcggacaaagtcatgataaccaacgaagaagaaattaaaactactaacccggtagcaacggagtcccatggacaagtggccacaaaccaccagagtgcccaagcacaggcgcagaccggctgggttcaaaaccaaggaatacttccgggtatggtttggcaggacagagatgtgtacctgcaaggacccatttgggccaaaattcctcacacggacggcaactttcacccttctccgctgatgggagggtttggaatgaagcacccgcctcctcagatcctcatcaaaaacacacctgtacctgcggatcctccaacggccttcaacaaggacaagctgaactctttcatcacccagtattctactggccaagtcagcgtggagatcgagtgggagctgcagaaggaaaacagcaagcgctggaacccggagatccagtacacttccaactattacaagtctaataatgttgaatttgctgttaatactgaaggtgtatatagtgaaccccgccccattggcaccagatacctgactcgtaatctg

SEQ ID NO: 621 - DNA, 2208 bp, Artificial Sequence
  Description of Artificial Sequence: Synthetic polynucleotide
atggctgccgatggttatcttccagattggctcgaggacaaccttagtgaaggaattcgcgagtggtgggctttgaaacctggagcccctcaacccaaggcaaatcaacaacatcaagacaacgctcgaggtcttgtgcttccgggttacaaataccttggacccggcaacggactcgacaagggggagccggtcaacgcagcagacgcggcggccctcgagcacgacaaggcctacgaccagcagctcaaggccggagacaacccgtacctcaagtacaaccacgccgacgccgagttccaggagcggctcaaagaagatacgtcttttgggggcaacctcgggcgagcagtcttccaggccaaaaagaggcttcttgaacctcttggtctggttgaggaagcggctaagacggctcctggaaagaagaggcctgtagagcagtctcctcaggaaccggactcctccgcgggtattggcaaatcgggtgcacagcccgctaagaagagactcaatttcggtcagactggcgacacagagtcagtcccagaccctcaaccaatcggagaacctcccgcagccccctcaggtgtgggatctcttacaatggcttcaggtggtggcgcaccagtggcagacaataacgaaggtgccgatggagtgggtagttcctcgggaaattggcattgcgattcccaatggctgggggacagagtcatcaccaccagcacccgaacctgggccctgcccacctacaacaatcacctctacaagcaaatctccaacagcacatctggaggatcttcaaatgacaacgcctacttcggctacagcaccccctgggggtattttgacttcaacagattccactgccacttctcaccacgtgactggcagcgactcatcaacaacaactggggattccggcctaagcgactcaacttcaagctcttcaacattcaggtcaaagaggttacggacaacaatggagtcaagaccatcgccaataaccttaccagcacggtccaggtcttcacggactcagactatcagctcccgtacgtgctcgggtcggctcacgagggctgcctcccgccgttcccagcggacgttttcatgattcctcagtacgggtatctgacgcttaatgatggaagccaggccgtgggtcgttcgtccttttactgcctggaatatttcccgtcgcaaatgctaagaacgggtaacaacttccagttcagctacgagtttgagaacgtacctttccatagcagctacgctcacagccaaagcctggaccgactaatgaatccacccatcgaccaatacttgtactatctctcaaagactattaacggttctggacagaatcaacaaacgctaaaattcagtgtggccggacccagcaacatggctgtccagggaagaaactacatacctggacccagctaccgacaacaacgtgtctcaaccactgtgactcaaaacaacaacagcgaatttgcttggcctggagcttcttcttgggctctcaatggacgtaatagcttgatgaatcctggacctgctatggccagccacaaagaaggagaggaccgtttctttcctttgtctggatctttaatttttggcaaacaaggaactggaagagacaacgtggatgcggacaaagtcatgataaccaacgaagaagaaattaaaactactaacccggtagcaacggagtcctatggacaagtggccacaaaccaccagagtgcccaagcacaggcgcagaccggctgggttcaaaaccaaggaatacttccgggtatggtttggcaggacagagatgtgtacctgcaaggacccatttgggccaaaattcctcacacggacggcaactttcacccttctccgctgatgggagggtttggaatgaagcacccgcctcctcagatcctcatcaaaaacacacctgtacctgcggatcctccaacggccttcaacaaggacaagctgaactctttcatcacccagtattctactggccaagtcagcgtggagatcgagtgggagctgcagaaggaaaacagcaagcgctggaacccggagatccagtacacttccaactattacaagtctaataatgttgaatttgctgttaatactgaaggtgtatatggtgaaccccgccccattggcaccagatacctgactcgtaatctg

SEQ ID NO: 622 - DNA, 2208 bp, Artificial Sequence
  Description of Artificial Sequence: Synthetic oligonucleotide
atggctgccgatggttatcttccagattggctcgaggacaaccttagtgaaggaattcgcgagtggtgggctttgaaacctggagcccctcaacccaaggcaaatcaacaacatcaagacaacgctcgaggtcttgtgcttccgggttacaaataccttggacccggcaacggactcgacaagggggagccggtcaacgcagcagacgcggcggccctcgagcacgacaaggcctacgaccagcagctcaaggccggagacaacccgtacctcaagtacaaccacgccgacgccgagttccaggagcggctcaaagaagatacgtcttttgggggcaacctcgggcgagcagtcttccaggccaaaaagaggcttcttgaacctcttggtctggttgaggaagcggctaagacggctcctggaaagaagaggcctgtagagcagtctcctcaggaaccggactcctccgcgggtattggcaaatcgggtgcacagcccgctaaaaagagactcaatttcggtcagactggcgacacagagtcagtcccagaccctcaaccaatcggagaacctcccgcagccccctcaggtgtgggatctcttacaatggcttcaggtggtggcgcaccagtggcagacaataacgaaggtgccgatggagtgggtagttcctcgggaaattggcattgcgattcccaatggctgggggacagagtcatcaccaccagcacccgaacctgggccctgcccacctacaacaatcacctctacaagcaaatctccaacagcacatctggaggatcttcaaatgacaacgcctacttcggctacagcaccccctgggggtattttgacttcaacagattccactgccacttctcaccacgtgaccggcagcgactcatcaacaacaactggggattccggcctaagcgactcaacttcaagctcttcaacattcaggtcaaagaggttacggacaacaatggagtcaagaccatcgccaataaccttaccagcacggtccaggtcttcacggactcagactatcagctcccgtacgtgctcgggtcggctcacgagggctgcctcccgccgttcccagcggacgttttcatgattcctcagtacgggtatctgacgcttaatgatggaagccaggccgtgggtcgttcgtccttttactgcctggaatatttcccgtcgcaaatgctaagaacgggtaacaacttccagttcagctacgagtttgagaacgtacctttccatagcagctacgctcacagccaaagcctggaccgactaatgaatccactcatcgaccaatacttgtactatctctcaaagactattaacggttctggacagaatcaacaaacgctaaaattcagtgtggccggacccagcaacatggctgtccagggaagaaactacatacctggacccagctaccgacaacaacgtgtctcaaccactgtgactcaaaacaacaacagcgaatttgcttggcctggagcttcttcttgggctctcaatggacgtaatagcttgatgaatcctggacctgctatggccagccacaaagaaggagaggaccgtttctttcctttgtctggatctttaatttttggcaaacaaggaactggaagagacaacgtggatgcggacaaagtcatgataaccaacgaagaagaaattaaaactactaacccggtagcaacggagtcctatggacaagtggccacaaaccaccagagtgcccaagcacaggcgcagaccggctgggttcaaaaccaaggaatacttccgggtatggtttggcaggacagagatgtgtacctgcaaggacccatttgggccaaaattcctcacacggacggcaactttcacccttctccgctgatgggagggtttggaatgaagcacccgcctcctcagatcctcatcaaaaacacacctgtacctgcggatcctccaacggccttcaacaaggacaagctgaactctttcatcacccagtattctactggccaagtcagcgtggagatcgagtgggagctgcagaaggaaaacagcaagcgctggaacccggagatccagtacacttccaactattacaagtctaataatgttgaatttgctgttaatactgaaggtgtatatagtgaaccccgccccattggcaccagatacctgactcgtaatctg

SEQ ID NO: 623 - DNA, 2208 bp, Artificial Sequence
  Description of Artificial Sequence: Synthetic polynucleotide
atggctgccgatggttatcttccagattggctcgaggacaaccttagtgaaggaattcgcgagtggtgggctttgaaacctggagcccctcaacccaaggcaaatcaacaacatcaagacaacgctcgaggtcttgtgcttccgggttacaaataccttggacccggcaacggactcgacaagggggagccggtcaacgcagcagacgcggcagccctcgagcacgacaaggcctacgaccagcagctcaaggccggagacaacccgtacctcaagtacaaccacgccgacgccgagttccaggagcggctcaaagaagatacgtcttttgggggcaacctcgggcgagcagtcttccaggccaaaaagaggcttcttgaacctcttggtctggttgaggaagcggctaagacggctcctggaaagaagaggcctgtagagcagtctcctcaggaaccggactcctccgcgggtattggcaaatcgggtgcacagcccgctaaaaagagactcaatttcggtcagactggcgacacagagtcagtcccagaccctcaaccaatcggagaacctcccgcagccccctcaggtgtgggatctcttacaatggcttcaggtggtggcgcaccagtggcagacaataacgaaggtgccgatggagtgggtagttcctcgggaaattggcattgcaattcccaatggctgggggacagagtcatcaccaccagcacccgaacctgggccctgcccacctacaacaatcacctctacaagcaaatctccaacagcacatctggaggatcttcaaatgacaacgcctacttcggctacagcaccccctgggggtattttgacttcaacagattccactgccacttctcaccacgtgactggcagcgactcatcaacaacaactggggattccggcctaagcgactcaacttcaagctcttcaacattcaggtcaaagaggttacggacaacaatggagtcaagaccatcgccaataaccttaccagcacggtccaggtcttcacggactcagactatcagctcccgtacgtgctcgggtcggctcacgagggctgcctcccgccgttcccagcggacgttttcatgattcctcagtacgggtatctgacgcttaatgatggaagccaggccgtgggtcgttcgtccttttactgcctggaatatttcccgtcgcaaatgctaagaacgggtaacaacttccagttcagctacgagtttgagaacgtacctttccatagcagctacgctcacagccaaagcctggaccgactaatgaatccactcatcgaccaatacttgtactatctctcaaagactattaacggttctggacagaatcaacaaacgctaaaattcagtgtggccggacccggcaacatggctgtccagggaagaaactacatacctggacccagctaccgacaacaacgtgtctcaaccactgtgactcaaaacaacaacagcgaatttgcttggcctggagcttcttcttgggctctcaatggacgtaatagcttgatgaatcctggacctgctatggccagccacaaagaaggagaggaccgtttctttcctttgtctggatctttaatttttggcaaacaaggaactggaagagacaacgtggatgcggacaaagtcatgataaccaacgaagaagaaattaaaactactaacccggtagcaacggagtcctatggacaagtggccacaaaccaccagagtgcccaagcacaggcgcagaccggctgggttcaaaaccaaggaatacttccgggtatggtttggcaggacagagatgtgtacctgcaaggacccatttgggccaaaattcctcacacggacggcaactttcacccttctccgctgatgggagggtttggaatgaagcacccgcctcctcagatcctcatcaagaacacacctgtacctgcggatcctccaacggccttcaacaaggacaagctgaactctttcatcacccagtattctactggccaagtcagcgtggagatcgagtgggagctgcagaaggaaaacagcaagcgctggaacccggagatccagtacacttccaactattacaagtctaataatgttgaatttgctgttaatactgaaggtgtatatagtgaaccccgccccattggcaccagatacctgactcgtaatctg

SEQ ID NO: 624 - DNA, 2208 bp, Artificial Sequence
  Description of Artificial Sequence: Synthetic polynucleotide
atggctgccgatggttatcttccagattggctcgaggacaaccttagtgaaggaattcgcgagtggtgggctttgaaacctggagcccctcaacccaaggcaaatcaacaacatcaagacaacgctcgaggtcttgtgcttccgggttacagataccttggacccggcaacggactcgacaagggggagccggtcaacgcagcagacgcggcggccctcgagcacgacaaggcctacgaccagcagctcaaggccggagacaacccgtacctcaagtacaaccacgccgacgccgagttccaggagcggctcaaagaagatacgtcttttgggggtaacctcgggcgagcagtcttccaggccaaaaagaggcttcttgaacctcttggtctggttgaggaagcggctaagacggctcctggaaagaagaggcctgtagagcagtctcctcaggaaccggactcctccgcgggtatcggcaaatcgggtgcacagcccgctaaaaagagactcaatttcggtcagactggcgacacagagtcagtcccagaccctcaaccaatcggagaacctcccgcagccccctcaggtgtgggatctcttacaatggcttcaggtggtggcgcaccagtggcagacaataacgaaggtgccgatggagtgggtagttcctcgggaaattggcattgcgattcccaatggctgggggacagagtcatcaccaccagcacccgaacctgggccctgcccacctacaacaatcacctctacaagcaaatctccaacagcacatctggaggatcttcaaatgacaacgcctacttcggctacagcaccccctgggggtattttgacttcaacagattccactgccacttctcaccacgtgactggcagcgactcatcaacaacaactggggattccggcctaagcgactcaacttcaagctcttcaacattcaggtcaaagaggttacggacaacaatggagtcaagaccgtcgccaataaccttaccagcacggtccaggtcttcacggactcagactatcagctcccgtacgtgctcgggtcggctcacgagggctgcctcccgccgttcccagcggacgttttcatgattcctcagtacgggtatctgacgcttaatgatggaagccaggccgtgggtcgttcgtccttttactgcctggaatatttcccgtcgcaaatgctaagaacgggtaacaacttccagttcagctacgagtttgagaacgtacctttccatagcagctacgctcacagccaaagcctggaccgactaatgaatccactcatcgaccaatacttgtactatctctcaaagactattaacggttctggacagaatcaacaaacgctaaaattcagtgtggccggacccagcaacatggctgtccagggaagaaactacatacctggacccagctaccgacaacaacgtgtctcaaccactgtgactcaaaacaacaacagcgaatttgcttggcctggagcttcttcttgggctctcaatggacgtaatagcttgatgaatcctggacctgctatggccagccacaaagaaggagaggaccgtttctttcctttgtctggatctttaatttttggcaaacaaggaactggaagagacaacgtggatgcggacaaagtcatgataaccaacgaagaagaaattaaaactactaacccggtagcaacggagtcctatggacaagtggccacaaaccaccagagtgcccaagcacaggcgcagaccggctgggttcaaaaccaaggaatacttccgggtatggtttggcaggacagagatgtgtacctgcaaggacccatttgggccaaaattcctcacacggacggcaactttcacccttctccgctgatgggagggtttggaatgaagcacccgcctcctcagatcctcatcaaaaacacacctgtacctgcggatcctccaacggccttcaacaaggacaagctgaactctttcatcacccagtattctactggccaagtcagcgtggagatcgagtgggagctgcagaaggaaaacagcaagcgctggaacccggagatccagtacacttccaactattacaagtctaataatgttgaatttgctgttaatactgaaggtgtatatagtggaccccgccccattggcaccagatacctgactcgtaatctg

SEQ ID NO: 625 - DNA, 2208 bp, Artificial Sequence
  Description of Artificial Sequence: Synthetic polynucleotide
atggctgccgatggttatcttccagattggctcgaggacaaccttagtgaaggaattcgcgagtggtgggctttgaaacctggagcccctcaacccaaggcaaatcaacaacatcaagacaacgctcgaggtcttgtgcttccgggttacaaataccttggacccggcaacggactcgacaagggggagccggtcaacgcagcagacgcggcggccctcgagcacgacaaggcctacgaccagcagctcaaggccggagacaacccgtacctcaagtacaaccacgccgacgccgagttccaggagcggctcaaagaagatacgtcttttgggggcaacctcgggcgagcagtcttccaggccaaaaagaggcttcttgaacctcttggtctggttgaggaagcggctaagacggctcctggaaagaagaggcctgtagagcagtctcctcaggaaccggactcctccgcgggtattggcaaatcgggtgcacagcccgctaaaaagagactcaatttcggtcagactggcgacacagagtcagtcccagaccctcaaccaatcggagaacctcccgcagccccctcaggtgtgggatctcttacaatggcttcaggtggtggcgcaccagtggcagacaataacgaaggtgccgatggagtgggtagttcctcgggaaattggcattgcgattcccaatggctgggggacagagtcatcaccaccagcacccgaacctgggccctgcccacctacaacaatcacctctacaagcaaatctccaacagcacatctggaggatcttcaaatgacaacgcctacttcggctacagcaccccctgggggtattttgacttcaacagattccactgccacttctcaccacgtgactggcagcgactcatcaacaacaactggggattccggcctaagcgactcaacttcaagctcttcaacattcaggtcaaagaggttacggacaacaatggagtcaagaccatcgccaataaccttaccagcacggtccaggtcttcacggactcagactatcagctcccgtacgtgctcgggtcggctcacgagggctgcctcccgccgttcccagcggacgttttcatgattcctcagtacgggtatctgacgcttaatgatggaagccaggccgtgggtcgttcgtccttttactgcctggaatatttcccgtcgcaaatgctaagaacgggtaacaacttccagttcagctacgagtttgagaacgtacctttccatagcagctacgctcacagccaaagcctggaccgactaatgaatccactcatcgaccaatacttgtactatctctcaaagactattaacggttctggacagaatcaacaaacgctaaaattcagtgtggccggacccagcaacatggctgtccagggaagaaactacatacctggacccagctaccgacaacaacgtgtctcaaccactgtgactcaaaacaacaacagcgaatttgcttggcctggagcttcttcttgggctctcaatggacgtaatagcttgatgaatcctggacctgctatggccagccacaaagaaggagaggaccgtttctttcctttgtctggatctttaatttttggcaaacaaggaactggaagagacaacgtggatgcggacaaagtcatgataaccaacgaagaagaaattaaaactactaacccggtagcaacggagtcctatggacaagtggccacaaaccaccagagtgcccaagcacaggcgcagaccggctgggttcaaaaccaaggaatacttccgggtatggtttggcaggacagagatgtgtacctgcaaggacccatttgggccaaaattcctcacacggacggcaactttcacccttctccgctgatgggagggtttggaatgaagcacccgcctcctcagatcctcatcaaaaacacacctgtacctgcggatcctccaacggccttcaacaaggacaagctgaactctttcatcacccagtattctactggccaagtcagcgtggagatcgagtgggagctgcagaaggaaaacagcaagcgctggaacccggagatccagtacacttccaactattacaagtctaataatgttgaatttgctgttaatactgaaggtgtatatagtgaaccccgccccattggcaccagatacctgactcgtaatctg

SEQ ID NO: 626 - DNA, 2208 bp, Artificial Sequence
  Description of Artificial Sequence: Synthetic polynucleotide
atggctgccgatggttatcttccagattggctcgaggacaaccttagtgaaggaattcgcgagtggtgggctttgaaacctggagcccctcaacccaaggcaaatcaacaacgtcaagacaacgctcgaggtcttgtgcttccgggttacaaataccttggacccggcaacggactcgacaagggggagccggtcaacgcagcagacgcggcggccctcgagcacgacaaggcctacgaccagcagctcaaggccggaggcaacccgtgcctcaagtacaaccacgccgacgccgagttccaggagcggctcaaagaagatacgtcttttgggggcaacctcgggcgagcagtcttccaggccaaaaagaggcttcttgaacctcttggtctggttgaggaagcggctaagacggctcctggaaagaagaggcctgtagagcagtctcctcaggaaccggactcctccgcgggtattggcagatcgggtgcacagcccgctaaaaagagactcaatttcggtcagactggcgacacagagtcagtcccagaccctcaaccaatcggagaacctcccgcagccccctcaggtgtgggatctcttacaatggcttcaggtggtggcgcaccagtggcagacaataacgaaggtgccgatggagtgggtagttcctcgggaaattggcattgcgattcccaatggctgggggacagagtcatcaccaccagcacccgaacctgggccctgcccacctacaacaatcacctctacaagcaaatctccaacagcacatctggaggatcttcaaatgacaacgcctacttcggctacagcaccccctgggggtattttgacttcaacagattccactgccacttctcaccacgtgactggcagcgactcatcaacaacaactggggattccggcctaagcgactcaacttcaagctcttcaacattcaggtcaaagaggttacggacaacaatggagtcaaggccatcgccaataaccttaccagcacggtccaggtcttcacggactcagactatcagctcccgtacgtgctcgggtcggctcacgagggctgcctcccgccgttcccagcggacgttttcatgattcctcagtacgggtatctgacgcttaatgatggaagccaggccgtgggtcgttcgtccttttactgcctggaatatttcccgtcgcaaatgctaagaacgggtaacaacttccagttcagctacgagtttgagaacgtacctttccatagcagctacgctcacagccaaagcctggaccgactaatgaatccactcatcgaccaatacttgtactatctctcaaagactattgacggttctggacagaatcaacaaacgctaaaattcagtgtggccggacccagcaacatggctgtccagggaagaaactacatacctggacccagctaccgacaacaacgtgtctcaaccactgtgactcaaaacaacaacagcgaatttgcttggcctggagcttcttcttgggctctcaatggacgtaatagcttgatggatcctggacctgctatggccagccacaaagaaggagaggaccgtttctttcctttgtctggatctttaatttttggcaaacaaggaactggaagagacaacgtggatgcggacaaagtcatgataaccaacgaagaagaaattaaaactactaacccggtagcaacggagtcctatggacaagtggccacaaaccaccagagtgcccaagcacaggcgcagaccggctgggttcaaaaccaaggaatacttccgggtatggtttggcaggacagagatgtgtacctgcaaggacccatttgggccaaaattcctcacacgggcggcaactttcacccttctccgctgatgggagggtttggaatgaagcacccgcctcctcagatcctcatcaaaaacacacctgtacctgcggatcctccaacggccttcaacaaggacaagctgaactctttcatcacccagtattctactggccaagtcagcgtggagatcgagtgggagctgcagaaggaaaacagcaagcgctggaacccggagatccagtacacttccaactattacaagtctaataatgttgaatttgctgttaatactgaaggtgtatatagtgaaccccgccccattggcaccagatacctgactcgtaatctg

SEQ ID NO: 627 - DNA, 2208 bp, Artificial Sequence
  Description of Artificial Sequence: Synthetic polynucleotide
atggctgccgatggttatcttccagattggctcgaggacaaccttagtgaaggaattcgcgagtggtgggctttgaaacctggagcccctcaacccaaggcaaatcaacaacatcaagacaacgctcgaggtcttgtgcttccgggttacaaataccttggacccggcaacggactcgacaagggggagccggtcaacgcagcagacgcggcggccctcgagcacgacaaggcctacgaccagcagctcaaggccggagacaacccgtacctcaagtacaaccacgccgacgccgagttccaggagcggctcaaagaagatacgtcttttgggggcaacctcgggcgagcagtcttccaggccaaaaagaggcttcttgaacctcttggtctggttgaggaagcggctaagacggctcctggaaagaagaggcctgtagagcagtctcctcaggaaccggactcctccgcgggtattggcaaatcgggtgcacagcccgctaaaaagagactcaatttcggtcagactggcgacacagagtcagtcccagaccctcaaccaatcggagaacctcccgcagccccctcaggtgtgggatctcttacaatggcttcaggtggtggcgcaccagtggcagacaataacgaaggtgccgatggagtgggtagttcctcgggaaattggcattgcgattcccaatggctgggggacagagtcatcaccaccagcacccgaacctgggccctgcccacctacaacaatcacctctacaagcaaatctccaacagcacatctggaggatcttcaaatgacaacgcctacttcggctacagcaccccctgggggtattttgacttcaacagattccactgccacttctcaccacgtgactggcagcgactcatcaacaacaactggggattccggcctaagcgactcaacttcaagctcttcaacattcaggtcaaagaggttacggacaacaatggagtcaagaccatcgccaataaccttaccagcacggtccaggtcttcacggactcagactatcagctcccgtacgtgctcgggtcggctcacgagggctgcctcccgccgttcccagcggacgttttcatgattcctcagtacgggtatctgacgcttaatgatggaagccaggccgtgggtcgttcgtccttttactgcctggaatatttcccgtcgcaaatgctaagaacgggtaacaacttccagttcagctacgagtttgagaacgtacctttccatagcagctacgctcacagccaaagcctggaccgactaatgaatccactcatcgaccaatacttgtactatctctcaaagactattaacggttctggacagaatcaacaaacgctaaaattcagtgtggccggacccagcaacatggctgtccagggaagaaactacatacctggacccagctaccgacaacaacgtgtctcaaccactgtgactcaaaacaacaacagcgaatttgcttggcctggagcttcttcttgggctctcaatggacgtaatagcttgatgaatcctggacctgctatggccagccacaaagaaggagaggaccgtttctttcctttgtctggatctttaatttttggcaaacaaggaactggaagagacaacgtggatgcggacaaagtcatgataaccaacgaagaagaaattaaaactactaacccggtagcaacggagtcctatggacaagtggccacaaaccaccagagtgcccaagcacaggcgcagaccggctgggttcaaaaccaaggaatacttccgggtatggtttggcaggacagagatgtgtacctgcaaggacccatttgggccaaaattcctcacacggacggcaactttcacccttctccgctgatgggagggtttggaatgaagcacccgcctcctcagatcctcatcaaaaacacacctgtacctgcggatcctccaacggccttcaacaaggacaagctgaactctttcatcacccagtattctactggccaagtcagcgtggagatcgagtgggagctgcagaaggaaaacagcaagcgctggaacccggagatccagtacacttccaactattacaagcctaataatgttgaatttgctgttaatactgaaggtgtatatagtgaaccccgccccattggcaccagatacctgactcgtaatctg

SEQ ID NO: 628 - DNA, 2208 bp, Artificial Sequence
  Description of Artificial Sequence: Synthetic polynucleotide
atggctgccgatggttatcttccagattggctcgaggacaaccttagtgaaggaattcgcgagtggtgggctttgaaacctggagcccctcaacccaaggcaaatcaacaacatcaagacaacgctcgaggtcttgtgcttccgggttacaaataccttggacccggcaacggactcgacaagggggagccggtcaacgcagcagacgcggcggccctcgagcacaacaaggcctacgaccagcagctcaaggccggagacaacccgtacctcaagtgcaaccacgccgacgccgagttccaggagcggctcaaagaagatacgtcttttgggggcaacctcgggcgagcagtcttccaggccaaaaagaggcctcttgaacctcttggtctggttgaggaagcggctaagacggctcctggaaagaagaggcctgtagagcagtctcctcaggaaccggactcctccgcgggtattggcaaatcgggtgcacagcccgctaaaaagagactcaatttcggtcagactggcgacacagagtcagtcccagaccctcaaccaatcggagaacctcccgcagccccctcaggtgtgagatctcttacaatggcttcaggtggtggcgcaccagtggcagacaataacgaaggtgccgatggagtgggtagttcctcgggaaattggcattgcgattcccaatggctgggggacagagtcatcaccaccagcacccgaacctgggccctgcccacctacaacaatcacctctacaagcaaatctccaacagcacatctggaggatcttcaaatgacaacgcctacctcggctacagcaccccctgggggtattttgacttcaacagattccactgccacttctcaccacgtgactggcagcgactcatcaacaacaactggggattccggcctaagcgactcaacttcaagctcttcaacattcaggtcaaagaggttacggacaacaatggagtcaagaccatcgccaataaccttaccagcacggtccaggtcttcacggactcagactatcagctcccgtacgtgctcgggtcggctcacgagggctgcctcccgccgttcccagcggacgttttcatgattcctcagtacgggtatctgacgcttaatgatggaagccaggccgtgggtcgttcgtccttttactgcctggaatatttcccgtcgcaaatgctaagaacgggtaacaacttccagttcagctacgagtttgagaacgtacctttccatagcagctacgctcacagccaaagcctggaccgactaatgaatccactcatcgaccaatacttgtactatctctcaaagactattaacggttctggacagaatcaacaaacgctaaaattcagtgtggccggacccagcaacatggctgtccagggaagaaactacatacctggacccagctaccgacaacaacgtgtctcaaccactgtgactcaaaacaacaacagcgaatttgcttggcctggagcttcttcttgggctctcaatggacgtaatagcttgatgaatcctggacctactatggccagccacaaagaaggagaggaccgtttctttcctttgtctggatctttaatttttggcaaacaaggaactggaagagacaacgtggatgcggacaaagtcatgataaccaacgaagaagaaattaaaactactaacccggtagcaacggagtcctatggacaagtggccacaaaccaccagagtgcccaagcacaggcgcagaccggctgggttcaaaaccaaggaatacttccgggtatggtttggcaggacagagatgtgtacctgcaaggacccatttgggccaaaattcctcacacggacggcaactttcacccttctccgctgatgggagggtttggaatgaagcacccgcctcctcagatcctcatcaaaaacacacctgtacctgcggatcctccaacggccttcaacaaggacaagctgaactctttcatcacccagtattctactggccaagtcagcgtggagatcgagtgggagctgcagaaggaaaacagcaagcgctggaacccggagatccagtacacttccaactattacaagtctaataatgttgaatttgctgttaatactgaaggtgtatatagtgaaccccgccccattggcaccagatacctgactcgtaatctg

SEQ ID NO: 629 - DNA, 2208 bp, Artificial Sequence
  Description of Artificial Sequence: Synthetic polynucleotide
atggctgccgatggttatcttccagattggctcgaggacaaccttagtgaaggaattcgcgagtggtgggctttgaaacctggagcccctcaacccaaggcaaatcaacaacatcaagacaacgctcgaggtcttgtgcttccgggttacaaataccttggacccggcaacggactcgacaagggggagccggtcaacgcagcagacgcggcggccctcgtgcacgacaaggcctacgaccagcagctcaaggccggagacaacccgtacctcaagtgcaaccacgccgacgccgagttccaggagcggctcaaagaagatacgtcttttgggggcaacctcgggcgagcagtcttccaggccaaaaagaggcttcttgaacctcttggtctggttgaggaagcggctaagacggctcctggaaagaagaggcctgtagagcagtctcctcaggaaccggactcctccgcgggtattggcaaatcgggtgcacagcccgctaaaaagagactcaatttcggtcagactggcgacacagagtcagtcccagaccctcaaccaatcggagaacctcccgcagccccctcaggtgtgggatctcttacaatggcttcaggtggtggcgcaccagtggcagacaataacgaaggtgccgatggagtgggtagttcctcgggaaattggcattgcgattcccaatggctgggggacagagtcatcaccaccagcacccgaacctgggccctgcccacctacaacaatcacctctacaagcaaatctccaacagcacatctggaggatcttcaaatgacaacgcctacctcggctacagcaccccctgggggtattttgacttcaacagattccactgccacttctcaccacgtgactggcagcgactcatcaacaacaactggggattccggcctaagcgactcaacttcaagctcttcaacattcaggtcaaagaggttacggacaacaatggagtcaagaccatcgccaataaccttaccagcacggtccaggtcttcacggactcagactatcagctcccgtacgtgctcgggtcggctcacgagggctgcctcccgccgttcccagcggacgttttcacgattcctcagtacgggtatctgacgcttaatgatggaagccaggccgtgggtcgttcgtccttttactgcctggaatatttcccgtcgcaaatgctaagaacgggtaacaacttccagttcagctacgagtttgagaacgtacctttccatagcagctacgctcacagccaaagcctggaccgactaatgaatccactcatcgaccaatacttgtactatctctcaaagactattaacggttctggacagaatcaacaaacgctaaaattcagtgtggccggacccagcaacatggctgtccagggaagaaactacatacctggacccagctaccgacaacaacgtgtctcaaccactgtgactcaaaacaacaacagcgaatttgcttggcctggagcttcttcttgggctctcaatggacgtaatagcttgatgaatcctggacctgctatggccagccacaaagaaggagaggaccgtttctttcctttgtctggatctttaatttttggcaaacaaggaactggaagagacaacgtggatgcggacaaagtcatgataaccaacgaagaagaaattaaaactactaacccggtagcaacggagtcctatggacaagtggccacaaaccaccagagtgcccaagcacaggcgcagaccggctgggttcaaaaccaaggaatacttccgggtatggtttggcaggacagagatgtgtacctgcaaggacccatttgggccaaaattcctcacacggacggcaactttcacccttctccgctgatgggagggtttggaatgaagcacccgcctcctcagatcctcatcaaaaacacacctgtacctgcggatcctccaacggccttcaacaaggacaagctgaactctttcatcacccagtattctactggccaagtcagcgtggagatcgagtgggagctgcagaaggaaaacagcaagcgctggaacccggagatccagtacacttccaactattacaagtctaataatgttgaatttgctgttaatactgaaggtgtatatagtgaaccccgccccattgggccccgatacctgactcgtaatttt

SEQ ID NO: 630 - DNA, 2208 bp, Artificial Sequence
  Description of Artificial Sequence: Synthetic polynucleotide
atggctgccgatggttatcttccagattggctcgaggacaaccttagtgaaggaattcgcgagtggtgggctttgaaacctggagcccctcaacccaaggcaaatcaacaacatcaagacaacgctcgaggtcttgtgcttccgggttacaaataccttggacccggcaacggactcgacaagggggagccggtcaacgcagcagacgcggcggccctcgagcacaacaaggcctacgaccagcagctcaaggccggagacaacccgtacctcaagtgcaaccacgccgacgccgagttccaggagcggctcaaagaagatacgtcttttgggggcaacctcgggcgagcagtcttccaggccaaaaagaggcttcttgaacctcttggtctggttgaggaagcggctaagacggctcctggaaagaagaggcctgtagagcagtctcctcaggaaccggactcctccgcgggtattggcaaatcgggtgcacagcccgctaaaaagagactcaatttcggtcagactggcgacacagagtcagtcccagaccctcaaccaatcggagaacctcccgcagccccctcaggtgtgagatctcttacaatggcttcaggtggtggcgcaccagtggcagacaataacgaaggtgccgatggagtgggtagttcctcgggaaattggcattgcgattcccaatggctgggggacagagtcatcaccaccagcacccgaacctgggccctgcccacctacaacaatcacctctacaagcaaatctccaacagcacatctggaggatcttcaaatgacaacgcctacctcggctacagcaccccctgggggtattttgacttcaacagattccactgccacttctcaccacgtgactggcagcgactcatcaacaacaactggggattccggcctaagcgactcaacttcaagctcttcaacattcaggtcaaagaggttacggacaacaatggagtcaagaccatcgccaataaccttaccagcacggtccaggtcttcacggactcagactatcagctcccgtacgtgctcgggtcggctcacgagggctgcctcccgccgttcccagcggacgttttcatgattcctcagtacgggtatctgacgcttaatgatggaagccaggccgtgggtcgttcgtccttttactgcctggaatatttcccgtcgcaaatgctaagaacgggtaacaacttccagttcagctacgagtttgagaacgtacctttccatagcagctacgctcacagccaaagcctggaccgactaatgaatccactcatcgaccaatacttgtactatctctcaaagactattaacggttctggacagaatcaacaaacgctaaaattcagtgtggccggacccagcaacatggctgtccagggaagaaactacatacctggacccagctaccgacaacaacgtgtctcaaccactgtgactcaaaacaacaacagcgaatttgcttggcctggagcttcttcttgggctctcaatggacgtaatagcttgatgaatcctggacctgctatggccagccacaaagaaggagaggaccgtttctttcctttgtctggatctttaatttttggcaaacaaggaactggaagagacaacgtggatgcggacaaagtcatgataaccaacgaagaagaaattaaaactactaacccggtagcaacggagtcctatggacaagtggccacaaaccaccagagtgcccaagcacaggcgcagaccggctgggttcaaaaccaaggaatacttccgggtatggtttggcaggacagagatgtgtacctgcaaggacccatttgggccaaaattcctcacacggacggcaactttcacccttctccgctgatgggagggtttggaatgaagcacccgcctcctcagatcctcatcaaaaacacacctgtacctgcggatcctccaacggccttcaacaaggacaagctgaactctttcatcacccagtattctactggccaagtcagcgtggagatcgagtgggagctgcagaaggaaaacagcaagcgctggaacccggagatccagtacacttccaactattacaagtctaataatgttgaatttgctgttaatactgaaggtgtatatagtgaaccccgccccattggcaccagatacctgactcgtaatctg

SEQ ID NO: 631 - DNA, 2208 bp, Artificial Sequence
  Description of Artificial Sequence: Synthetic polynucleotide
atggctgccgatggttatcttccagattggctcgaggacaaccttagtgaaggaattcgcgagtggtgggctttgaaacctggagcccctcaacccaaggcaaatcaacaacatcaagacaacgctcgaggtcttgtgcttccgggttacaaataccttggacccggcaacggactcgacaagggggagccggtcaacgcagcagacgcggcggccctcgagcacgacaaggcctacgaccagcagctcaaggccggagacaacccgtacctcaagtgcaaccacgccgacgccgagttccaggagcggctcaaagaagatacgtcttttgggggcaacctcgggcgagcagtcttccaggccaaaaagaggcttcttgaacctcttggtctggttgaggaagcggctaagacggctcctggaaagaagaggcctgtagagcagtctcctcaggaaccggactcctccgcgggtattggcaaatcgggtgcacagcccgctaaaaagagactcaatttcggtcagactggcgacacagagtcagtcccagaccctcaaccaatcggagaacctcccgcagccccctcaggtgtgggatctcttacaatggcttcaggcggtggcgcaccagtggcagacaataacgaaggtgccgatggagtgggtagttcctcgggaaattggcattgcgattcccaatggctgggggacagagtcatcaccaccagcacccgaacctgggccctgcccacctacaacaatcacctctacaagcaaatctccaacagcacatctggaggatcttcaaatgacaacgcctacctcggctacagcaccccctgggggtattttgacttcaacagattccactgccacttctcaccacgtgactggcagcgactcatcaacaacaactggggattccggcctaagcgactcaacttcgagctcttcaacattcaggtcaaagaggttacggacaacaatggagtcaagaccatcgccaataaccttaccagcacggtccaggtcttcacggactcagactatcagctcccgtacgtgctcgggtcggctcacgagggctgcctcccgccgttcccagcggacgttttcatgattcctcagtacgggtatctgacgcttaatgatggaagccaggccgtgggtcgttcgtccttttactgcctggaatatttcccgtcgcaaatgctaagaacgggtaacaacttccagtccagctacgagtttgagaacgtacctttccatagcagctacgctcacagccaaagcctggaccgactaatgaatccactcatcgaccaatacttgtactatctctcaaagactattaacggttctggacagaatcaacaaacgctaaaattcagtgtggccggacccagcaacatggctgtccagggaagaaactacatacctggacccagctaccgacaacaacgtgcctcaaccactgtgactcaaaacaacaacagcgaatttgcttggcctggagcttcttcttgggctctcaatggacgtaatagcttgatgaatcctggacctgctatggccagccacaaagaaggggaggaccgtttctttcctttgtctggatctttaatttttggcaaacaaggaactggaagagacaacgtggatgcggacaaagtcatgataaccaacgaagaagaaattaaaactactaacccggtagcaacggagtcctatggacaagtggccacaaaccaccagagtgcccaagcacaggcgcagaccggctgggttcaaaaccaaggaatacttccgggtatggtttggcaggacagagatgtgtacctgcaaggacccatttgggccaaaattcctcacacggacggcaactttcacccttctccgctgatgggagggtttggaatgaagcacccgcctcctcagatcctcatcaaaaacacacctgtacctgcggatcctccaacggccttcaacaaggacaagctgaactctttcatcacccagtattctactggccaagtcagcgtggagatcgagtgggagctgcagaaggaaaacagcaagcgctggaacccggagatccagtacacttccaactattacaagtctaataatgttgaatttgctgttaatactgaaggtgtatatagtgaaccccgccccattggcaccagatacctgactcgtaatctg

SEQ ID NO: 632 - DNA, 2208 bp, Artificial Sequence
  Description of Artificial Sequence: Synthetic polynucleotide
atggctgccgatggttatcttccagattggctcgaggacaaccttagtgaaggaattcgcgagtggtgggctttgaaacctggagcccctcaacccaaggcaaatcaacaacatcaagacaacgctcgaggtcttgtgcttccgggttacaaataccttggacccggcaacggactcgacaagggggagccggtcaacgcagcagacgcggcggccctcgagcacgacaaggcctacgaccagcagctcaaggccggagacaacccgtacctcaagtgcaaccacgccgacgccgagttccaggagcggctcaaagaagatacgtcttttgggggcaacctcgggcgagcagtcttccaggccaaaaagaggcttcttgaacctcttggtctggttgaggaagcggctaagacggctcctggaaagaagaggcctgtagagcagtctcctcaggaaccggactcctccgcgggtattggcaaatcgggtgcacagcccgctaaaaagagactcaatttcggtcagactggcgacacagagtcagtcccagaccctcaaccaatcggagaacctcccgcagcccccccaggtgtgggatctcttacaatggcttcaggtggtggcgcaccagtggcggacaataacgaaggtgccgatggagtgggtagttcctcgggaaattggcattgcgattcccaatggctgggggacagagtcatcaccaccagcacccgaacctgggccctgcccacctacaacaatcacctctacaagcaaatctccaacagcacatctggaggatcttcaaatgacaacgcctacctcggctacagcaccccctgggggtattttgacttcaacagattccactgccacttctcaccacgtgactggcagcgactcatcaacaacaactggggattccggcctaagcgactcaacttcaagctcttcaacattcaggtcaaagaggttacggacaacaatggagtcaagaccatcgccaataaccttaccagcacggtccaggtcttcacggactcagactatcagctcccgtacgtgctcgggtcggctcacgagggctgcctcccgccgttcccagcggacgttttcatgattcctcagtacgggtatctgacgcttaatgatggaagccaggccgtgggtcgttcgtccttttactgcctggaatatttcccgtcgcaaatgctaagaacgggtaacaacttccagttcagctacgagtttgagaacgtacctttccatagcagctacgctcacagccaaagcctggaccgactaatgaatccactcatcgaccaatacttgtactatctctcaaagactattagcggttctggacagaatcaacaaacgctaaaattcagtgtggccggacccagcaacatggctgtccagggaagaaactacatacctggacccagctaccgacaacaacgtgtctcaaccactgtgactcaaaacaacagcagcgaatttgcttggcctggagcttcttcttgggctctcaatggacgtaatagcttgatgaatcctggacctgctatggccagccacaaagaaggagaggaccgtttctttcctttgtctggatctttaatttttggcaaacaaggaactggaagagacaacgtggatgcggacaaagtcatgataaccaacgaagaagaaattaaaactactaacccggtagcaacggagtcctatggacaagtggccacaaaccaccagagtgcccaagcacaggcgcagaccggctgggttcaaaaccaaggaatactttcgggtatggtttggcaggacagagatgtgtacctgcaaggacccatttgggccaaaattcctcacacggacggcaactttcacccttctccgctgatgggagggtttggaatgaagcacccgcctcctcagatcctcatcaaaaacacacctgtacctgcggatcctccaacggccttcaacaaggacaagctgaactctttcatcacccagtattctactggccaagtcagcgtggagatcgagtgggagctgcagaaggaaaacagcaagcgctggaacccggagatccagtacacttccaactattacaagtctaataatgttgaatttgctgttaatactgaaggtgtatatagtgaaccccgccccattggcaccagatacctgactcgtaatctg

SEQ ID NO: 633 - DNA, 2208 bp, Artificial Sequence
  Description of Artificial Sequence: Synthetic polynucleotide
atggctgccgatggttatcttccagattggctcgaggacaaccttagtgaaggaattcgcgagtggtgggctttgaaacctggagcccctcaacccaaggcaaatcaacaacatcaagacaacgctcgaggtcttgtgcttccgggttacaaataccttggacccggcaacggactcgacaagggggagccggtcaacgcagcagacgcggcggccctcgagcacgacaaggcctacgaccagcagctcaaggccggagacaacccgtacctcaagtgcaaccacgccgacgccgagttccaggagcggctcaaagaagatacgtcttttgggggcaacctcgggcgagcagtcttccaggccaaaaagaggcttcttgaacctcttggtctggttgaggaagcggctaagacggctcctggaaagaagaggcctgtagagcagtctcctcaggaaccggactcctccgcgggtattggcaaatcgggtgcacagcccgctaaaaagagactcaatttcggtcagactggcgacacagagtcagtcccagaccctcaaccaatcggagaacctcccgcagccccctcaggtgtgggatctcttacaatggcttcaggtggtggcgcaccagtggcagacaataacgaaggtgccgatggagtgggtagttcctcgggaaattggcattgcgattcccaatggctgggggacagagtcatcaccaccagcacccgaacctgggccctgcccacctacaacaatcacctctacaagcaaatctccaacagcacatctggaggatcttcaaatgacaacgcctacctcggctacagcaccccctgggggtattttgacttcaacagattccactgccacttctcaccacgtgactggcagcgactcatcaacaacaactggggattccggcctaagcgactcaacttcaagctcttcaacattcaggtcaaagaggttacggacaacaatggagtcaagaccatcgccaataaccttaccagcacggtccaggtcttcacggactcagactatcagctcccgtacgtgctcgggtcggctcacgagggctgcctcccgccgttcccagcggacgttttcatgattcctcagtacgggtatctgacgcttaatgatggaagccaggccgtgggtcgttcgtccttttactgcctggaatatttcccgtcgcaaatgctaagaacgggtaacaacttccagttcagctacgagtttgagaacgtacctttccatagcagctacgctcacagccaaagcctggaccgactaatgaatccactcatcgaccaatacttgtactatctctcaaagactattaacggttctggacagaatcaacaaacgctaaaattcagtgtggccggacccagcaacatggctgtccagggaagaaactacatacctggacccagctaccgacaacaacgtgtctcaaccactgtgactcaaaacaacaacagcgaatttgcttggcctggagcttcttcttgggctctcaatggacgtaatagcttgatgaatcctggacctgctatggccagccacaaagaaggagaggaccgtttctttcctttgtctggatctttaatttttggcaaacaaggaactggaagagacaacgtggatgcggacaaagtcatgataaccaacgaagaagaaattaaaactactaacccggtagcaacggagtcctatggacaagtggccacaaaccaccagagtgcccaagcacaggcgcagaccggctgggttcaaaaccaaggaatacttccgggtatggtttggcaggacagagatgtgtacctgcaaggacccatttgggccaaaattcctcacacggacggcaactttcacccttctccgctgatgggagggtttggaatgaagcacccgcctcctcagatcctcatcaaaaacacacctgtacctgcggatcctccaacggccttcaacaaggacaagctgaactctttcatcacccagtattctactggccaagtcagcgtggagatcgagtgggagctgcagaaggaaaacagcaagcgctggaacccggagatccagtacacttccaactattacaagtctaataatgttgaatttgctgttaatactgaaggtgtatatagtgaaccccgccccattggcaccagatacctgactcgtaatctg

SEQ ID NO: 634 - DNA, 2208 bp, Artificial Sequence; identical to SEQ ID NO: 633
  Description of Artificial Sequence: Synthetic polynucleotide

SEQ ID NO: 635 - DNA, 2208 bp, Artificial Sequence
  Description of Artificial Sequence: Synthetic polynucleotide
atggctgccgatggttatcttccagattggctcgaggacaaccttagtgaaggaattcgcgagtggtgggctttgaaacctggagcccctcaacccaaggcaaatcaacaacatcaagacaacgctcgaggtcttgtgcttccgggttacaaataccttggacccggcaacggactcgacaagggggagccggtcaacgcagcagacgcggcggccctcgagcacgacaaggcctacgaccagcagctcaaggccggagacaacccgtacctcaagtgcaaccacgccgacgccgagttccaggagcggctcaaagaagatacgtcttttgggggcaacctcgggcgagcagtcttccaggccaaaaagaggcttcttgaacctcttggtctggttgaggaagcggctaagacggctcctggaaagaagaggcctgtagagcagtctcctcaggaaccggactcctccgcgggtattggcaaatcgggtgcacagcccgctaaaaagagactcaatttcggtcagactggcgacacagagtcagtcccagaccctcaaccaatcggagaacctcccgcagccccctcaggtgtgggatctcttacaatggcttcaggtggtggcgcaccagtggcagacaataacgaaggtgccgatggagtgggtagttcctcgggaaattggcattgcgattcccaatggctgggggacagagtcatcaccaccagcacccgaacctgggccctgcccacctacaacaatcacctctacaagcaaatctccaacagcacatctggaggatcttcaaatgacaacgcctacctcgactacagcaccccctgggggtattttgacttcaacagattccactgccacttctcaccacgtgactggcagcggctcatcaacaacaactggggattccggcctaagcgactcaacttcaagctcttcaacattcaggtcaaagaggttacggacaacaatggagtcaagaccatcgccaataaccttaccagcacggtccaggtcttcacggactcagactatcagctcccgtacgtgctcgggtcggctcacgagggctgcctcccgccgttcccagcggacgttttcatgattcctcagtacgggtatctgacgcttaatgatggaagccaggccgtgggtcgttcgtccttttactgcctggaatatttcccgtcgcaaatgctaagaacgggtaacaacttccagttcagctacgagtttgagaacgtacctttccatagcagctacgctcacagccaaagcctggaccgactaatgaatccactcatcgaccaatacttgtactatctctcaaagactattaacggttctggacagaatcaacaaacgctaaaattcagtgtggccggacccagcaacatggctgtccagggaagaaactacatacctggacccagctaccgacaacaacgtgtctcaaccactgtgactcaaaacaacaacagcgaatttgcttggcctggagcttcttcttgggctctcaatggacgtaatagcttgatgaatcctggacctgctatggccagccacaaagaaggagaggaccgtttctttcctttgtctggatctttaatttttggcaaacaaggaactggaagagacaacgtggatgcggacaaagtcatgataaccaacgaagaagaaattaaaactactaacccggtagcaacggagtcctatggacaagtggccacaaaccaccagagtgcccaagcacaggcgcagaccggctgggttcaaaaccaaggaatacttccgggtatggtttggcagggcagagatgtgtacctgcaaggacccatttgggccaaaattcctcacacggacggcaactttcacccttctccgctgatgggagggtttggaatgaagcacccgcctcctcagatcctcatcaaaaacacacctgtacctgcggatcctccaacggccttcaacaaggacaagctgaactctttcatcacccagtattctactggccaagtcagcgtggagatcgagtgggagctgcagaaggaaaacagcaagcgctggaacccggagatccagtacacttccaactattacaagtctaataatgttgaatttgctgttaatactgaaggtgtatatagtgaaccccgccccattggcaccagatacctgactcgtaatctg

SEQ ID NO: 636 - DNA, 2208 bp, Artificial Sequence; identical to SEQ ID NO: 633
  Description of Artificial Sequence: Synthetic polynucleotide

SEQ ID NO: 637 - DNA, 2208 bp, Artificial Sequence
  Description of Artificial Sequence: Synthetic polynucleotide
atggctgccgatggttatcctccagattggctcgaggacaaccttagtgaaggaattcgcgagtggtgggctttgaaacctggagcccctcaacccaaggcaaatcaacaacatcaagacaacgctcgaggtcttgtgcttccgggttacaaataccttggacccggcaacggactcgacaagggggagccggtcaacgcagcagacgcggcggccctcgagcacgacaaggcctacgaccagcagctcaaggccggggacaacccgcacctcaagtacaaccacgccgacgccgagttccaggagcggctcaaagaagatacgtcttttgggggcaacctcgggcgagcagtcttccaggccaaaaagaggcttcttgaacctcttggtctggttgaggaagcggctaagacggctcctggaaagaagaggcccgtagagcagtctcctcaggaaccggactcctccgcgggtattggcaaatcgggtgcacagcccgctaagaagagactcaatttcggtcagactggcgacactgagtcagtcccagaccctcaaccaatcggagaacctcccgcagccccctcaggtgtgggatctcttacaatggcttcaggtggtggcgcaccagtggcagacaataacgaaggtgccgatggagtgggtagttcctcgggaaattggcattgcgattcccaatggctgggggacagagtcatcaccaccagcacccgaacctgggccctgcccacctacaacaatcacctctacaagcaaatctccaacagcacatctggaggatcttcaaatgacaacgcctacttcggctacagcaccccctgggggtattttgacttcaacagattccactgccacttctcaccacgtgactggcagcgactcatcaacaacaactggggattccggcctaagcgactcaacttcaagctcttcaacattcaggtcaaagaggttacggacaacaatggagtcaagaccatcgccaataaccttaccagcacggtccaggtcttcacggactcagactatcagctcccgtacgtgctcgggtcggctcacgagggctgcctcccgccgttcccagcggacgttttcatgattcctcagtacgggtatctgacgcttaatgatggaagccaggccgtgggtcgttcgtccttttactgcctggaatatttcccgtcgcaaatgctaagaacgggtaacaacttccagttcagctacgagtttgagaacgtacctttccatagcagctacgctcacagccaaagcctggaccgactaatgaatccactcatcgaccaatacttgtactatctctcaaagactattaacggttctggacagaatcaacaaacgctaaaattcagtgtggccggacccagcaacatggctgtccagggaagaaactacatacctggacccagctaccgacaacaacgtgtctcaaccactgtgactcaaaacaacaacagcgaatttgcttggcctggagcttcttcttgggctctcaatggacgtaatagcttgatgaatcctggacctgctatggccagccacaaagaaggagaggaccgtttctttcctttgtctggatctttaatttttggcaaacaaggaactggaagagacaacgtggatgcggacaaagtcatgataaccaacgaagaagaaattaaaactactaacccggtagcaacggagtcctatggacaagtggccacaaaccaccagagtgcccaagcacaggcgcagaccggctgggttcaaaaccaaggaatacttccgggtatggtttggcaggacagagatgtgtacctgcaaggacccatttgggccaaaattcctcacacggacggcaactttcacccttctccgctgatgggagggtttggagtgaagcacccgcctcctcagatcctcatcaaaaacacacctgtacctgcggatcctccaacggccttcaacaaggacaggctgaactctttcatcacccagtattctactggccaagtcagcgtggagatcgagtgggagctgcagaaggaaaacagcaagcgctggaacccggagatccagtacacttccaactattacaagtctaataatgttgaatttgctgttaatactgaaggtgtatatagtgaaccccgccccattggcaccagatacctgactcgtaatctg

SEQ ID NO: 638 - DNA, 2208 bp, Artificial Sequence
  Description of Artificial Sequence: Synthetic polynucleotide
atggctgccgatggttatcttccagattggctcgaggacaaccttagtgaaggaattcgcgagtggtgggctttgaaacctggagcccctcaacccaaggcaaatcaacaacatcaagacaacgctcgaggtcttgtgcttccgggttacaaataccttggacccggcaacggactcgacaagggggagccggtcaacgcagcagacgcggcggccctcgagcacgacaaggcctacgaccagcagctcaaggccggagacaacccgtacctcaagtacaaccacgccgacgccgagttccaggagcggctcaaagaagatacgtcttttgggggcaacctcgggcgagcagtcttccaggccaaaaagaggcttcttgaacctcttggtctggttgaggaagcggctaagacggctcctggaaagaagaggcctgtagagcagtctcctcaggaaccggactcctccgcgggtattggcaaatcgggtgcacagcccgctaaaaagagactcaatttcggtcagactggcgacacagagtcagtcccagaccctcaaccaatcggagaacctcccgcagccccctcaggtgtgggatctcttacaatggcttcaggtggtggcgcaccagtggcggacaataacgaaggtgccgatggagtgggtagttcctcgggaaattggcattgcgattcccaatggctgggggacagagtcatcaccaccagcacccgaacctgggccctgcccacctacaacaatcacctctacaagcaaatctccaacagcacatctggaggatcttcaaatgacaacgcctacttcggctacagcaccccctgggggtattttgacttcaacagattccactgccacttctcaccacgtgactggcagcgactcatcaacaacaactggggattccggcctaagcgactcaacttcaagctcttcaacattcaggtcaaagaggttacggacaacaatggagtcaagaccatcgccaataaccttaccagcacggtccaggtcttcacggactcagactatcagctcccgtacgtgctcgggtcggctcacgagggctgcctcccgccgttcccagcggacgttttcatgattcctcagtacgggtatctgacgcttaatgatggaagccaggccgtgggtcgttcgtccttttactgcctggaatatttcccgtcgcaaatgctaagaacgggtaacaacttccagttcagctacgagtttgagaacgtacctttccatagcagctacgctcacagccaaagcctggaccgactaatgaatccactcatcgaccaatacttgtactatctctcaaagactattaacggttctggacagaatcaacaaacgctaaaattcagtgtggccggacccagcaacatggctgtccagggaagaaactacatacctggacccagctaccgacaacaacgtgtctcaaccactgtgactcaaaacaacaacagcgaatttgcttggcctggagcttcttcttgggctctcaatggacgtaatagtttgatgaatcctggacctgctatggccagccacaaagaaggagaggaccgtttctttcctttgtctggatctttaatttttggcaaacaaggaactggaagagacaacgtggatgcggacaaagtcatgataaccaacgaagaagaaattaaaactactaacccggtagcaacggagtcctatggacaagtggccacaaaccaccagagtgcccaagcacaggcgcagaccggctgggttcaaaaccaaggaatacttccgggtatggtttggcaggacagagatgtgtacctgcaaggacccatttgggccaaaattcctcacacggacggcaactttcacccttctccgctgatgggagggtttggagtgaagcacccgcctcctcagatcctcatcaaaaacacacctgtacctgcggatcctccaacggccttcaacaaggacaagctgaactctttcatcacccagtattctactggccaagtcagcgtggagatcgagtgggagctgcagaaggaaaacagcaagcgctggaacccggagatccagtacacttccaactattacaagtctaataatgttgaatttgctgttaatactgaaggtgtatatagtgaaccccgccccattggcaccagatacctgactcgtaatctg

SEQ ID NO: 639 - DNA, 2208 bp, Artificial Sequence
  Description of Artificial Sequence: Synthetic polynucleotide
atggctgccgatggttatcttccagattggctcgaggacaaccttagtgaaggaattcgcgagtggtgggctttgaaacctggagcccctcaacccaaggcaaatcaacaacatcaagacaacgctcgaggtcttgtgcttccgggttacaaataccttggacccggcaacggactcgacaagggggagccggtcaacgcagcagacgcggcggccctcgagcacgacaaggcctacgaccagcagctcaaggccggagacaacccgtacctcaagtacaaccacgccgacgccgagttccaggagcggctcaaagaagatacgtcttttgggggcaacctcgggcgagcagtcttccaggccaaaaagaggcttcttgaacctcttggtctggttgaggaagcggctaagacggctcctggaaagaagaggcctgtagagcagtctcctcaggaaccggactcctccgcgggtattggcaaatcgggtgcacagcccgctaaaaagagactcaatttcggtcagactggcgacacagagtcagtcccagaccctcaaccaatcggagaacctcccgcagccccctcaggtgtgggatctcttacaatggcttcaggtggtggcgcaccagtggcagacaataacgaaggtgccgatggagtgggtagttcctcgggaaattggcattgcgattcccaatggctgggggacagagtcatcaccaccagcacccgaacctgggccctgcccacttacaacaatcacctctacaagcaaatctccaacagcacatctggaggatcttcaaatgacaacgcctacttcggctacagcaccccctgggggtattttgacttcaacagattccactgccacttctcaccacgtgactggcagcgactcaccaacaacaactggggattccggcctaagcgactcaacttcaagctcttcaacattcaggtcaaagaggttacggacaacaatggagtcaagaccatcgccaataaccttaccagcacggtccaggtcttcacggactcagactatcagctcccgtacgtgctcgggtcggctcacgagggctgcctcccgccgttcccagcggacgttttcatgattcctcagtacgggtatctgacgcttaatgatggaagccaggccgtgggtcgttcgtccttttactgcctggaatatatcccgtcgcaaatgctaagaacgggtaacaacttccagttcagctacgagtttgagaacgtacctttccatagcagctacgctcacagccaaagcctggaccgactaatgaatccactcatcgaccaatacttgtactatctctcaaagactattaacggttctggacagaatcaacaaacgctaaaattcagtgtggccggacccagcaacatggctgtccagggaagaaactacatacctggacccagctaccgacaacaacgtgtctcaaccactgtgactcaaaacaacaacagcgaatttgcttggcctggagcttcttcttgggctctcaatggacgtaatagcttgatgaatcctggacctgctatggccagccacaaagaaggagaggaccgtttctttcctttgtctggatctttaatttttggcaaacaaggaactggaagagacaacgtggatgcggacaaagtcatgataaccaacgaagaagaaattaaaactactaacccggtagcaacggagtcctatggacaagtggccacaaaccaccagagtgcccaagcacaggcgcagaccggctgggttcaaaaccaaggaatacttccgggtatggtttggcaggacagagatgtgtacctgcaaggacccatttgggccaaaattcctcacacggacggcaactttcacccttctccgctgatgggagggtttggagtgaagcacccgcctcctcagatcctcatcaaaaacacacctgtacctgcggatcctccaacggccttcaacaaggacaagctgaactctttcatcacccagtattctactggccaagtcagcgtggagatcgagtgggagctgcagaaggaaaacagcaagcgctggaacccggagatccagtacacttccaactattacaagtctaataatgttgaatttgctgttaatactgaaggtgtatatagtgaaccccgccccattggcaccagatacctgactcgtaatctg

SEQ ID NO: 640 - DNA, 2208 bp, Artificial Sequence
  Description of Artificial Sequence: Synthetic polynucleotide
atggctgccgatggttatcttccagattggctcgaggacaaccttagtgaaggaattcgcgagtggtgggctttgaaacctggagcccctcaacccaaggcaaatcaacaacatcaagacaacgctcgaggtcttgtgcttccgggttacaaataccttggacccggcaacggactcgacaagggggagccggtcaacgcagcagacgcggcggccctcgagcacgacaaggcctacgaccagcagctcaaggccggagacaacccgtacctcaagtacaaccacgccgacgccgagttccaggagcggctcaaagaagatacgtcttttgggggcaacctcgggcgagcagtcttccaggccaaaaagaggcttcttgaacctcttggtctggttgaggaagcggctaagacggctcctggaaagaagaggcctgtagagcagtctcctcaggaaccggactcctccgcgggtattggcaaatcgggtgcacagcccgctaaaaagagactcaatttcggtcagactggcgacacagagtcagtcccagaccctcaaccaatcggagaacctcccgcagccccctcaggtgtgggatctcttacaatggcttcaggtggtggcgcaccagtggcagacaataacgaaggtgccgatggagtgggtagttcctcgggaaattggcattgcgattcccaatggctgggggacagagtcatcaccaccagcacccgaacctgggccctgcccacctacaacaatcacctctacaagcaaatctccaacagcacatctggaggatcttcaaatgacaacgcctacttcggctacagcaccccctgggggtattttgacttcaacagattccactgccacttctcaccacgtgactggcagcgactcatcaacaacaactggggattccggcctaagcgactcaacttcaagctcttcaacattcaggtcaaagaggttacggacaacaatggagtcaagaccatcgccaataaccttaccagcacggtccaggtcttcacggactcagactatcagctcccgtacgtgctcgggtcggctcacgagggctgcctcccgccgttcccagcggacgttttcatgattcctcagtacgggtatctgacgcttaatgatggaagccaggccgtgggtcgttcgtccttttactgcctggaatatttcccgtcgcaaatgctaagaacgggtaacaacttccagtttagctacgagtttgagaacgtacctttccatagcagctacgctcacagccaaagcctggaccgactaatgaatccactcatcgaccaatacttgtactatctctcaaagactattaacggttctggacagaatcaacaaacgctaaaattcagtgtggccggacccagcaacatggctgtccagggaagaaactacatacctggacccagctaccgacaacaacgtgtctcaaccactgtgactcaaaacaacaacagcgaatttgcttggcctggagcttcttcttgggctctcaatggacgtaatagcttgatgaatcctggacctgctatggccagccacaaagaaggagaggaccgtttctttcctttgtctggatctttaatttctggcaaacaaggaactggaagagacaacgtggatgcgaacaaagtcatgataaccaacgaagaagaaattaaaactactaacccggtagcaacggagtcctatggacaagtggccacaaaccaccagagtgcccaagcacaggcgcagaccggctgggttcaaaaccaaggaatacttccgggtatggtttggcaggacagagatgtgtacctgcaaggacccatttgggccaaaattcctcacacggacggcaactttcacccttctccgctgatgggagggtttgaaatgaagcacccgcctcctcagatcctcatcaaaaacacacctgtacctgcggatcctccaacggccttcaacaaggacaagctgaactctttcatcacccagtattctactggccaagtcagcgtggagatcgagtgggagctgcagaaggaaaacagcaagcgctggaacccggagatccagtacacttccaactattacaagtctaataatgttgaatttgctgttaatactgaaggtgtatatagtgaaccccgccccattggcaccagatacctgactcgtaatctg

SEQ ID NO: 641 - DNA, 2208 bp, Artificial Sequence
  Description of Artificial Sequence: Synthetic polynucleotide
atggctgccgatggttatcttccagattggctcgaggacaaccttagtgaaggaattcgcgagtggtgggctttgaaacctggagcccctcaacccaaggcaaatcaacaacatcaagacaacgctcgaggtcttgtgcttccgggttacaaataccttggacccggcaacggactcgacaagggggagccggtcaacgcagcagacgcggcggccctcgagcacgacaaggcctacgaccagcagctcaaggccggagacaacccgtacctcaagtacaaccacgccgacgccgagttccaggagcggctcaaagaagatacgtcttttgggggcaacctcgggcgagcagtcttccaggccaaaaagaggcttcttgaacctcttggtctggttgaggaagcggctaagacggctcctggaaagaagaggcctgtagagcagtctcctcaggaaccggactcctccgcgggtattggcaaatcgggtgcacagcccgctaaaaagagactcaatttcggtcagactggcgacacagagtcagtcccagaccctcaaccaatcggagaacctcccgcagccccctcaggtgtgggatctcttacaatagcttcaggtggtggcgcaccagtggcagacaataacgaaggtgccgatggagtgggtagttcctcgggaaattggcattgcgattcccaatggctgggggacagagtcatcaccaccagcacccgaacctgggccctgcccacctacaacaatcacctctacaagcgaatctccaacagcacatctggaggatcttcaaatgacaacgcctacttcggctacagcaccccctgggggtattttgacttcaacagattccactgccacttctcaccacgtgactggcagcgactcatcaacaacaactggggattccggcctaagcgactcaacttcaagcttttcaacattcgggtcaaagaggttacggacaacaatggagtcaagaccatcaccaataaccttaccagcacggtccaggtcttcacggactcagactatcagctcccgtacgtgcttgggtcggctcacgagggctgcctcccgccgttcccagcggacgttttcatgattcctcagtacgggtatctgacgcttaatgatggaagccaggccgtgggtcgttcgtccttttactgcctggaatatttcccgtcgcaaatgctaagaacgggtaacaacttccagttcagctacgagtttgagaacgtacctttccatagcagctacgctcacagccaaagcctggaccgactaatgaatccactcatcgaccaatacttgtactatctctcaaagactattaacggttctggacagaatcaacaaacgctaaaattcagtgtggccggacccagcaacatggctgtccagggaagaaactacatacctggacccagctaccgacaacaacgtgtctcaaccactgtgactcgaaacaacaacagcgaatttgcttggcctggagcttcttcttgggctctcaatggacgtaatagcttgatgaatcctggacctgctatggccagccacaaagaaggagaggaccgtttctttcctttgtctggatctttaatttttggcaaacaaggaactggaagagacaacgtggatgcggacaaagtcatgataaccaacgaagaagaaattaaaactactaacccggtagcaacggagtcctatggacaagtggccacaaaccaccagagtgcccaagcacaggcgcagaccggctgggttcaaaaccaaggaatacttccgggtatggtttggcaggacagagatgtgtacctgcaaggacccatttgggccaaaattcctcacacggacggcaactttcacccttctccgctgatgggagggtttggagtgaagcacccgcctcctcagatcctcatcaaaaacacacctgtacctgcggatcctccaacggccttcaacaaggacaagctgaactctttcatcacccagtattctactggccaagtcagcgtggagatcgagtgggagctgcagaaggaaaacagcaagcgctggaacccggagatccagtacacttccaactattacaagtctaataatgttgaatttgctgttaatactgaaggtgtatatagtgaaccccgccccattggcaccagatacctgactcgtaatctg

SEQ ID NO: 642 - DNA, 2208 bp, Artificial Sequence
  Description of Artificial Sequence: Synthetic polynucleotide
atggctgccgatggttatcttccagattggctcgaggacaaccttagtgaaggaattcgcgagtggtgggctttgaaacctggagcccctcaacccaaggcaaatcaacaacatcaagacaacgctcgaggtcttgtgcttccgggttacaaataccttggacccggcaacggactcgacaagggggagccggtcaacgcagcagacgcggcggccctcgagcacgacaaggcctacgaccagcagctcaaggccggagacaacccgtacctcaagtacaaccacgccgacgccgagttccaggagcggctcaaagaagatacgtcttttgggggcaacctcgggcgagcagtcttccaggccaaaaagaggcttcttgaacctcttggtctggttgaggaagcggctaagacggctcctggaaagaagaggcctgtagagcagtctcctcaggaaccggactcctccgcgggtattggcaaatcgggcgcacagcccgctaaaaagagactcaatttcggtcagactggcgacacagagccagtcccagaccctcaaccaatcggagaacctcccgcagccccctcaggtgtgggatctcttacaatggcttcaggtggtggcgcaccagtggcagacaataacgaaggtgccgatggagtgggtagttcctcgggaaattggcattgcgattcccaatggctgggggacagagtcatcaccaccagcacccgaacctgggccctgcccacctacaacaatcacctctacaagcaaatctccaacagcacatctggaggatcttcaaatgacaacgcctacttcggctacagcaccccctgggggtattttgacttcaacagattccactgccacttctcaccacgtgactggcagcgactcatcaacaacaactggggattccggcctaagcgactcaacttcaagctcttcaacattcaggtcaaagaggttacggacaacaatggagtcaagaccatcgccaataaccttaccagcacggtccaggtcttcacggactcagactatcagctcccgtacgtgctcgggtcggctcacgagggctgcctcccgccgttcccagcgggcgttttcatgattcctcagtacgggtatctgacgcttaatgatggaagccaggccgtgggtcgttcgtccttttactgcctggaatatttcccgtcgcaaatgctaagaacgggtaacaacttccagttcagctacgagtttgagaacgtacctttccatagcagctacgctcacagccaaagcctggaccgactaatgaatccactcatcgaccaatacttgtactatctctcaaagactattaacggttctggacagaatcaacaaacgctaaaattcagtgtggccggacccagcaacatggctgtccagggaagaaactacatacctggacccagctaccgacaacaacgtgtctcaaccactgcgactcaaaacaacaacagcgaatttgcttggcctggagcttcttcttgggctctcaatggacgtaatagcttgatgaatcctggacctgctatggccagccacaaagaaggagaggaccgtttctttcctttgtctggatctttaatttttggcaaacaaggaactggaagagacaacgtggatgcggacaaagtcatgataaccaacgaagaagaaattaaaactactaacccggtagcaacggagtcctatggacaagtggccacaaaccaccagagtgcccaagcacaggcgcagaccggctgggttcaaaaccaaggaatacttccgggtatggtttggcaggacagagatgtgtacctgcaaggacccatttgggccaaaattcctcacacggacggcaactttcacccttctccgctgatgggagggtttggaatgaagcacccgcctcctcagatcctcatcaaaaacacacctgtacctgcggatcctccaacggccttcaacaaggacaagctgaactctttcatcacccagtattctactggccaagtcagcgtggagatcgagtgggagctgcagaaggaaaacagcaagcgctggaacccggagatccagtacacttccaactattacaagtctaataatgttgaatttgctgttaatactgaaggtgtatatagtgaaccccgccccattggcaccagatacctgactcgtaatctg

SEQ ID NO: 643 - DNA, 2208 bp, Artificial Sequence
  Description of Artificial Sequence: Synthetic polynucleotide
atggctgccgatggttatcttccagattggctcgaggacaaccttagtgaaggaattcgcgagtggtgggctttgaaacctggagcccctcaacccaaggcaaatcaacaacatcaagacaacgctcgaggtcttgtgcttccgggttacaaataccttggacccggcaacggactcgacaagggggagccggtcaacgcagcagacgcggcggccctcgagcacgacaaggcctacgaccagcagctcaaggccggagacaacccgtacctcaagtacaaccacgccgacgccgggttccaggagcggctcaaagaagatacgtcttttgggggcaacctcgggcgagcagtcttccaggccaaaaagaggcttcttgaacctcttggtctggttgaggaagcggctaagacggctcctggaaagaagaggcctgtagagcagtctcctcaggaaccggactcctccgcgggtattggcaaatcgggtgcacagcccgctaaaaagagactcaatttcggtcagactggcgacacagagtcagtcccagtccctcaaccaatcggagaacctcccgcagccccctcaggtgtgggatctcttacaatggcttcaggtggtggcgcaccagtggcagacaataacgaaggtgccgatggagtgggtagttcctcgggaaattggcattgcgattcccaatggctgggggacagagtcatcaccaccagcacccgaacctgggccctgcccacctacaacaatcacctctacaagcaaatctccaacagcacatctggaggatcttcaaatgacaacgcctacttcggctacagcaccccctgggggtattttgacttcaacagattccactgccacttctcaccacgtgactggcagcgactcatcaacaacaactggggattccggcctaagcgactcaacttcaagctcttcaacattcaggtcaaagaggttacggacaacaatggagtcaagaccatcgccaataaccttaccagcacggtccaggtcttcacggactcagactatcagctcccgtacgtgctcgggtcggctcacgagggctgcctcccgccgttcccagcggacgttttcatgattcctcagtacgggtatctgacgcttaatgatggaagccaggccgtgggtcgttcgtccttttactgcctggaatatttcccgtcgcaaatgctaagaacgggtaacaacttccagttcagctacgagtttgagaacgtacctttccatagcagctacgctcacagccaaagcctggaccgactaatgaatccactcatcgaccaatacttgtactatctctcaaagactattaacggttctggacagaatcaacaaacgctaaaattcagtgtggccggacccagcaacatggctgtccagggaagaaactacatacctggacccagctaccgacaacaacgtgtctcaaccactgtgactcaaaacaacaacagcgaatttgcttggcctggagcttcttcttgggctctcaatggacgtaatagcttgatgaatcctggacctgctatggccagccacaaagaaggagaggaccgtttctttcctttgtctggatctttaatttttggcaaacaaggagctggaagagacaacgtggatgcggacaaagtcatgataaccaacgaagaagaaattaaaactactaacccggtagcaacggagtcctatggacaagtggccacaaaccaccagagtgcccaagcacaggcgcagaccggctgggttcaaaaccaaggaatacttccgggtatggtttggcaggacagagatgtgtacctgcaaggacccatttgggccaaaattcctcacacggacggcaactttcacccttctccgctgatgggagggtttggaatgaagcacccgcctcctcagatcctcatcaaaaacacacctgtacctgcggatcctccaacggccttcaacaaggacaagctgaactctttcatcacccagtattctactggccaagtcagcgtggagatcgagtgggagctgcagaaggaaaacagcaagcgctggaacccggagatccagtacacttccaactattacaagtctaataatgttgaatttgctgttaatactgaaggtgtatatagtgaaccccgccccattggcaccagatacctgactcgtaatctg

SEQ ID NO: 644 - DNA, 2208 bp, Artificial Sequence
  Description of Artificial Sequence: Synthetic polynucleotide
  misc_feature (377)..(377): n is a, c, t, or g
atggctgccgatggttatcttccagattggctcgaggacaaccttagtgaaggaattcgcgagaggtgggctttgaaacctggagcccctcaacccaaggcaaatcaacaacatcaagacaacgctcgaggtcttgtgcttccgggttacaaataccttggacccggcaacggactcgacaagggggagccggtcaacgcagcagacgcggcggccctcgagcacgacaaggcctacgaccagcagctcaaggccggagacaacccgtacctcaagtacaaccacgccgacgccgagttccaggagcggctcaaagaagatacgtcttttgggggcaacctcgggcgagcagtcttccaggccaaaaagaggcttcntgaacctcttggtctggttgaggaagcggctaagacggctcctggaaagaagaggcctgtagagcagtctcctcaggaaccggactcctccgcgggtattggcaaatcgggtgcacagcccgctaaaaagagactcaatttcggtcagactggcgacacagagtcagtcccagaccctcaaccaatcggagaacctcccgcagccccctcaggtgtgggatctcttacaatggcttcaggtggtggcgcaccagtggcagacaataacgaaggtgccgatggagtgggtagttcctcggggaattggcattgcgattcccaatggctgggggacagagtcatcaccaccagcacccgaacctgggccctgcccacctacaacaatcacctctacaagcaaatctccaacagcacatctggaggatcttcaaatgacaacgcctacttcggctacagcaccccctgggggtattttgacttcaacagattccactgccacttctcaccacgtgactggcagcgactcatcaacaacaactggggattccggcctaagcgactcaacttcaagctcttcaacattcaggtcaaagaggttacggacaacaatggagtcaagaccatcgccaataaccttaccagcacggtccaggtcttcacggactcagactatcagctcccgtacgtgctcgggtcggctcacgagggctgcctcccgccgttcccagcggacgttttcatgattcctcagtacgggtatctgacgcttaatgatggaagccaggccgtgggtcgttcgtccttttactgcctggaatatttcccgtcgcaaatgctaagaacgggtaacaacttccagttcagctacgagtttgagaacgtacctttccatagcagctacgctcacagccaaagcccggaccgactaatgaatccactcatcgaccaatacttgtactatctctcaaagactattaacggttctggacagaatcaacaaacgctaaaattcagtgtggccggacccagcaacatggctgtccagggaagaaactacatacctggacccagctaccgacaacaacgtgtctcaaccactgtgactcaaaacaacaacagcgaatttgcttggcctggagcttcttcttgggctctcaatggacgtaatagcttgatgaatcctggacctgctatggccagccacaaagaaggagaggaccgtttctttcctttgtctggatctttaatttttggcaaacaaggaactggaagagacaacgtggatgcggacaaagtcatgataaccaacgaagaagaaattaaaactactaacccggtagcaacggagtcctatggacaagtggccacaaaccaccagagtgcccaagcacaggcgcagaccggctgggttcaaaaccaaggaatacttccgggtatggtttggcaggacagagatgtgtacctgcaaggacccatttgggccaaaattcctcacacggacggcaactttcacccttctccgctgatgggagggtttggagtgaagcacccgcctcctcagatcctcatcaaaaacacacctgtacctgcggatcctccaacggccttcaacaaggacaagctgaactctttcatcacccagtattctactggccaagtcagcgtggagatcgagtgggagctgcagaaggaaaacagcaagcgctggaacccggagatccagtacacttccaactattacaagtctaataatgttgaatttgctgttaatactgaaggtgtatatagtgaaccccgccccattggcaccagatacctgactcgtaatctg

SEQ ID NO: 645 - DNA, 2208 bp, Artificial Sequence
  Description of Artificial Sequence: Synthetic polynucleotide
atggctgccgatggttatcttccagattggctcgaggacaaccttagtgaaggaattcgcgagtggtgggctttgaaacctggagcccctcaacccaaggcaaatcaacaacatcaagacaacgctcgaggtcttgtgcttccgggttacaaataccttggacccggcaacggactcgacaagggggagccggtcaacgcagcagacgcggcggccctcgagcacgacaaggcctacgaccagcagctcaaggccggagacaacccgtacctcaagtacaaccacgccgacgccgagttccaggagcggctcaaagaagatacgtcttttgggggcaacctcgggcgagcagtcttccaggccaaaaagaggcttcttgaacctcttggtctggttgaggaagcggctaagacggctcctggaaagaagaggcctgtagagcagtctcctcaggaaccggactcctccgcgggtattggcaaatcgggtgcacagcccgctaaaaagagactcaatttcggtcagactggcgacacagagtcagtcccagaccctcaaccaatcggagaacctcccgcagccccctcaggtgtgggatctcttacaatggcttcaggtggtggcgcaccagtggcagacaataacgaaggtgccgatggagtgggtagttcctcgggaaattggcattgcgattcccaatggctgggggacagagtcatcaccaccagcacccgaacctgggccctgcccacctacaacaatcacctctacaagcaaatctccaacagcacatctggaggatcttcaaatgacaacgcctacctcggctacagcaccccctgggggtattttgacttcaacagattccactgccacttctcaccacgtgactggcagcgactcatcaacaacaactggggattccggcctaagcgactcaacttcaagctcttcaacattcaggtcaaagaggttacggacaacaatggagtcaagaccatcgccaataaccttaccagcacggtccaggtcttcacggactcagactatcagctcccgtacgtgctcgggtcggctcacgagggctgcctcccgccgttcccagcggacgttttcatgattcctcagtacgggtatctgacgcttaatgatggaagccaggccgtgggtcgttcgtccttttactgcctggaatatttcccgtcgcaaatgctaagaacgggtaacaacttccagttcagctacgagtttgagaacgtacctttccatagcagctacgctcacagccaaagcctggaccgactaatgaatccactcatcgaccaatacttgtactatctctcaaagactattaacggttctggacagaatcaacaaacgctaaaattcagtgtggccggacccagcaacatggctgtccagggaagaaactacatacctggacccagctaccgacaacaacgtgtctcaaccactgtgactcaaaacaacaacagcgaatttgcttggcctggagcttcttcttgggctctcaatggacgtaatagcttgatgaatcctggacctgctatggccagccacaaagaaggagaggaccgtttctttcctttgtctggatctttaatttttggcaaacaaggaactggaagagacaacgtggatgcggacaaagtcatgataaccaacgaagaagaaattaaaactactaacccggtagcaacggagtcctatggacaagtggccacaaaccaccagagtgcccaagcacaggcgcagaccggctgggttcaaaaccaaggaatacttccgggtatggtttggcaggacagagatgtgtacctgcaaggacccatttgggccaaaattcctcacacggacggcaactttcacccttctccgctgatgggagggtttggaatgaagcacccgcctcctcagatcctcatcaaaaacacacctgtacctgcggatcctccaacggccttcaacaaggacaagctgaactctttcatcacccagtattctactggccaagtcagcgtggagatcgagtgggagctgcagaaggaaaacagcaagcgctggaacccggagatccagtacacttccaactattacaagtctaataatgttgaatttgctgttaatactgaaggtgtatatagtgaaccccgccccattggcaccagatacctgactcgtaatctg

SEQ ID NO: 646 - DNA, 2208 bp, Artificial Sequence
  Description of Artificial Sequence: Synthetic polynucleotide
atggctgccgatggttatcttccagattggctcgaggacaaccttagtgaaggaattcgcgagtggtgggctttgaaacctggagcccctcaacccaaggcaaatcaacaacatcaagacaacgctcgaggtcttgtgcttccgggttacaaataccttggacccggcaacggactcgacaagggggagccggtcaacgcagcagacgcggcggccctcgagcacgacaaggcctacgaccagcagctcaaggccggagacaacccgtacctcaagtacaaccacgccgacgccgagttccaggagcggctcaaagaagatacgtcttttgggggcaacctcgggcgagcagtcttccaggccaaaaagaggcttcttgaacctcttggtctggttgaggaagcggctaagacggctcctggaaagaagaggcctgtagagcagtctcctcaggaaccggactcctccgcgggtattggcaaatcgggtgcacagcccgctaaaaagagactcaatttcggtcagactggcgacacagagtcagtcccagaccctcaaccaatcggagaacctcccgcagccccctcaggtgtgggatctcttacaatggcttcaggtggtggcgcaccagtggcagacaataacgaaggtgccgatggagtgggtagttcctcgggaaattggcattgcgattcccaatggctgggggacagagtcatcaccaccagcacccgaacctgggccctgcccacctacaacaatcacctctacaagcaaatctccaacagcacatctggaggatcttcaaatgacaacgcctacttcggctacagcaccccctgggggtattttgacttcaacagattccactgccacttctcaccacgtgactggcagcgactcatcaacaacaactggggattccggcctaagcgactcaacttcaagctcttcaacattcaggtcaaagaggttacggacaacaatggagtcaagaccatcgccaataaccttaccagcacggtccaggtcttcacggactcagactatcagctcccgtacgtgctcgggtcggctcacgagggctgcctcccgccgttcccagcggacgttttcatgattcctcagtacgggtatctgacgcttaatgatggaagccaggccgtgggtcgttcgtccttttactgcctggaatatttcccgtcgcaaatgctaagaacgggtaacaacttccagttcagctacgagtttgagaacgtacctttccatagcagctacgctcacagccagagcctggaccgactaatgaatccactcatcgaccaatacttgtactatctctcaaagactattaacggttctggacagaatcaacaaacgctaaaattcagtgtggccggacccagcaacatggctgtccagggaagaaactacatacctggacccagctaccgacaacaacgtgtctcaaccactgtgactcaaaacaacaacagcgaatttgcttggcctggagcttcttcttgggctctcaatggacgtaatagcttgatgaatcctggacctgctatggccagccacaaagaaggagaggaccgtttctttcctttgtctggatctttaatttttggcaaacaaggaactggaagagacaacgtggatgcggacaaagtcatgataaccaacgaagaagaaattaaaactactaacccggtagcaacggagtcctatggacaagtggccacaaaccaccagagtgcccaagcacaggcgcagaccggctgggttcaaaaccaaggaatacttccgggtatggtttggcaggacagagatgtgtacctgcaaggacccatttgggccaaaattcctcacacggacggcaactttcacccttctccgctgatgggagggtttggaatgaagcacccgcctcctcagatcctcatcaaaaacacacctgtacctgcggatcctccaacggccttcaacaaggacaagctggactctttcatcacccagtattctactggccaagtcagcgtggagatcgagtgggagctgcagaaggaaaacagcaagcgctggaacccggtgatccagtacacttccaactattacaagtctaataatgttgaatttgctgttaatactgaaggtgtatatagtgaaccccgccccattggcaccagatacctgactcgtaatctg

SEQ ID NO: 647 - DNA, 2208 bp, Artificial Sequence
  Description of Artificial Sequence: Synthetic polynucleotide
atggctgccgatggttatcttccagattggctcgaggacaacctctctgagggcattcgcgagtggtgggacttgaaacctggagccccgaagcccaaagccaaccagcaaaagcaggacgacggccggggtctggtgcttcctggctacaagtacctcggacccttcaacggactcgacaagggggagcccgtcaacgcggcggacgcagcggccctcgagcacgacaaggcctacgaccagcagctcaaagcgggtgacaatccgtacctgcggtataaccacgccgacgccgagtttcaggagcgtctgcaagaagatacgtcttttgggggcaacctcgggcgagcagtcttccaggccaagaagcgggttctcgaacctctcggtctggttgaggaaggcgctaagacggctcctggaaagaaacgtccggtagagcagtcgccacaagagccagactcctcctcgggcatcggcaagacaggccagcagcccgctaaaaagagactcaattttggtcagactggcgactcagagtcagtccccgatccacaacctctcggagaacctccagcaacccccgctgctgtggggcctactacaatggcttcaggcggtggcgcaccaatggcagacaataacgaaggcgtcgacggagtgggtaatgcctcaggaaattggcattgcgattccacatggctgggcgacagagtcatcaccaccagcacccgcacctgggccttgcccacctacaataaccacctctacaagcaaatctccagtgcttcaacgggggccagcaacgacaaccactacttcggctacagcaccccctgggggtattttgatttcaacagattccactgccacttttcaccacgtgactggcagcgactcatcaacaacaattggggattccggcccaagagactcaacttcaaactcttcaacatccaagtcaaggaggtcacgacgaatgatggcgttacaaccatcgctaataaccttaccagcacggttcaagtcttctcggactcggagtaccagcttccgtacgtcctcggctctgcgcaccagggctgcctccctccgttcccggcggacgtgttcatgattccgcaatacggctacctgacgctcaacaatggcagccaagccgtgggacgttcatccttttactgcctggaatatttcccttctcagatgctgagaacgggcaacaactttaccttcagctacacctttgaggaagtgcctttccacagcagctacgcgcacagccagagcctggaccggctgatgaatcctctcatcgaccaatacctgtattacctgaacagaactcaaaatcagtccggaagtgcccaaaacaaggacttgctgtttagccgtgggtctccagctggcatgtctgttcagcccaaaaactggctacctggaccctgttatcggcagcagcgcgtttctaaaacaaaaacagacaacaacaacagcaattttacctggactggtgcttcaaaatataacctcaatgggcgtgaatccatcatcaaccctggcactgctatggcctcacacaaagacgacgaagacaagttctttcccatgagcggtgtcatgatttttggaaaagagagcgccggagcttcaaacactgcattggacaatgtcatgattacagacgaagaggaaattaaagccactaaccctgtggccaccgaaagatttgggaccgtggcagtcaatttccagagcagcagcacagaccctgcgaccggagatgtgcatgctatgggagcattacctggcatggtgtggcaagatagagacgtgtacctgcagggtcccatttgggccaaaattcctcacacagatggacactttcacccgtctcctcttatgggcggctttggactcaagaacccgcctcctcagatcctcatcaaaaacacgcctgttcctgcgaatcctccggcggagttttcagccacaaagcttgcttcattcatcacccaatactccacaggacaagtgagtgtggaaattgaatgggagctgcagaaagaaaacagcaagcgctggaatcccgaagtgcagtacacatccaattatgcaaaatctgccaacgttgattttactgtggacaacaatggactttatactgagcctcgccccattggcacccgttaccttacccgtcccctg

SEQ ID NO: 648 - DNA, 2208 bp, Artificial Sequence
  Description of Artificial Sequence: Synthetic polynucleotide
atggctgccgatggttatcttccagattggctcgaggacaacctctctgagggcattcgcgagtggtgggacttgaaacctggagccccgaagcccaaagccaaccagcaaaagcaggacgacggccggggtctggtgcttcctggctacaagtacctcggacccttcaacggactcgacaagggggagcccgtcaacgcggcggacgcagcggccctcgagcacgacaaggcctacgaccagcagctcaaagcgggtgacaatccgtacctgcggtataaccacgccgacgccgagtttcaggagcgtctgcaagaagatacgtcttttgggggcaacctcgggcgagcagtcttccaggccaagaagcgggttctcgaacctctcggtctggttgaggaaggcgctaagacggctcctggaaagagacgtccggtagagcagtcgccacaagagccagactcctcctcgggcatcggcaagacaggccagcagcccgctaaaaagagactcaattttggtcagactggcgactcagagtcagtccccgatccacaacctctcggagaacctccagcaacccccgctgctgtgggacctactacaatggcttcaggcggtggcgcaccaatggcagacaataacgaaggcgccgacggagtgggtaatgcctcaggaaattggcattgcgattccacatggctgggcgacagagtcatcaccaccagcacccgcacctgggccttgcccacctacaataaccacctctacaagcaaatctccagtgcttcaacgggggccagcaacgacaaccactacttcggctacagcaccccctgggggtattttgatttcaacagattccactgccacttttcaccacgtgactggcagcgactcatcaacaacaattggggattccggcccaagagactcaacttcaaactcttcaacatccaagtcaaggaggtcacgacgaatgatggcgtcacaaccatcgctaataaccttaccagcacggttcaagtcttctcggactcggagtaccagcttccgtacgtcctcggctctgcgcaccagggctgcctccctccgttcccggcggacgtgttcatgattccgcaatacggctacctgacgctcaacaatggcagccaagccgtgggacgttcatccttttactgcctggaatatttcccttctcagatgctgagaacgggcaacaactttaccttcagctacacctttgaggaagtgcctttccacagcagctacgcgcacagccagagcctggaccggctgatgaatcctctcatcgaccaatacctgtattacctgaacagaactcaaaatcagtccggaagtgcccaaaacaaggacttgctgtttagccgtgggtctccagctggcatgtctgttcagcccaaaaactggctacctggaccctgttatcggcagcagcgcgtttctaaaacaaaaacagacaacaacaacagcaattttacctggactggtgcttcaaaatataacctcaatgggcgtgaatccatcatcaaccctggcactgctatggcctcacacaaagacgacgaagacaagttctttcccatgagcggtgtcatgatttttggaaaagagagcgccggagcttcaaacactgcattggacaatgtcatgattacagacgaagaggaaattaaagccactaaccctgtggccaccgaaagatttgggaccgtggcagtcaatttccagagcagcagcacagaccctgcgaccggagatgtgcatgctatgggagcattacctggcatggtgtggcaagatagagacgtgtacctgcagggtcccatttgggccaaaattcctcacacagatggacactttcacccgtctcctcttatgggcggctttggactcaagaacccgcctcctcagatcctcatcaaaaacacgcctgttcctgcgaatcctccggcggagttttcagctacaaagtttgcttcgttcatcacccaatactccacaggacaagtgagtgtggaaattgaatgggagctgcagaaagaaaacagcaagcgctggaatcccgaagtgcagtacacatccaattatgcaaaatctgccaacgttgattttactgtggacaacaatggactttatactgagcctcgccccattggcacccgttaccttacccgtcccctg

SEQ ID NO: 649 - DNA, 2208 bp, Artificial Sequence
  Description of Artificial Sequence: Synthetic polynucleotide
atggctgccgatggttatcttccagattggctcgaggacaacctctctgagggcattcgcgagtggtgggacttgaaacctggagccccgaagcccaaagccaaccagcaaaagcaggacgacggccggggtctggtgcttcctggctacaagtacctcggacccttcaacggactcgacaagggggagcccgtcaacgcggcggacgcagcggccctcgagcacgacaaggcctacgaccagcagctcaaagcgggtgacaatccgtacccgcggtataaccacgccgacgccgagtttcaggagcgtctgcaagaagatacgtcttttgggggcaacctcgggcgagcagtcttccaggccaagaagcgggttctcgaacctctcggtctggttggggaaggcgctaagacggctcctggaaagaaacgtccggtagagcagtcgccacaagagccagactcctcctcgggcatcggcaagacaggccagcagcccgctaaaaagagactcaattttggtcagactggcgactcagagtcagtccccgatccacaacctctcggagaacctccagcaacccccgctgctgtgggacctactacaatggcttcaggcggtggcgcaccaatggcagacaataacgaaggcgccgacggagtgggtaatgcctcaggaaattggcattgcgattccacatggctgggcgacagagtcatcaccaccagcacccgcacctgggccttgcccacctacaataaccacctctacaagcaaatctccagtgcttcaacgggggccagcaacgacaaccactacttcggctacagcaccccctgggggtattttgatttcaacagattccactgccacttttcaccacgtgactggcagcgactcatcaacaacaattggggattccggcccaagagactcaacttcaaactcttcaacatccaagtcaaggaggtcacgacgaatgatggcgtcacaaccatcgctaataaccttaccagcacggttcaagtcttctcggactcggagtaccagcttccgtacgtcctcggctctgcgcaccagggctgcctccctccgttcccggcggacgtgttcatgattccgcaatacggctacctgacgctcaacaatggcagccaagccgtgggacgttcatccttttactgcctggaatatttcccttctcagatgctgagaacgggcaacaactttaccttcagctacacctttgaggaagtgcctttccacagcagctacgcgcacagccagagcctggaccggctgatgaatcctcccatcgaccaatacctgtattacctgaacagaactcaaaatcagtccggaagtgcccaaaacaaggacttgctgtttagccgtgggtctccagctggcatgtctgttcagcccaaaaactggctacctggaccctgttatcggcagcagcgcgtttctaaaacaaaaacagacaacaacaacagcaattttacctggactggtgcttcaaaatataacctcaatgggcgtgaatccatcatcaaccctggcactgctatggcctcacacaaagacgacgaagacaagttctttcccatgagcggtgtcatgatttttggaaaagagagcgccggagcttcaaacactgcattggacaatgtcatgattacagacgaagaggaaattaaagccactaaccctgtggccaccgaaagatttgggaccgtggcagtcaatttccagagcagcagcacagaccctgcgaccggagatgtgcatgctatgggagcattacctggcatggtgtggcaagatagagacgtgtacctgcagggtcccatttgggccaaaattcctcacacagatggacactttcacccgtctcctcttatgggcggctttggactcaagaacccgcctcctcagatcctcatcaaaaacacgcctgttcctgcgaatcctccggcggagttttcagctacaaagtttgcttcattcatcacccaatactccacaggacaagtgagtgtggaaattgaatgggagctgcagaaagaaaacagcaagcgctggaatcccgaagtgcagtacacatccaattatgcaaaatctgccaacgttgattttactgtggacaacaatggactttatactgagcctcgccccattggcacccgttaccttacccgtcccctg

SEQ ID NO: 650 - DNA, 2208 bp, Artificial Sequence
  Description of Artificial Sequence: Synthetic polynucleotide
atggctgccgatggttatcttccagattggctcgaggacaacctctctgagggcattcgcgagtggtgggacttgaaacctggagccccgaagcccaaagccaaccagcaaaagcaggacgacggccggggtctggtgcttcctggctacaagtacctcggacccttcaacggactcgacaagggggagcccgtcaacgcggcggacgcagcggccctcgagcacgacaaggcctacgaccagcagctcaaagcgggtgacaatccgtacctgcggtataaccacgccgacgccgagtttcaggagcgtctgcaagaagatacgtcttttgggggcaacctcgggcgagcagtcttccaggccaagaagcgggttctcgaacctctcggtctggttgaggaaggcgctaagacggctcctggaaagaaacgtccggtagagcagtcgccacaagagccagactcctcctcgggcatcggcaagacaggccagcagcccgctaaaaagagactcaattttggtcagactggcgactcagagtcagtccccgatccacgacctctcggagaacctccagcaacccccgctgctgtgggacctactacaatggcttcaggcggtggcgcaccaatggcagacaataacgaaggcgccgacggagtgggtaatgcctcaggaaattggcattgcgattccacatggctgggcgacagagtcatcaccaccagcacccgcacctgggccttgcccacctacaataaccacctctacaagcaaatctccagtgcttcaacgggggccagcaacgacaaccactacttcggctacagcaccccctgggggtattttgatttcaacagattccactgccacttttcaccacgcgactggcagcgactcatcaacaacaattggggattccggcccaagagactcaacttcaaactcttcaacatccaagtcaaggaggtcacgacgaatgatggcgtcacaaccatcgctaataaccttaccagcacggttcaagtcttctcggactcggagtaccagcttccgtacgtcctcggctctgcgcaccagggctgcctccctccgttcccggcggacgtgttcatgattccgcaatacggctacctgacgctcaacaatggcagccaagccgtgggacgttcatccttttactgcctggaatatttcccttctcagatgctgagaacgggcaacaactttaccttcagctacacctttgaggaagtgcctttccacagcagctacgcgcacagccagagcctggaccggctgatgaatcctctcatcgaccaatacctgtattacctgaacagaactcaaaatcagtccggaagtgcccaaaacaaggacttgctgtttagccgtgggcctccagctggcatgtctgttcagcccaaaaactggctacctggaccctgttatcggcagcagcgcgtttctaaaacaaaaacagacaacaacaacagcaattttacctggactggtgcttcaaaatataacctcaatgggcgtgaatccatcatcaaccctggcactgctatggcctcacacaaagacgacgaagacaagttctttcccatgagcggtgtcatgatttttggaaaagagagcgccggagcttcaaacactgcattggacaatgtcatgattacggacgaagaggaaattaaagccactaaccctgtggccaccgaaagatttgggaccgtggcagtcaatttccagagcagcagcacagaccctgcgaccggagatgtgcatgctatgggagcattacctggcatggtgtggcaagatagagacgtgtacctgcagggtcccatttgggccaaaattcctcacacagatggacactttcacccgtctcctcttatgggcggctttggactcaagaacccgcctcctcagatcctcatcaaaaacacgcctgttcctgcgaatcctccggcggagttttcagctacaaagtttgcttcattcatcacccaatactccacaggacaagtgagtgtggaaattgaatgggagctgcagaaagaaaacagcaagcgctggaatcccgaagtgcagtacacatccaattatgcaaaatctgccaacgttgattttactgtggacaacaatggactttatactgagcctcgccccattggcacccgttaccttacccgtcccctg

SEQ ID NO: 651 - DNA, 2208 bp, Artificial Sequence
  Description of Artificial Sequence: Synthetic polynucleotide
atggctgccgatggttatcttccagattggctcgaggacaacctctctgagggcattcgcgagtggtgggacttgaaacctggagccccgaagcccaaagccaaccagcaaaagcaggacgacggccggggtctggtgcttcctggctacaagtacctcggacccttcaacggactcgacaagggggagcccgtcaacgcggcggacgcagcggccctcgagcacgacaaggcctacgaccagcagctcaaagcgggtgacaatccgtacctgcggtataaccacgccgacgccgagtttcaggagcgtctgcaagaagatacgtcttttgggggcaacctcgggcgagcagtcttccaggccaagaagcgggttctcgaacctctcggtctggttgaggaaggcgctaagacggctcctggaaagaaacgtccggtagagcagtcgccacaagagccagactcctcctcgggcatcggcaagacaggccagcagcccgctaaaaagagactcaattttggtcagactggcggctcagagtcagtccccgatccacaacctctcggagaacctccagcaacccccgctgctgtgggacctactacaatggcttcaggcggtggcgcaccaatggcagacaataacgaaggcgccgacggagtgggtaatgcctcaggaaattggcattgcgattccacatggctgggcgacagagtcatcaccaccagcacccgcacctgggccttgcccacctacaataaccacctctacaagcaaatctccagtgcttcaacgggggccagcaacgacaaccactacttcggctacagcaccccctgggggtattttgatttcaacagattccactgccacttttcaccacgtgactggcagcgactcatcaacaacaattggggattccggcccaagagactcaacttcaaactcttcaacatccaagtcaaggaggtcacgacgaatgatggcgtcacaaccatcgctaataaccttaccagcacggttcaagtcttctcggactcggagtaccagcttccgtacgtcctcggctctgcgcaccagggctgcctccctccgttcccggcggacgtgttcatgattccgcaatacggctacctgacgctcaacaatggcagccaagccgtgggacgttcatccttttactgcctggaatatttcccttctcagatgctgagaacgggcaacaactttaccttcagctacacctttgaggaagtgcctttccacagcagctacgcgcacagccagagcctggaccggctgatgaatcctcccatcgaccaatacctgtattacctgaacagaactcaaaatcagtccgggagtgcccaaaacaaggacttgctgtttagccgtgggtctccagctggcatgtctgttcagcccaaaaactggctacctggaccctgttatcggcagcagcgcgtttctaaaacaaaaacagacaacaacaacagcaattttacctggactggtgcttcaaaatataacctcaatgggcgtgaatccatcatcaaccctggcactgctatggcctcacacaaagacgacgaagacaagttctttcccatgagcggtgtcatgatttttggaaaagagagcgccggagcttcaaacactgcattggacaatgtcatgattacagacgaagaggaaattaaagccactaaccctgtggccaccgaaagatttgggaccgtggcagtcaatttccagagcagcagcacagaccctgcgaccggagatgtgcatgctatgggagcattacctggcatggtgtggcaagatagagacgtgtacctgcagggtcccatttgggccaaaattcctcacacagatggacactttcacccgtctcctcttatgggcggctttggactcaagaacccgcctcctcagatcctcatcaaaaacacgcctgttcctgcgaatcctccggcggagttttcagctacaaagtttgcttcattcatcacccaatactccacaggacaagtgagtgtggaaattgaatgggagctgcagaaagaaaacagcaagcgctggaatcccgaagtgcagtacacatccaattatgcaaaatctgccaacgttgactttactgtggacaacaatggactttatactgagcctcgccccattggcacccgttaccttacccgtcccctg

SEQ ID NO: 652 - DNA, 2208 bp, Artificial Sequence
  Description of Artificial Sequence: Synthetic polynucleotide
atggctgccgatggttatcttccagattggctcgaggacaacctctctgagggcattcgcgagtggtgggacttgaaacctggagccccgaagcccaaagccaaccagcaaaagcaggacgacggccggggtctggtgcttcctggctacaagtacctcggacccttcaacggactcgacaagggggagcccgtcaacgcggcggacgcagcggccctcgagcacgacaaggcctacgaccagcagctcaaagcgggtgacaatccgtacctgcggtataaccacgccgacgccgagtttcaagagcgtctgcaagaagatacgtcttttgggggcaacctcgggcgagcagtcttccaggccaagaagcgggttctcgaacctctcggtctggttgaggaaggcgctaagacggctcctggaaagaaacgtccggtagagcagtcgccacaagagccagactcctcctcgggcatcggcaagacaggccagcagcccgctaaaaagagactcaattttggtcagactggcgactcagagtcagtccccgatccgcaacctctcggagaacctccagcaacccccgctgctgtgggacctactacaatggcttcaggcggtggcgcaccaatggcagacaataacgaaggcgccgacggagtgggtaatgcctcaggaaattggcattgcgattccacatggctgggcgacagagtcatcaccaccagcacccgcacctgggccttgcccacctacaataaccacctctacaagcaaatctccagtgcttcaacgggggccagcaacgacaaccactacttcggctacagcaccccctgggggtattttgatttcaacagattccactgccacttttcaccacgtgactggcagcgactcatcaacaacaattggggattccggcccaagagactcaacttcaaactcttcaacatccaagtcaaggaggtcacgacgaatgatggcgtcacaaccatcgctaataaccttaccagcacggttcaagtcttctcggactcggagtaccagcttccgtacgtcctcggctctgcgcaccagggctgcctccctccgttcccggcggacgtgttcatgattccgcaatacggctacctgacgctcaacaatggcagccaagccgtgggacgttcatccttttactgcctggaatatttcccttctcagatgctgagaacgggcaacaactttaccttcagctacacctttgaggaagtgcctttccacagcagctacgcgcacagccagagcctggaccggctgatgaatcctctcatcgaccaatacctgtattacctgaacagaactcaaaatcagtccggaagtgcccaaaacaaggacttgctgtttagccgtgggtctccagctggcatgtctgttcagcccaaaaactggctacctggaccctgttatcggcagcagcgcgtttctaaaacaaaaacagacaacaacaacagcaattttacctggactggtgcttcaaaatataacctcaatgggcgtgaatccatcatcaaccctggcactgctgtggcctcacacaaagacgacgaagacaagttctttcccatgagcggtgtcatgatttttggaaaagagagcgccggagcttcaaacactgcattggacaatgtcatgattacagacgaagaggaaattaaagccactaaccctgtggccaccgaaagatttgggaccgtggcagtcaatttccagagcagcagcacagaccctgcgaccggagatgtgcatgctatgggagcattacctggcatggtgtggcaagatagagacgtgtacctgcagggtcccatttgggccaaaattcctcacacagatggacactttcacccgtctcctcttatgggcggctttggactcaagaacccgcctcctcagatcctcatcaaaaacacgcctgttcctgcgaatcctccggcggagttttcagctacaaagtttgcttcattcatcacccaatactccacaggacaagtgagtgtggaaattgaatgggagctgcagaaagaaaacagcaagcgctggaatcccgaagtgcagtacacatccaattatgcaaaatctgccaacgttgattttactgtggacaacaatggactttatactgagcctcgccccattggcacccgttaccttacccgtcccctg

SEQ ID NO: 653 - DNA, 2208 bp, Artificial Sequence
  Description of Artificial Sequence: Synthetic polynucleotide
atggctgccgatggttatcttccagattggctcgaggacaacctctctgagggcattcgcgagtggtgggacttgaaacctggagccccgaagcccaaagccaaccagcaaaagcaggacgacggccggggtctggtgcttcctggctacaagtacctcggacccttcaacggactcgacaagggggagcccgtcaacgcggcggacgcagcggccctcgagcacgacaaggcctacgaccagcagctcaaagcgggtgacaatccgtacctgcggtataaccacgccgacgccgagtttcaggagcgtctgcaagaagatacgtcttttgggggcaacctcgggcgagcagtcttccaggccaagaagcgggttctcgaacctctcggtctggttgaggaaggcgctaagacggctcctggaaagaaacgtccggtagagcagtcgccacaagagccagactcctcctcgggcatcggcaagacaggccagcagcccgctaaaaagagactcaattttggtcagactggcgactcagagtcagtccccgatccacaacctctcggagaacctccagcaacccccgctgctgtgggacctactacaatggcttcaggcggtggcgcaccaatggcagacaataacgaaggcgccgacggagtgggtaatgcctcaggaaattggcattgcgattccacatggctgggcgacagagtcatcaccaccagcacccgcacctgggccttgcccacctacaataaccacctctacaagcaaatctccagtgcttcaacgggggccagcaacgacaaccactacttcggctacagcaccccctgggggtattttgatttcaacagattccactgccacttttcaccacgtgactggcagcaactcatcaacaacaattggggattccggcccaagagactcaacttcaaactcttcaacatccaagtcaaggaggtcacgacgaatgatggcgtcacaaccatcgctaataaccttaccagcacggttcaagtcttctcggactcggagtaccagcttccgtacgtcctcggctctgcgcaccagggctgcctccctccgttcccggcggacgtgttcatgattccgcaatacggctacctgacgctcaacaatggcagccaagccgtgggacgttcatccttttactgcctggaatatttcccttctcagatgctgagaacgggcaacaactttaccttcagctacacctttgaggaagtgcctttccacagcagctacgcgcacagccagagcctggaccggctgatgaatcctctcatcgaccaatacctgtattacctgaacagaactcaaaatcagtccggaagtgcccaaaacaaggacttgctgtttagccgtgggtctccagctggcatgtctgttcagcccaaaaactggctacctggaccctgttatcggcagcagcgcgtttctaaaacaaaaacagacaacaacaacagcaattttacctggactggtgcttcaaaatataacctcaatgggcgtgaatccatcatcaaccctggcactgctatggcctcacacaaagacgacgaagacaagttctttcccatgagcggtgtcatgatttttggaaaagagagcgccggagcttcaaacactgcattggacaatgtcatgattacagacgaagaggaaattaaagccactaaccctgtggccaccgaaagatttgggaccgtggcagtcaatttccagagcaccagcacagaccctgcgaccggagatgtgcatgctatgggagcattacctggcatggtgtggcaagatagagacgtgtacctgcagggtcccatttgggccaaaattcctcacacagatggacactttcacccgtctcctcttatgggcggctttggactcaagaacccgcctcctcagatcctcatcaaaaacacgcctgttcctgcgaatcctccggcggagttttcagctacaaagtttgcttcattcatcacccaatactccacaggacaagtgagtgtggaaattgaatgggagctgcagaaagaaaacagcaagcgctggaatcccgaagtgcagtacacatccaattatgcaaaatctgccgacgttgattttactgtggacaacaatggactttatactgagcctcgccccattggcacccgttaccttacccgtcccctg

SEQ ID NO: 654 - DNA, 2208 bp, Artificial Sequence
  Description of Artificial Sequence: Synthetic polynucleotide
atggctgccgatggttatcttccagattggctcgaggacaacctctctgagggcattcgcgagtggtgggacttgaaacctggagccccgaagcccaaagccaaccagcaaaagcaggacgacggccggggtctggtgcttcctggctacaagtacctcggacccttcaacggactcgacaagggggagcccgtcaacgcggcggacgcagcggccctcgagcacgacaaggcctacgaccagcagctcaaagcgggtgacaatccgtacctgcggtataaccacgccgacgccgagtttcaagagcgtctgcaagaagatacgtcttttgggggcaacctcgggcgagcagtcttccaggccaagaagcgggttctcgaacctctcggtctggttgaggaaggcgctaagacggctcctggaaagaaacgtccggtagagcagtcgccacaagagccagactcctcctcgggcatcggcaagacaggccagcagcccgctaaaaagagactcaattttggtcagactggcgactcagagtcagtccccgatccgcaacctctcggagaacctccagcaacccccgctgctgtgggacctactacaatggcttcaggcggtggcgcaccaatggcagacaataacgaaggcgccgacggagtgggtaatgcctcaggaaattggcattgcgattccacatggctgggcgacagagtcatcaccaccagcacccgcacctgggccttgcccacctacaataaccacctctacaagcaaatctccagtgcttcaacgggggccagcaacgacaaccactacttcggctacagcaccccctgggggtattttgatttcaacagattccactgccacttttcaccacgtgactggcagcgactcatcaacaacaattggggattccggcccaagagactcaacttcaaactcttcaacatccaagtcaaggaggtcacgacgaatgatggcgtcacaaccatcgctaataaccttaccagcacggttcaagtcttctcggactcggagtaccagcctccgtacgtcctcggctctgcgcaccagggctgcctccctccgttcccggcggacgtgttcatgattccgcaatacggccacctgacgctcaacaatggcagccaagccgtgggacgttcatccttttactgcctggaatatttcccttctcagatgctgagaacgggcaacaactttaccttcagctacacctttgaggaagtgcctttccacagcagctacgcgcacagccagagcctggaccggctgacgaatcctctcatcgaccaatacctgtattacctgaacagaactcaaaatcagtccggaagtgcccaaaacaaggacttgctgtttagccgtgggtctccagctggcatgtctgttcagcccaaaaactggctacctggaccctgttatcggcagcagcgcgtttctaaaacaaaaacagacaacaacaacagcaattttacctggactggtgcttcaaaatataacctcaatgggcgtgaatccatcatcaaccctggcactgctatggcctcacacaaagacgacgaagacaagttctttcccatgagcggtgtcatgatttttggaaaagagagcgccggagcttcaaacactgcattggacaatgtcatgattacagacgaagaggaaattaaagccactaaccctgtggccaccgaaagatttgggaccgtggcagtcaatttccagagcagcagcacagaccctgcgaccggagatgtgcatgctatgggagcattacctggcatggtgtggcaagatagagacgtgtacctgcagggtcccatttgggccaaaattcctcacacagatggacactttcacccgtctcctcttatgggcggctttggactcaagaacccgcctcctcagatcctcatcaaaaacacgcctgttcctgcgaatcctccggcggagttttcagctacaaagtttgcttcattcatcacccaatactccacaggacaagtgagtgtggaaattgaatgggagctgcagaaagaaaacagcaagcgctggaatcccgaagtgcagtacacatccaattatgcaaaatctgccaacgttgattttactgtggacaacaatggactttatactgagcctcgccccattggcacccgttaccttacccgtcccctg

SEQ ID NO: 655 - DNA, 2208 bp, Artificial Sequence
  Description of Artificial Sequence: Synthetic polynucleotide
atggctgccgatggttatcttccagattggctcgaggacaacctctctgagggcattcgcgagtggtgggacttgaaacctggagccccgaagcccaaagccaaccagcaagagcaggacgacggccggggtctggtgcttcctggctacaagtacctcggacccttcaacggactcgacaagggggagcccgtcaacgcggcggacgcagcggccctcgagcacgacaaggcctacgaccagcagctcaaagcgggtgacaatccgtacctgcggtataaccacgccgacgccgagtttcaggagcgtctgcaagaagatacgtcttttgggggcaacctcgggcgagcagtcttccaggccaagaagcgggttctcgaacctctcggtctggttgaggaaggcgctaagacggctcctggaaagaaacgtccggtagagcagtcgccacaagagccagactcctcctcgggcatcggcaagacaggccagcagcccgctaaaaagagactcaattttggtcagactggcgactcagagtcagtccccgatccacaacctctcggagaacctccagcaacccccgctgctgtgggacctactacaatggcttcaggcggtggcgcaccaatggcagacaataacgaaggcgccgacggagtgggtaatgcctcaggaaattggcattgcgattccacatggctgggcgacagagtcatcaccaccagcacccgcacctgggccttgcccacctacaataaccacctctacaagcaaatctccagtgcttcaacgggggccagcaacgacaaccactacttcggctacagcaccccctgggggtattttgatttcaacagattccactgccacttttcaccacgtgactggcagcgactcatcaacaacaattggggattccggcccaagagactcaacttcaaactcttcaacatccaagtcaaggaggtcacgacgaatgatggcgtcacaaccatcgctaataaccttaccagcacggttcaagtcttctcggactcggagtaccagcttccgtacgtcctcggctctgcgcaccagggctgcctccctccgttcccggcggacgtgttcatgattccgcaatacggctacctgacgctcaacaatggcagccaagccgtgggacgttcatccttttactgcctggaatatttcccttctcagatgctgagaacgggcaacaactttaccttcagctacacctttgaggaagtgcctttccacagcagctacgcgcacagccagagcctggaccggctgatgaatcctctcatcgaccaatacctgtattacctgaacagaactcaaaatcagtccggaagtgcccaaaacaaggacttgctgtttagccgtgggtctccagctggcatgtctgttcagcccaaaaactggctacctggaccctgttatcggcagcagcgcgtttctaaaacaaaaacagacaacaacaacagcaattttacctggactggtgcttcaaaatataacctcaatgggcgtgaatccatcatcaaccctggcactgctatggcctcacacaaagacgacgaagacaagttctttcccatgagcggtgtcatgatttttggaaaagagagcgccggagcttcaaacactgcattggacaatgtcatgattacagacgaagaggaaattaaagccactaaccctgtggccaccgaaagatttgggaccgtggcagtcaatttccagagcagcagcacagaccctgcgaccggagatgtgcatgctacgggaacattacctggcatggtgtggcaagatagagacgtgtacctgcagggtcccatttgggccaaaattcctcacacagatggacactttcacccgtctcctcttatgggcggctttggactcaagaacccgcctcctcagatcctcatcaaaaccacgcctgttcctgcgaatcctccggcggagttttcagctacaaagtttgcttcattcatcacccagtactccacaggacaagtgagtgtggaaattgaatgggagctgcagaaagaaaacagcaagcgctggaatcccgaagtgcagtacacatccaattatgcaaaatctgccaacgttgattttactgtggacgacaatggactttatactgagcctcgccccattggcacccgttaccttacccgtcccctg

SEQ ID NO: 656 - DNA, 2208 bp, Artificial Sequence
  Description of Artificial Sequence: Synthetic polynucleotide
atggctgccgatggttatcttccagattggctcgaggacaacctctctgagggcattcgcgagtggtgggacttgaaacctggagccccgaagcccaaagccaaccagcaaaagcaggacgacggccggggtctggtgcttcctggctacaagtacctcggacccttcaacggactcgacaagggggagcccgtcaacgcggcggacgcagcggccctcgagcacgacaaggcctacgaccagcagctcaaagcgggtgacaatccgtacctgcggtataaccacgccgacgccgagtttcaggagcgtctgcaagaagatacgtcttttgggggcaacctcgggcgagcagtcttccaggccaagaagcgggttctcgaacctctcggtctggttgaggaaggcgctaagacggctcctggaaagaaacgtccggtagagcagtcgctacaagagccagactcctcctcgggcatcggcaagacaggccagcagcccgctaaaaagagactcaattttggtcagactggcgactcagagtcagtccccgatccacaacctctcggagaacctccagcaacccccgctgctgtgggacctactacaatggcttcaggcggtggcgcaccaatggcagacaataacgaaggcgccgacggagtgggtaatgcctcaggaaattggcattgcgattccacatggctgggcgacagagtcatcaccaccagcacccgcacctgggccttgcccacctacaataaccacctctacaagcaaatctccagtgcttcaacgggggccagcaacgacaaccactacttcggctacagcaccccctgggggtattttgatttcaacagattccactgccacttttcaccacgtgactggcagcgactcatcaacaacaattggggattccggcccaagagactcaacttcaaactcttcaacatccaagtcaaggaggtcacgacgaatgatggcgtcacaaccatcgctaataaccttaccagcacggttcaagtcttctcggactcggagtaccagcttccgtacgtcctcggctctgcgcaccagggctgcctccctccgttcccggcggacgtgttcatgattccgcaatacggctacctgacgctcaacaatggcagccaagccgtgggacgttcatccttttactgcctggaatatttcccttctcagatgctgagaacgggcaacaactttaccttcagctacacctttgaggaagtgcctttccacagcagctacgcgcacagccagagcctggaccggctgatgaatcctctcatcgaccaatacctgtattacctgaacagaactcaaaatcagtccggaagtgcccaaaacaaggacttgctgtttagccgtgggtctccagctggcatgtctgttcagcccaaaaactggctacctggaccctgttatcggcagcagcgcgtttctaaaacaaaaacagacaacgacaacagcaattttacctggactggtgcttcaaaatataacctcaatgggcgtgaatccatcatcaaccctggcactgctatggcctcacacaaagacgacgaagacaagttctttcccatgagcggtgtcatgatttttggaaaagagagcgccggagcttcaaacactgcattggacaatgtcatgattacagacgaagaggaaattaaagccactaaccctgtggccaccgaaagatttgggaccgtggcagtcaatttccagagcagcagcacagaccctgcgaccggagatgtgcatgctatgggagcattacctggcatggtgtggcaagatagagacgtgtacctgcagggtcccatttgggccaaaattcctcacacagatggacactttcacccgtctcctcttatgggcggctttggactcaagaacccgcctcctcagatcctcatcaaaaacacgcctgttcctgcgaatcctccggcggagttttcagctacaaagtttgcttcattcatcacccaatactccacaggacaagtgagtgtggaaattgaatgggagctgcagaaagaaaacagcaagcgctggaatcccgaagtgcagtacacatccaattatgcaaaatctgccaacgttgattttactgtggacaacaatggactttatactgagcctcgccccattggcacccgttaccttacccgtcccctg

SEQ ID NO: 657 - DNA, 2208 bp, Artificial Sequence
  Description of Artificial Sequence: Synthetic polynucleotide
atggctgccgatggttatcttccagattggctcgaggacaacctctctgagggcattcgcgagtggtgggacttgaaacctggagctccgaagcccaaagccaaccagcaaaagcaggacgacggccggggtctggtgcttcctggctacaagtacctcggacccttcaacggactcgacaagggggagcccgtcaacgcggcggacgcagcggccctcgagcacgacaaggcctacgaccagcagctcaaagcgggtgacaatccgtacctgcggtataaccacgccgacgccgagtttcaggagcgtctgcaagaagatacgtcttttgggggcaacctcgggcgagcagtcttccaggccaagaagcgggttctcgaacctctcggtctggttgaggaaggcgctaagacggctcctggaaagaaacgtccggtagagcagtcgccacaagagccagactcctcctcgggcatcggcaagacaggccagcagcccgctaaaaagagactcaattttggtcagactggcgactcagagtcagtccccgatccacaacctctcggagaacctccagcaacccccgctgctgtgggacctactacaatggcttcaggcggtggcgcaccaatggcagacaataacgaaggcgccgacggagtgggtaatgcctcaggaaattggcattgcgattccacatggctgggcgacagagtcatcaccaccagcacccgcacctgggccttgcccacctacaataaccacctctacaagcaaatctccagtgcttcaacgggggccagcaacgacaaccactacttcggctacagcaccccctgggggtattttgatttcaacagattccactgccacttttcaccacgtgactggcagcgactcatcaacaacaattggggattccggcccaagagactcaacttcaaactcttcaacatccaagtcaaggaggtcacgacgaatgatggcgtcacaaccatcgctaataaccttaccagcacggttcaagtcttctcggactcggagtaccagcttccgtacgtcctcggctctgcgcaccagggctgcctccctccgttcccggcggacgtgttcatgattccgcaatacggctacctgacgctcaacaatggcagccaagccgtgggacgttcatccttttactgcctggaatatttcccttctcagatgctgagaacgggcaacaactttaccttcagctacacctttgaggaagcgcctttccacagcagctacgcgcacagccagagcctggaccggctgatgaatcctctcatcgaccaatacctgtattacctgaacagaactcaaaatcagtccggaagtgcccaaaacaaggacttgctgtttagccgtgggtctccagctggcatgtctgttcagcccaaaaactggctacctggaccctgttatcggcagcagcgcgtttctaaaacaaaaacagacaacaacaacagcaattttacctggactggtgcttcaaaatataacctcaatgggcgtgaatccatcatcaaccctggcactgctatggcctcacacaaagacgacgaagacaagttctttcccatgagcggtgtcatgatttttggaaaagagagcgccggagcttcaaacactgcattggacaatgtcatgattacagacgaagaggaaattaaagccactaaccctgtggccaccgaaagatttgggaccgtggcagtcaatttccagagcagcagcacagaccctgcgaccggagatgtgcatgctatgggagcattacctggcatggtgtggcaagatagagacgtgtacctgcagggtcccatttgggccaaaattcctcacacagatggacactttcacccgtctcctcttatgggcggctttggactcaagaacccgcctcctcagatcctcatcaaaaacacgcctgttcctgcgaatcctccggcggagttttcagctacaaagtttgcttcattcatcacccaatactccacaggacaagtgagtgtggaaattgaatgggagctgcagaaagaaaacagcaagcgctggaatcccgaagtgcagtacacatccaattatgcgaaatctgccaacgttgattttactgtggacaacaatggactttatactgagcctcgccccgttggcacccgttaccttacccgtcccctg

SEQ ID NO: 658 - DNA, 2208 bp, Artificial Sequence
  Description of Artificial Sequence: Synthetic polynucleotide
atggctgccgatggttatcttccagattggctcgaggacaacctctctgagggcattcgcgagtggtgggacttgaaacctggagccccgaagcccaaagccaaccagcaaaagcaggacgacggccggggtctggtgcttcctggctacaagtacctcggacccttcaacggactcgacaagggggagcccgtcaacgcggcggacgcagcggccctcgagcacgacaaggcctacgaccagcagctcaaagcgggtgacaatccatacctgcggtataaccacgccgacgccgagtttcaggagcgtctgcaagaaaatacgtcttttgggggcaacctcgggcgagcagtcttccaggccaagaagcgggttctcgaacctctcggtctggttgaggaaggcgctaagacggctcctggaaagaaacgtccggtagagcagtcgccacaagagccagactcctcctcgggcatcggcaagacaggccagcagcccgctaaaaagagactcaattttggtcagactggcgactcagagtcagtccccgatccacaacctctcggagaacctccagcaacccccgctgctgtgggacctactacaatggcttcaggcggtggcgcaccaatggcagacaataacgaaggcgccgacggagtgggtaatgcctcaggaaattggcattgcgattccacatggctgggcgacagagtcatcaccaccagcacccgcacctgggccttgcccacctacaataaccacctctacaagcaaatctccagtgcttcaacgggggccagcaacgacaaccactacttcggctacagcaccccctgggggtattttgatttcaacagattccactgccactttccaccacgtgactggcagcgactcatcaacaacaattggggattccggcccaagagactcaacttcaaactcttcaacatccaagtcaaggaggtcacgtcgaatgatggcgtcacaaccatcgctaataaccttaccagcacggttcaagtcttctcggactcggagtaccagcttccgtacgtcctcggctctgcgcaccagggctgcctccctccgttcccggcggacgtgttcatgattccgcaatacggctacctgacgctcaacaatggcagccaagccgtgggacgttcatccttttactgcctggaatatttcccttctcagatgctgagaacgggcaacaactttaccttcagctacacctttgaggaagtgcctttccacagcagctacgcgcacagccagagcctggaccggctgatgaatcctctcatcgaccaatacctgtattacctgaacagaactcaaaatcagtccggaagtgcccaaaacaaggacttgctgtttagccgtgggtctccagctggcatgtctgttcagcccaaaaactggctacctggtccctgttatcggcagcagcgcgtttctaaaacaaaaacagacaacaacaacagcaattttacctggactggtgcttcaaaatataacctcaatgggcgtgaatccatcatcaaccctggcactgctatggcctcacacaaagacgacgaagacaagttctttcccatgagcggtgtcatgatttttggaaaagagagcgccggagcttcaaacactgcattggacaatgtcatgattacagacgaagaggaaattaaagccactaaccctgtggccaccgaaagatttgggaccgtggcagtcaatttccagagcagcagcacagaccctgcgaccggagatgtgcatgctatgggagcattacctggcatggtgtggcaagatagagacgtgtacctgcagggtcccatttgggccaaaattcctcacacagatggacactttcacccgtctcctcttatgggcggctttggactcaagaacccgcctcctcagatcctcatcaaaaacacgcctgttcctgcgaatcctccggcggagttttcagctacaaagtttgcttcattcatcacccaatactccacaggacaagtgagtgtggaaattgaatgggagctgcagaaagaaaacagcaagcgctggaatcccgaagtgcagtacacatccaattatgcaaaatctgccaacgttgattttactgtggacaacaatggactttatactgagcctcgccccattggcacccgttaccttacccgtcccctg

SEQ ID NO: 659 - DNA, 2208 bp, Artificial Sequence
  Description of Artificial Sequence: Synthetic polynucleotide
atggctgccgatggttatcttccagattggctcgaggacaacctctctgagggcattcgcgagtggtgggacttgaaacctggagccccgaagcccaaagccaaccagcaaaagcaggacgacggccggggtctggtgcttcctggctacaagtacctcggacccttcaacggactcgacaagggggagcccgtcaacgcggcggacgcagcggccctcgagcacgacaaggcctacgaccagcagctcaaagcgggtgacaatccgtacctgcggtataaccacgccgacgccgagtttcaggagcgtctgcaagaagatacgtcttttgggggcaacctcgggcgagcagtcttccaggccaagaagcgggttctcgaacctctcggtctggttgaggaaggcgctaagacggctcctggaaagaaacgtccggtagagcagtcgccacaagagccagactcctcctcgggcatcggcaagacaggccagcagcccgctaaaaagagactcaattttggtcagactggcgactcagagtcagtccccgatccacaacctctcggagaacctccagcaacccccgctgctgtgggacctactacaatggcttcaggcggtggcgcaccaatggcagacaataacgaaggcgccgacggagtgggtaatgcctcaggaaattggcattgcgattccacatggctgggcgacagagtcatcaccaccagcacccgcacctgggccttgcccacctacaataaccacctctacaagcaaatctccagtgcttcaacgggggccagcaacgacaaccactacttcggctacagcaccccctgggggtattttgatttcaacagattccactgccacttttcaccacgtgactggcagcgactcatcaacaacaattggggattccggcccaagagactcaacttcaaactcttcaacatccaagtcaaggaggtcacgacgaatgatggcgtcacaaccatcgctaataaccttaccagcacggttcaagtcttctcggactcggagtaccagcttccgtacgtcctcggctctgcgcaccagggctgcctccctccgttcccggcggacgtgttcatgattccgcaatacggctacctgacgctcaacaatggcagccaagccgtgggacgttcatccttttactgcctggaatatttcccttctcagatgctgagaacgggcaacaactttaccttcagctacacctttgaggaagtgcctttccacagcagctacgcgcacagccagagcctggaccggctgatgaatcctctcatcgaccaatacctgtattacctgaacagaactcaaaatcagtccggaagtgcccaaaacaaggacttgctgtttagccgtgggtctccagctggcacgtctgttcagcccaaaaactggctacctggaccctgttatcggcagcagcgcgtttctaaaacaaaaacagacaacaacaacagcaattttacctggactggtgcttcaaaatataacctcaatgggcgtgaatccatcatcaaccctggcactgctatggcctcacacaaagacgacgaagacaagttctttcccatgagcggtgtcatgatttttggaaaagagagcgccggagcttcaaacactgcattggacaatgtcatgattacagacgaagaggaaattaaagccactaaccctgtggccaccgaaagatttgggaccgtggcagtcaatttccagagcagcagcacagaccctgcgaccggagatgtgcatgctatgggagcattacctggcatggtgtggcaagatagagacgtgtacctgcagggtcccatttgggccaaaattcctcacacagatggacactttcacccgtctcctcttatgggcggctttggactcaagaacccgcctcctcagatcctcatcaaaaacacgcctgttcctgcgaatcctccggcggagttttcagctacaaagtttgcttcattcatcacccaatactccacaggacaagtgagtgtggaaattgaatgggagctgcagaaagaaaacagcaagcgctggaatcccgaagtgcagtacacatccaattatgcaaaatctgccaacgttgattttactgtggacaacaatggactttatactgggcctcgccccattggcacccgttaccttacccgtcccctg

SEQ ID NO: 660 - DNA, 2208 bp, Artificial Sequence
  Description of Artificial Sequence: Synthetic polynucleotide
atggctgccgatggttatcttccagattggctcgaggacaacctctctgagggcattcgcgagtggtgggacttgaaacctggagccccgaagcccaaagccaaccagcaaaagcaggacgacggccggggtctggtgcttcctggctacaagtacctcggacccttcaacggactcgacaagggggagcccgtcaacgcggcggacgcagcggccctcgagcacgacaaggcctacgaccagcagctcaaagcgggtgacaatccgtacctgcggtataaccacgccgacgccgagtttcaggagcgtctgcaagaagatacgtcttttgggggcaacctcgggcgagcagtcttccaggccaagaagcgggttctcgaacctctcggtctggttgaggaaggcgctaagacggctcctggaaagaaacgtccggtagagcagtcgccacaagagccagactcctcctcgggcatcggcaagacaggccagcagcccgctaaaaagagactcaattttggtcagactggcgactcagagtcagtccccgatccacaacctctcggagaacctccagcaacccccgctgctgtgggacctactacaatggcttcaggcggtggcgcaccaatggcagacaataacgaaggcgccgacggagtgggtaatgccccaggaaattggcattgcgactccacatggctgggcgacagagtcatcaccaccagcacccgcacctgggccttgcccacctacaataaccacctctacaagcaaatctccagtgcttcaacgggggccagcaacgacaaccactacttcggctacagcaccccctgggggtattttgatttcaacagattccactgccacttttcaccacgtgactggcagcgactcatcaacaacaattggggattccggcccaagagactcaacttcaaactcttcaacatccaagtcaaggaggtcacgacgaatgatggcgtcacaaccatcgctaataaccttaccagcacggttcaagtcttctcggactcggagtaccagcttccgtacgtcctcggctctgcgcaccagggctgcctccctccgttcccggcggacgtgttcatgattccgcaatacggctacctgacgctcaacaatggcagccaagccgtgggacgttcatccttttactgcctggaatatttcccttctcagatgctgagaacgggcaacaactttaccttcagctacacctttgaggaagtgcctttccacagcagctacgcgcacagccagagcctggaccggctgatgaatcctctcatcgaccaatacctgtattacctgaacagaactcaaaatcagtccggaagtgcccaaaacaaggacttgctgtttagccgtgggtctccagctggcatgtctgttcagcccaaaaactggctacctggaccctgttatcggcagcagcgcgtttctaaaacaaaaacagacaacaacaacagcaattttacctggactggtgcttcaaaatataacctcaatgggcgtgaatccatcatcaaccctggcacagctatggcctcacacaaagacgacgaagacaagttctttcccatgagcggtgtcatgatttttggaaaagagagcgccggagcttcaaacactgcattggacaatgtcatgattacaggcgaagaggaaattaaagccactaaccctgtggccaccgaaagatttgggaccgtggcagtcaatttccagagcagcagcacagaccctgcgaccggagatgtgcatgctatgggagcattacctggcatggtgtggcaagatagagacgtgtacctgcagggtcccatttgggccaaaattcctcacacagatggacactttcacccgtctcctcttatgggcggctttggactcaagaacccgcctcctcagatcctcatcaaaaacacgcctgttcctgcgaatcctccggcggagttttcagctacaaagtttgcttcattcatcacccaatactccacaggacaagtgagtgtggaaattgaatgggagctgcagaaagaaaacagcaagcgctggaatcccgaagtgcagtacacatccaattatgcaaaatctgccaacgttgattttactgtggacaacaatggactttatactgagcctcgccccattggcacccgttaccttacccgtcccctg

SEQ ID NO: 661 - DNA, 2208 bp, Artificial Sequence
  Description of Artificial Sequence: Synthetic polynucleotide
atggctgccgatggttatcttccagattggctcgaggacaacctctctgagggcattcgcgagtggtgggacttgaaacctggagccccgaagcccaaagccaaccagcaaaagcaggacgacggccggggtctggtgcttcctggctacaagtacctcggacccttcaacagactcgacaagggggagcccgtcaacgcggcggacgcagcggccctcgagcacgacaaggcctacgaccagcagctcaaagcgggtgacaatccgtacctgcggtataaccacgccgacgccgagtttcaggagcgtctgcaagaagatacgtcttttgggggcaacctcgggcgagcagtcttccaggccaagaagcgggttctcgaacctctcggtctggttgaggaaggcgctaagacggctcctggaaggaaacgtccggtagagcagtcgccacaagagccagactcctcctcgggcatcggcaagacaggccagcagcccgctaaaaagagactcaattttggtcagactggcgactcagagtcagtccccgatccacaacctctcggagaacctccagcaacccccgctgctgtgggacctactacaatggcttcaggcggtggcgcgccaatggcagacaataacgaaggcgccgacggagtgggtaatgcctcaggaaattggcattgcgattccacatggctgggcgacagagtcatcaccaccagcacccgcacctgggccttgcccacctacaataaccacctctacaagcaaatctccagtgcttcaacgggggccagcaacgacaaccactacttcggctacagcaccccctgggggtattttgatttcaacagattccactgccacttttcaccacgtgactggcagcgactcatcaacaacaattggggattccggcccaagagactcaacttcaaactcttcaacatccaagtcaaggaggtcacgacgaatgatggcgtcacaaccatcgctaataaccttaccagcacggttcaagtcttctcggactcggagtaccagcttccgtacgtcctcggctctgcgcaccagggctgcctccctccgttcccggcggacgtgttcatgattccgcaatacggctacctgacgctcaacaatggcggccaagccgtgggacgttcatccttttactgcctggaatatttcccttctcagatgctgagaacgggcaacaactttaccttcagctacacctttgaggaagtgcctttccacagcagctacgcgcacagccagagcctggaccggctgatgaatcctctcatcgaccaatacctgtattacctgaacagaactcaaaatcagtccggaagtgcccaaaacaaggacttgctgtttagccgtgggtctccagctggcatgtctgttcagcccaaaaactggctacctggaccctgttatcggcagcagcgcgtttctaaaacaaaaacagacaacaacaacagcaattttacctggactggtgcttcaaaatatagcctcaatgggcgtgaatccatcatcaaccctggcactgctatggcctcacacaaagacgacgaagacaagttctttcccatgggcggtgtcatgatttttggaaaagagagcgccggagcttcaaacactgcattggacaatgccatgattacagacgaagaggaaattaaagccactaaccctgtggccaccgaaagatttgggaccgtggcagtcaatttccagagcagcagcacagaccctgcgaccggagatgtgcatgctatgggagcattacctggcatggtgtggcaagatagagacgtgtacctgcagggtcccatttgggccaaaattcctcacacagatggacactttcacccgtctcctcttatgggcggctttggactcaagaacccgcctcctcagatcctcatcaaaaacacgcctgttcctgcgaatcctccggcggagttttcagctacaaagtttgcttcattcatcacccaatactccacaggacaagtgagtgtggaaattgaatgggagctgcagaaagaaaacagcaagcgctggaatcccgaagtgcagtacacatccaattatgcaaaatctgccaacgttgattttactgtggacaacaatggactttatactgagcctcgccccattggcacccgttaccttacccgtcccctg

SEQ ID NO: 662 - DNA, 2208 bp, Artificial Sequence
  Description of Artificial Sequence: Synthetic polynucleotide
atggctgccgatggttatcttccagattggctcgaggacaacctctctgagggcattcgcgagtggtgggacttgaaacctggagccccgaagcccaaagccaaccagcaaaagcaggacgacggccggggtctggtgcttcctggctacaagtacctcggacccttcaacggactcgacaagggggagcccgtcaacgcggcggacgcagcggccctcgagcacgacaaggcctacgaccagcagctcaaagcgggtgacaatccgtacctgcggtataaccacgccgacgccgagtttcaggagcgtctgcaagaagatacgtcttttgggggcaacctcgggcgagcagtcttccaggccaagaagcgggttctcgaacctctcggtctggttgaggaaggcgctaagacggctcctggaaagaaacgtccggtagagcagtcgccacaagagccagactcctcctcgggcatcggcaagacaggccagcagcccgctaaaaagagactcaattttggtcagactggcgactcagagtcagtccccgatccacaacctctcggagaacctccagcaacccccgctgctgtgggacctactacaatggcttcaggcggtggcgcaccaatggcagacaataacgaaggcgccgacggagtgggtaatgcctcaggaaattggcattgcgattccacatggctgggcggcagagtcatcaccaccagcacccgcacctgggccttgcccacctacaataaccacctctacaagcaaatctccagtgcttcaacgggggccagcaacgacaaccactacttcggctacagcaccccctgggggtattttgatttcaacagattccactgccacttttcaccacgtgactggcagcgactcatcaacaacaattggggattccggcccaagagactcaacttcaaactcttcaacatccaagtcaaggaggtcacgacgaatgatggcgtcacaaccatcgctaataaccttaccagcacggttcaagtcttctcggactcggagtaccagcttccgtacgtcctcggctctgcgcaccagggctgcctccctccgttcccggcggacgtgttcatgattccgcaatacggctacctgacgctcaacaatggcagccaagccgtgggacgttcatccttttactgcctggaatatttcccttctcagatgctgagaacgggcaacaactctaccttcagctacacctttgaggaagtgcctttccacagcagctacgcgcacagccagagcctggaccggctgatgaatcctctcatcgaccaatacctgtattacctgaacagaactcaaaatcagtccggaagtgcccaaaacaaggacttgctgtttagccgtgggtctccagctggcatgtctgttcagcccaaaaactggctacctggaccctgttatcggcagcagcgcgtttctaaaacaaaaacagacaacaacaacagcaattttacctggactggtgcttcaaaatataacctcaatgggcgtgaatccatcatcaaccctggcactgctatggcctcacacaaagacgacgaagacaagttctttcccatgagcggtgtcatgatttttggaaaagagagcgccggagcttcaaacactgcattggacaatgtcatgattacagacgaagaggaaattaaagccactaaccctgtggccaccgaaagatttgggaccgtggcagtcaatttccagagcagcagcacagaccctgcgaccggagatgtgcatgctatgggaacattacctggcatggtgtggcaagatagagacgtgtacctgcagggtcccatttgggccaaaattcctcacacagatggacactttcacccgtctcctcttatgggcggctttggactcaagaacccgcctcctcagatcctcatcaaaaacacgcctgttcctgcgaatcctccggcggagttttcagctacaaagtttgcttcattcatcacccaatactccacaggacaagtgagtgtggaaattgaatgggagctgcagaaagaaaacagcaagcgctggaatcccgaagtgcagtacacatccaattatgcaaaatctgccaacgttgattttactgtggacaacaatggactttatactgagcctcgccccattggcacccgttaccttacccgtcccctg

SEQ ID NO: 663 - DNA, 2208 bp, Artificial Sequence
  Description of Artificial Sequence: Synthetic polynucleotide
atggctgccgatggttatctcccagattggctcgaggacaacctctctgagggcattcgcgagtggtgggacttgaaacctggagccccgaagcccaaagccaaccagcaaaagcaggacgacggccggggtctggtgcttcctggctacaagtacctcggacccttcaacggactcgacaagggggagcccgtcagcgcggcggacgcagcggccctcgagcacgacaaggcctacgaccagcagctcaaagcgggtgacaatccgtacctgcggtataaccacgccgacgccgagtttcaggagcgtctgcaagaagatacgtcttttgggggcaacctcgggcgagcagtcttccaggccaagaagcgggttctcgaacctctcggtctggttgaggaaggcgctaagacggctcctggaaagaaacgtccggtagagcagtcgccacaagagccagactcctcctcgggcatcggcaagacaggccagcagcccgctaaagagagactcaattttggtcagactggcgactcagagtcagtccccgatccacaacctctcggagaacctccagcaacccccgctgctgtgggacctactacaatggcttcaggcggtggcgcaccaatggcagacaataacgaaggcgccgacggagtgggtaatgcctcaggaaattggcattgcgattccacatggctgggcgacagagtcatcaccaccagcacccgcacctgggccttgcccacctacaataaccacctctacaagcaaatctccagtgcttcaacgggggccagcaacgacaaccactacttcggctacagcaccccctgggggtattttgatttcaacagattccactgccacttttcaccacgtgactggcagcgactcatcaacaacaattggggattccggcccaagagactcaacttcaaactcttcaacatccaagtcaaggaggtcacgacgaatgatggcgtcacaaccatcgccaataaccttaccagcacggttcaagtcttctcggactcggagtaccagcttccgtacgtcctcggctctgcgcaccagggctgcctccctccgttcccggcggacgtgttcatgattccgcaatacggctacctgacgctcaacaatggcagccaagccgtgggacgttcatccttttactgcctggaatatttcccttctcagatgctgagaacgggcaacaactttaccttcagctacacctttgaggaagtgcctttccacagcagctacgcgcacagccagagcctggaccggctgatgaatcctctcatcgaccaatacctgtattacctgaacagaactcaaaatcagtccggaagtgcccaaaacaaggacttgctgtttagccgtgggtctccagctggcatgtctgttcagcccaaaaactggctacctggaccctgttatcggcagcagcgcgtttctaaaacaaaaacagacaacaacaacagcaattttacctggactggtgcttcaaaatataacctcaatgggcgtgaatccatcatcaaccctggcactgctatggcctcacacaaagacgacgaagacaagttctttcccatgagcggtgtcatgatttttggaaaagagagcgccggagcttcaaacactgcattggacaatgtcatgattacagacgaagaggaaattaaagccactaaccctgtggccaccgaaagatttgggaccgtggcagtcaatttccagagcagcagcacagaccctgcgaccggagatgtgcatgctatgggagcattacctggcatggtgtggcaagatagagacgtgtacctgcagggtcccatttgggccaaaattcctcacacagatggacactttcacccgtctcctcttatgggcggctttggactcaagaacccgcctcctcagatcctcatcaaaaacacgcctgttcctgcgaatcctccggcggagttttcagctacaaagtttgcttcattcatcacccaatactccacaggacaagtgagtgtggaaattgaatgggagctgcagaaagaaaacagcaagcgctggaatcccgaagtgcagtacacatccaattatgcaaaatctgccaacgttgattttactgtggacaacaatggactttatactgagcctcgccccattggcacccgttaccttacccgtcccctg

SEQ ID NO: 664 - DNA, 2208 bp, Artificial Sequence
  Description of Artificial Sequence: Synthetic polynucleotide
atggctgccgatggttatcttccagattggctcgaggacaacctctctgagggcattcgcgagtggtgggacttgaaacctggagccccgaagcccaaagccaaccagcaaaagcaggacgacggccggggtctggtgcttcctggctacaagtacctcggacccttcaacggactcgacaagggggagcccgtcaacgcggcggacgcagcggccctcgagcacgacaaggcctacgaccagcagctcaaagcgggtgacaatccgtacctgcggtataaccacgccgacgccgagtttcaggagcgtctgcaagaagatacgtcttttgggggcaacctcgggcgagcagtcttccaggccaagaagcgggttctcgaacctctcggtctggttgaggaaggcgctaagacggctcctggaaagaaacgtccggtagagcagtcgccacaagagccagactcctcctcgggcatcggcaagacaggccagcagcccgctaaaaagagactcaattttggtcagactggcgactcagagtcagtccccgatccacaacctctcggagaacctccagcaacccccgctgctgtgggacctactacaatggcttcaggcggtggcgcaccaatggcagacaataacgaaggcgccgacggagtgggtaatgcctcaggaaattggcattgcgattccacatggctgggcgacagagtcatcaccaccagcacccgcacctgggccttgcccacctacaataaccacctctacaagcaaatctccagtgcttcaacgggggccagcaacgacaaccactacttcggctacagcaccccctgggggtattttgatttcaacagattccactgccacttttcaccacgtgactggcagcgactcatcaacaacaattggggattccggcccaagagactcaacttcaaactcttcaacatccaagtcaaggaggtcacgacgaatgatggcgtcacaaccatcgctaataaccttaccagcacggttcaagtcttctcggactcggagtaccagcttccgtacgtcctcggctctgcgcaccagggctgcctccctccgttcccggcggacgtgttcatgattccgcaatacggctacctgacgctcaacaatggcagccaagccgtgggacgttcatccttttactgcctggaatatttcccttctcagatgctgagaacgggcaacaactttaccttcagctacacctttgaggaagtgcctttccacagcagctacgcgcacagccagagcctggaccggctgatgaatcctctcatcgaccaatacctgtattacctgaacagaactcaaaatcagtccggaagtgcccaaaacaaggacttgctgtttagccgtgggtctccagctggcatgtctgttcagcccaaaaactggctacctggaccctgttatcggcagcagcgcgtttctaaaacaaaaacagacaacaacaacagcaattttacctggactggtgcttcaaaatataacctcaatgggcgtgaatccatcatcaaccctggcactgctatggcctcacacaaagacgacgaagacaagttctttcccatgagcggtgtcatgatttttggaaaagagagcgccggagcttcaaacactgcattggacaatgtcatgattacagacgaaggggaaattaaagccactaaccctgtggccaccgaaagatttgggaccgtggcagtcaatttccagagcagcagcacagaccctgcgaccggagatgtgcatgctatgggagcattacctggcatggtgtggcaagatagagacgtgtacctgcagggtcccatttgggccaaaattcctcacacagatggacactttcacccgtctcctcttatgggcggctttggactcaagaacccgcctcctcagatcctcatcaaaaacacgcctgttcctgcgaatcctccggcggagttttcagctacaaagtttgcttcattcatcacccaatactccacaggacaagtgagtgtggaaattgaatgggagctgcagaaagaaaacagcaagcgctggaatcccgaagtgcagtacacatccaattatgcaaaatctgccaacgttgattttactgtggacaacaatggactttatactgagcctcgccccattggcacccgttaccttacccgtcccctg

SEQ ID NO: 665 - DNA, 2208 bp, Artificial Sequence
  Description of Artificial Sequence: Synthetic polynucleotide
atggctgccgatggttatcttccagattggctcgaggacaacctctctgagggcattcgcgagtggtgggacttgaaacctggagccccgaaacctaaagccaaccagcaaaagcaggacgacggccggggtctggtgcttcctggctacaagtacctcggacccttcaacggactcgacaagggggagcccgtcaacgcggcggacgcagcggccctcgagcacgacaaggcctacgaccagcagctcaaagcgggtgacaatccgtacctgcggtataaccacgccgacgccgagtttcaggagcgtctgcaagaagatacgtcttttgggggcaacctcgggcgagcagtcttccaggccaagaagcgggttctcgaaccttttggtctggttgaggaaggcgctaagacggctcctggaaagaaacgtccggtagagcagtcgccacaagagccagactcctcctcgggcatcggcaagacaggccagcagcccgctaaaaagagactcaattttggtcagactggcgactcagagtcagtccccgacccacaacctctcggagaacctccagcaacccccgctgctgtgggacctactacaatggcttcaggcggtggcgcaccaatggcagacaataacgaaggcgccgacggagtgggtaatgcctcaggaaattggcattgcgattccacatggctgggcgacagagtcatcaccaccagcacccgcacctgggccttgcccacctacaataaccacctctacaagcaaatctccagtgcttcaacgggggccagcaacgacaaccactacttcggctacagcaccccctgggggtattttgatttcaacagattccactgccacttttcaccacgtgactggcagcgactcatcaacaacaattggggattccggcccaagagactcaacttcaagctcttcaacatccaagtcaaggaggtcacgacgaacgatggcgtcacgaccatcgctaataaccttaccagcacggttcaagtcttctcggattcagagtaccaactgccgtacgtcctcggctctgcgcaccagggctgcctccctccgttcccggcggacgtgtttatgattccgcagtacggctacctaacgctcaacaatggcagccaggccgtgggacgttcatccttttactgcccggaatatttcccttctcagatgctgagaacgggcaacaactttaccttcagctacacctttgaggaagtgcctttccacagcagctacgcgcacagccagagcctggaccggctgatgaatcctctcatcgaccaatacctgtattacctgaacagaactcaaaatcagtccggaagtgcccaaaacaaggacttgctgtttagccgtgggtctccagctggcatgtctgttcagcccaaaaactggctacctggaccctgttatcggcagcagcgcgtttctaaaacaaaaacagacaacaacaacagcaattttacctggactggtgcttcaaaatataacctcaatgggcgtgaatccatcatcaaccctggcactgctatggcctcacacaaagacgacaaagacaagttctttcccatgagcggtgtcatgatttttggaaaagagagcgccggagcttcaaatactgcattggacaatgtcatgatcacagatgaagaggaaattaaagccactaaccctgtggccaccgaaagatttgggaccgtggcagtcaatttccagagcagcaacacagaccccgcgaccggagatgtgcatgttatgggagccttacctggcatggtgtggcaagacagagacgtatacctgcagggtcccatttgggccaaaattcctcacacggatggacactttcacccgtctcctctcatgggcggctttggacttaagcacccgcctcctcaaatcctcatcaaaaacacgcctgttcctgcgaatcctccggcagagttttcggctacaaagtttgcttcattcatcacccagtactccacaggacaagtgagtgtggaaattgaatgggagctgcagaaagaaaacagcaagcgctggaatcccgaagtgcagtacacatccaattatgcaaaatctgccaacgttgatttcactgtggacaacaatggactttatactgagcctcgccccattggcacccgttaccttacccgtcccttg

SEQ ID NO: 666 - DNA, 2208 bp, Artificial Sequence
  Description of Artificial Sequence: Synthetic polynucleotide
atggctgccgatggttatcttccagattggctcgaggacaacctctctgagggcattcgcgagtggtgggacttgaaacctggagccccgaaacctaaagccaaccagcaaaagcaggacgacggccggggtctggtgcttcctggctacaagtacctcggacccttcaacggactcgacaagggggagcccgtcaacgcggcggacgcagcggccctcgagcacgacaaggcctacgaccagcagctcaaagcgggtgacaatccgtacctgcggtataaccacgccgacgccgagtttcaggagcgtctacaagaagatacgtcttttgggggcaacctcgggcgagcagtcttccaggccaagaagcgggttctcgaaccttttggtctggttgaggaaggcgctaagacggctcctggaaagaaacgtccggtagagcagtcgccacaagagccagactcctcctcgggcatcggcaagacaggccagcagcccgctaaaaagagactcaattttggtcagactggcgactcagagtcagtccccgacccacaacctctcggagaacctccagcaacccccgctgctgtgggacctactacaatggcttcaggcggtggcgcaccaatggcagacaataacgaaggcgccgacggagtgggtaatgcctcaggaaattggcattgcgattccacatggctgggcgacagagtcatcaccaccagcacccgcacctgggccttgcccacctacaataaccacctctacaagcaaatctccagtgcttcaacgggggccagcaacgacaaccactacttcggctacagcaccccctgggggtattttgatttcaacagattccactgccacttttcaccacgtgactggcagcgactcatcaacaacaattggggattccggcccaagagactcaacttcaagctcttcaacatccaagtcaaggaggtcacgacgaacgatggcgtcacgaccatcgctaataaccttaccagcacggttcaagtcttctcggattcagagtaccaactgccgtacgtcctcggctctgcgcaccagggctgcctccctccgttcccggcggacgtgttcatgattccgcagtacggctacctaacgctcaacaatggcagccaggccgtgggacgttcatccttttactgcctggaatatttcccttctcagatgctgagaacgggcaacaactttaccttcagctacacctttgaggaagtgcctttccacagcagctacgcgcacagccagagcctggaccggctgatgaatcctctcatcgaccaatacctgtattacctgaacagaactcaaaatcagtccggaagtgcccaaaacaaggacttgctgtttagccgtgggtctccagctggcatgtctgttcagcccaaaaactggctacctggaccctgttatcggcagcagcgcgtttctaaaacaaaaacagacaacaacaacagcaattttacctggactggtgcttcaaaatataacctcaatgggcgtgaatccatcatcaaccctggcactgctatggcctcacacaaagacgacaaagacaagttctttcccatgagcggtgtcatgatttttggaaaagagagcgccggagcttcaaatactgcattggacaatgtcatgatcacagatgaagaggaaattaaagccactaaccctgtggccaccgaaagatttgggaccgtggcagtcaatttccagagcagcgacacagaccccgcgaccggagatgtgcatgttatgggagccttacctggcatggtgtggcaagacagagacgtatacctgcagggtcccatttgggccaaaattcctcacacggatggacactttcacccgtctcctctcatgggcggctttggacttaagcacccgcctcctcaaatcctcatcaaaaacacgcctgttcctgcgaatcctccggcagagttttcggctacaaagtttgcttcattcatcacccagtactccacaggacaagtgagtgtggaaattgaatgggagctgcagaaagaaaacagcaagcgctggaatcccgaagtgcagtacacatccaattatgcaaaatctgccaacgttgatttcactgtggacaacaatggactttatactgagcctcgccccattggcacccgttaccttacccgtcccttg

SEQ ID NO: 667 - DNA, 2208 bp, Artificial Sequence
  Description of Artificial Sequence: Synthetic polynucleotide
atggctgccgatggttatcttccagattggctcgaggacaacctctctgagggcattcgcgagtggtgggacttgaaacctggagccccgaaacctaaagccaaccagcaaaagcagggcgacggccggggtctggtgcttcctggctacaagtacctcggacccttcaacggactcgacaagggggagcccgtcaacgcggcggacgcagcggccctcgagcacgacaaggcctacgaccagcagctcaaagcgggtgacaatccgtacctgcggtataaccacgccgacgccgagtttcaggagcgtctgcaagaagatacgtcttttgggggcaacctcgggcgagcagtcttccaggccaagaagcgggttctcgaaccttttggtctggttgaggaaggcgctaagacggctcctggaaagaaacgtccggtagagcagtcgccacaagagccagactcctcctcgggcatcggcaagacaggccagcagcccgctaaaaagagactcaattttggtcagactggcgactcagagtcagtccccgacccacaacctctcggagaacctccagcaacccccgctgctgtgggacctactacaatggcttcaggcggtggcgcaccaatggcagacaataacgaaggcgccgacggagtgggtaatgcctcaggaaattggcattgcgattccacatggctgggcgacagagtcatcaccaccaacactcgcacctgggccttgcccacctacaataaccacctctacaagcaaatctccagtgcttcaacgggggccagcaacgacaaccactacttcggctacagcaccccctgggggtattttgatttcaacagattccactgccacttttcaccacgtgactggcagcgactcatcaacaacaattggggattccggcccaagagactcaacttcaagctcttcaacatccaagtcaaggaggtcacgacgaacgatggcgtcacgaccatcgctaataaccttaccagcacggttcaagtcttctcggattcagagtaccaactgccgtacgtcctcggctctgcgcaccagggctgcctccctccgttcccggcggacgtgttcatgattccgcagtacggctacctaacgctcaacaatggcagccaggccgtgggacgttcatccttttactgcctggaatatttcccttctcagatgctgagaacgggcaacaactttaccttcagctacacctttgaggaagtgcctttccacagcagttacgggcacagccagagcctggaccggctgatgaatcttctcatcgaccaatacctgtattacctgaacagaactcaaaatcagtccggaagtgcccaaaacaaggacttgctgtttagccgtgggtctccagctggcatgtttgttcagcccaaaaactggctacctggaccctgttatcggcagcagcgcgtttctaaaacaaaaacagacaacaacaacagcaattttacctggactggtgcttcaaaatataacctcaatgggcgtgaatccatcatcaaccctggcactgctatggcctcacacaaagacgacgaagacaagttctttcccatgagcggtgtcatgatttttggaaaagagagcgccggagcttcaaatactgcattggacaatgtcatgatcacagatgaagaggaaattaaagccactaaccctgtggccaccgaaagatttgggaccgtggcagtcaatttccagagcagcagcacagaccccgcgaccggagatgtgcatgttatgggagccttacctggcatggtgtggcaagacagagacgtatacctgcagggtcccatttgggccaaaattcctcacacggatggacactttcacccgtctcctctcatgggcggctttggacttaagcacccgcctcctcaaatcctcatcaaaaacacgcctgttcctgcgaatcctccggcagagttttcggctacaaagtttgcttcattcatcacccagtactccacaggacaagtgagtgtggaaattgaatgggagctgcagaaagaaaacagcaagcgctggaatcccgaagtgcagtacacatccaattatgcaaaatctgccaacgttgatttcactgtggacaacaatggactttatactgagcctcgccccattggcacccgttaccttacccgtcccttg

SEQ ID NO: 668 - DNA, 2208 bp, Artificial Sequence
  Description of Artificial Sequence: Synthetic polynucleotide
atggctgccgatggttatcttccagattggctcgaggacaacctctctgagggcattcgcgagtggtgggacttgaaacctggagccccgaaacctaaagccaaccagcaaaagcaggacgacggccggggtctggtgcttcctggctacaagtacctcggacccttcaacggactcgacaagggggagcccgtcaacgcggcggacgcagcggccctcgagcacgacaaggcctacgaccagcagctcaaagcgggtgacaatccgtacctgcggtataaccacgccgacgccgagtttcaggagcgtctgcaagaagatacgtcttttgggggcaacctcgggcgagcagtcttccaggccaagaagcgggttctcgaaccttttggtctggttgaggaaggcgctaagacggctcctggaaagaaacgtccggtagagcagtcgccacaagagccagactcctcctcgggcatcggcaagacaggccagcagcccgctaaaaagagactcaattttggtcagactggcgactcagagtcagtccccgacccacaacctctcggagaacctccagcaacccccgctgctgtgggacctactacaatggcttcaggcggtggcgcaccaatggcagacaataacgaaggcgccgacggagtgggtaatgcctcaggaaattggcattgcgattccacatggctgggcgacagagtcatcaccaccaacacccgcacctgggccttgcccacctacaataaccacctctacaagcaaatctccagtgcttcaacgggggccagcaacgacaaccactacttcggctacagcaccccctgggggtattttgatttcaacagattccactgccacttttcaccacgtgactggcagcgactcatcaacaacaattggggattccggcccaagagactcaacttcaagctcttcaacatccaagtcaaggaggtcacgacgaacgatggcgtcacgaccatcgctaataaccttaccagcacggttcaagtcttctcggattcagagtaccaactgccgtacgtcctcggctctgcgcaccagggctgcctccctccgttcccggcggacgtgttcatgattccgcagtacggctacctaatgctcaacaatggcagccaggccgtgggacgttcatccttttactgcctggaatatttcccttctcagatgctgagaacgggcaacaactttaccttcagctacacctttgaggaagtgcctttccacagcagctacgcgcacagccagagcctggaccggctgatgaatcctctcatcgaccaatacctgtattacctgaacagaactcaaaatcagtccggaagtgcccaaaacaaggacttgctgtttagccgtgggtctccagctggcatgtctgttcagcccaaaaactggctacctggaccctgttatcggcagcagcgcgtttctaaaacaaaaacagacaacaacaacagcaattttacctggactggtgcttcaaaatataacctcaatgggcgtgaatccatcatcaaccctggcactgctatggcctcacacaaagacgacgaagacaagttctttcccatgagcggtgtcatgatttttggaaaagagagcgccggagcttcaaatactgcattggacaatgtcatgatcacagatgaagaggaaattaaagccactaaccctgcggccaccgaaagatttgggaccgtggcagtcaatttccagagcagcagcacagaccccgcgaccggagatgtgcatgttatgggagccttacctggcatggtgtggcaagacagagacgtatacctgcagggtcccatttgggccaaaattcctcacacggatggacactttcacccgtctcctctcatgggcggctttggacttaagcacccgcctcctcaaatcctcatcaaaaacacgcctgttcctgcgaatcctccggcagagttttcggctacaaagtttgcttcattcatcacccagtactccacaggacaagtgagtgtggaaattgaatgggagctgcagaaagaaaacagcaagcgctggaatcccgaagtgcagtacacatccaattatgcaaaatctgccaacgttgatttcactgtggacaacaatggactttatactgagcctcgccccattggcacccgttaccttacccgtcccttg

SEQ ID NO: 669 - DNA, 2208 bp, Artificial Sequence
  Description of Artificial Sequence: Synthetic polynucleotide
atggctgccgatggttatcttccagattggctcgaggacaacctctctgagggcattcgcgagtggtgggacttgaaacctggagccccgaaacctaaagccaaccagcaaaagcaggacgacggccggggtctggtgcttcctggctacaagtacctcggacccttcaacggactcgacaagggggagcccgtcaacgcggcggacgcagcggccctcgagcacgacaaggcctacgaccagcagctcaaagcgggtgacaatccgtacctgcggtataaccacgccgacgccgagtttcaggagcgtctgcaagaagatacgtcttttgggggcaacctcgggcgagcagtcttccaggccaagaagcgggttctcgaaccttttggtctggttgaggaaggcgctaagacggctcctggaaagaaacgtccggtagagcagtcgccacaagagccagactcctcctcgggcatcggcaagacgggccagcagcccgctaaaaagagactcaattttggtcagactggcgactcagagtcagtccccgacccacaacctctcggagaacctccagcaacccccgctgctgtgggacctactacaatggcttcaggcggtggcgcaccaatggcagacaataacgaaggcgccgacggagtgggtaatgcctcaggaaattggcattgcgattccacatggctgggcgacagagtcatcaccaccagcacccgcacctgggccttgcccacctacaataaccacctctacaagcaaatctccagtgcttcaacgggggccagcaacgacaaccactacttcggctacagcaccccctgggggtattttgatttcaacagattccactgccacttttcaccacgtgactggcagcgactcatcaacaacaattggggattccggcccaagagactcaacttcaagctcttcaacatccaagtcaaggaggtcacgacgaacgatggcgtcacgaccatcgctaataaccttaccagcacggttcaagtcttctcggattcagagtaccaactgccgtacgtcctcggctctgcgcaccagggctgcctccctccgttcccggcggacgtgttcatgattccgcagtacggctacctaacgctcaacaatggcagccaggccgtgggacgttcatccttttactgcctggaatatttcccttctcagatgctgagaacgggcaacaactttaccttcagctacacctttgaggaagtgcctttccacagcagctacgcgcacagccagagcctggaccggctgatgaatcctctcatcgaccaatacctgtattacctgaacagaactcaaaatcagtccggaagtgcccaaaacaaggacttgctgtttagccgtgggtctccagctggcatgtccgttcagcccaaaaactggctacctggaccctgttatcggcagcagcgcgtttctaaaacaaaaacagacaacaacaacagcaattttacctggactggtgcttcaaaatataacctcaatgggcgtgaatccatcatcaaccctggcactgctatggcctcacacaaagacgacgaagacaagttctttcccatgagcggtgtcatgatttttggaaaagagagcgccggagcttcaaatactgcattggacaatgtcatgatcacagatgaagaggaaattaaagccactaaccctgtggccaccgaaagatttgggaccgtggcagtcaatttccagagcagcagcacagaccccgcgaccggagatgtgcatgttatgggagccttacctggcatggtgtggcaagacagagacgtatacctgcagggtcccatttgggccaaaattcctcacacggatggacactttcacccgtctcctctcatgggcggctttggacttaagcacccgcctcctcaaatcctcatcaaaaacacgcctgttcctgcgaatcctccggcagagttttcggctacaaagtttgcttcattcatcacccagtactccacaggacaagtgagtgtggaaattgaatgggagctgcagaaagaaaacagcaagcgctggaatcccgaagtgcagtacacatccaattatgcaaaatctgccaacgttgatttcactgtggacaacaatggactttatactgagcctcgccccattggcacccgttaccttacccgtcccttg

SEQ ID NO: 670 - DNA, 2208 bp, Artificial Sequence
  Description of Artificial Sequence: Synthetic polynucleotide
  misc_feature (305)..(305): n is a, c, t, or g
atggctgccgatggttatcttccagattggctcgaggacaacctctctgagggcattcgcgagtggtgggacttgaaacctggagccccgaaacctaaagccaaccagcaaaagcaggacgacggccggggtctggtgcttcctggctacaagtacctcggacccttcaacggactcgacaagggggagcccgtcaacgcggcggacgcagcggccctcgagcacgacaaggcctacgaccagcagctcaaagcgggtgacaatccgtacctgcggtataaccacgccgacgccgagtttcaggngcgtctgcaagaagatacgtcttttgggggcaacctcgggcgagcagtcttccaggccaagaagcgggttctcgaaccttttggtctggttgaggaaggcgctaagacggctcctggaaagaaacgtccggtagagcagtcgccacaagagccagactcctcctcgggcatcggcaagacaggccagcagcccgctaaaaagagactcaattttggtcagactggcgactcagagtcagtccccgacccacaacctctcggagaacctccagcaacccccgctgctgtgggacctactacaatggcttcaggcggtggcgcaccaatggcagacaataacgaaggcgccgacggagtgggtaatgcctcaggaaattggcattgcgattccacatggctgggcggcagagtcatcaccaccagcacccgcacctgggccttgcccacctacaataaccacctctacaagcaaatctccagtgcttcaacgggggccagcaacgacaaccactacttcggccacagcaccccctgggggtattttgatttcaacagattccactgccacttttcaccacgtgactggcagcgactcatcaacaacaattggggattccggcccaagagactcaacttcaagctcttcaacatccaagtcaaggaggtcacgacgaacgatggcgtcacgaccatcgctaataaccttaccagcacggttcaagtcttctcggattcagagtaccaactgccgtacgtcctcggctctgcgcaccagggctgcctccctccgtccccggcggacgtgttcatgattccgcagtacggctacctaacactcaacaatggcagccaggccgtgggacgttcatccttttactgcctggaatatttcccttctcagatgctgagaacgggcaacaactttaccttcagctacacctttgaggaagtgcctttccacagcagctacgcgcacagccagagcctggaccggctgatgaatcctctcatcgaccaatacctgtattacctgaacagaactcaaaatcagtccggaagtgcccaaaacaaggacttgctgtttagccgtgggtctccagctggcatgtctgttcagcccaaaaactggctacctggaccctgttatcggcagcagcgcgtttctaaaacaaaaacagacaacaacaacagcaattttacctggactggtgcttcaaaatataacctcaatgggcgtgaatccatcatcaaccctggcactgctatggcctcacacaaagacgacaaagacaagttctttcccatgagcggtgtcatgatttttggaaaagagagcgccggagcttcaaatactgcattggacaatgtcatgatcacagatgaagaggaaattaaagccactaaccctgtggccaccgaaagatttgggaccgtggcagtcaatttccagagcagcaacacagaccccgcgaccggagatgtgcatgttatgggagccttacctggcatggtgtggcaagacagagacgtatacctgcagggtcccatttgggccaaaattcctcacacggatggacactttcacccgtctcctctcatgggcggctttggacttaagcacccgcctcctcaaatcctcatcaaaaacacgcctgttcctgcgaatcctccggcagagttttcggctacaaagtttgcttcattcatcacccagtactccacaggacaagtgagtgtggaaattgaatgggagctgcagaaagaaaacagcaagcgctggaatcccgaagtgcagtacacatccaattatgcaaaatctgccaacgttgatttcactgtggacaacaatggactttatactgagcctcgccccattggcacccgttaccttacccgtcccttg

SEQ ID NO: 671 - DNA, 2208 bp, Artificial Sequence
  Description of Artificial Sequence: Synthetic polynucleotide
atggctgccgatggttattttccagattggctcgaggacaacctttctgagggcattcgcgagtggtgggacttgaaacctggagccccgaaacctaaagccaaccagcaaaagcaggacgacggccggggtctggtgcttcctggctacaagtacctcggacccttcaacggactcgacaagggggagcccgtcaacgcggcggacgcagcggccctcgagcacgacaaggcctacgaccagcagctcaaagcgggtgacaatccgtacctgcggtataaccacgccgacgccgagtttcaggagcgtctgcaagaagatacgtcttttgggggcaacctcgggcgagcagtcttccaggccaagaagcgggttctcgaaccttttggtctggttgaggaaggcgctaagacggctcctggaaagaaacgtccggtagagcagtcgccacaagagccagactcctcctcgggcatcggcaggacaggccagcagcccgctaaaaagagactcaattttggtcagactggcgactcagagtcagtccccgacccacaacctctcggagaacctccagcgacccccgctgctgtgggacctactacaatggcttcaggcggtggcgcaccaatggcagacaataacgaaggtgccgacggagtgggtaatgcctcaggaaattggcattgcgattccacatggctgggcgacagagtcatcaccaccagcacccgcacctgggccttgcccacctacaataaccacctctacaagcaaatctccagtgcttcaacgggggccagcaacgacaaccactacttcggctacagcaccccctgggggtattttgatttcaacagattccactgccacttttcaccacgtgactggcagcgactcatcaacaacaattggggattccggcccaagagactcaacttcaagctcttcaacatccaagtcaaggaggtcacgacgaacgatggcgtcacgaccatcgctaataaccttaccagcacggttcaagtcttctcggattcagagtaccaactgccgtacgtcctcggctctgcgcaccagggctgcctccctccgttcccggcggacgtgttcatgattccgcagtacggctacctaacgctcaacaatggcagccaggccgtgggacgttcatccttttactgcctggaatatttcccttctcagatgctgagaacgggcaacaactttaccttcagctacacctttgaggaagtgcctttccacagcagctacgcgcacagccagagcctggaccggctgatgaatcctctcatcgaccaatacctgtattacctgaacagaactcaaaatcagtccggaagtgcccaaaacaaggacttgctgtttagccgtgggtctccagctggcatgtctgttcagcccaaaaactggctacctggaccctgttatcggcagcagcgcgtttctaaaacaaaaacagacaacaacaacagcaattttacctggactggtgcttcaaaatataacctcaatgggcgtgaatccatcatcaaccctggcactgctatggcctcacacaaagacgacgaagacaagttctttcccatgagcggtgtcatgatttttggaaaagagagcgccggagcttcaaatactgcattggacaatgtcatgatcacagatgaagaggaaattaaagccactaaccctgtggccaccgaaagatttgggaccgtggcagtcaatttccagagcagcagcccagaccccgcgaccggagatgtgcatgttatgggagccttacctggcatggtgtggcaagacagagacgtatacctgcagggtcccatttgggccaaaattcctcacacggatggacactttcacccgtctcctctcatgggcggctttggacttaagcacccgcctcctcaaatcctcatcaaaaacacgcctgttcctgcgaatcctccggcagagttttcggctacaaagtttgcttcattcatcacccagtactccacaggacaagtgagtgtggaaattgaatgggagctgcagaaagaaaacagcaagcgctggaatcccgaagtgcagtacacatccaattatgcaaaatctgccaacgttgatttcactgtggacaacaatggactttatagtgagcctcgccccattggcacccgttaccttacccgtcccttg

SEQ ID NO: 672 - DNA, 2208 bp, Artificial Sequence
  Description of Artificial Sequence: Synthetic polynucleotide
atggctgccgatggttatcttccagattggctcgaggacaacctctctgagggcattcgcgagtggtgggacttgaaacctggagccccgaaacctaaagccaaccagcaaaagcaggacgacggccggggtctggtgcttcctggctacaagtacctcggacccttcaacggactcgacaagggggagcccgtcaacgcggcggacgcagcggccctcgagcacgacaaggcctacgaccagcagctcaaagcgggtgacaatccgtacctgcggtataaccacgccgacgccgagtttcaggagcgtctgcaagaagatacgtcttttgggggcaacctcgggcgagcagtcttccaggccaagaagcgggttctcgaaccttttggtctggttgaggaaggcgctaagacggctcctggaaagaaacgtccggtagagcagtcgccacaagagccagactcctcctcgggcatcggcaagacaggccagcagcccgctaaaaagagactcaattttggtcagactggcgactcagagtcagtccccgacccacaacctctcggagaacctccagcaacccccgctgctgtgggacctactacaatggcttcaggcggtggcgcaccaatggcagacaataacgaaggcgccgacggagtgggtaatgcctcaggaaattggcattgcgattccacatggctgggcgacagagtcatcaccaccagcacccgcacctgggccttgcccacctacaataaccacctctacaagcaaacctccagtgcttcaacgggggccagcaacgacaaccactacttcggctacagcaccccctgggggtattttgatttcaacagattccactgccacttttcaccacgtgactggcagcgactcatcaacaacaattggggattccggcccaagagactcaacttcaagctcttcaacatccaagtcaaggaggtcacgacgaacgatggcgtcacgaccatcgctaataaccttaccagcacggttcaagtcttctcggattcagagtaccaactgccgtacgtcctcggctctgcgcaccagggctgcctccctccgttcccggcggacgtgttcatgattccgcagtacggctacctaacgctcaacaatggcagccaggccgtgggacgttcatccttttactgcctggaatatttcccttctcagatgctgagaacgggcaacaactttaccttcagctacacctttgaggaagtgcctttccacagcagctacgcgcacagccagagcctggaccggctgatgaatcctctcatcgaccaatacctgtattacctgaacagaactcaaaatcagtccggaagtgcccaaaacaaggacttgctgtttagccgtgggtctccagctggcatgtctgttcagcccaaaaactggctacctggaccctgttatcggcagcagcgcgtttctaaaacaaaaacagactacaacaacagcaattttacctggactggtgcttcaaaatataacctcaatgggcgtgaatccatcatcaaccctggcactgctatggcctcacacaaagacgacgaagacaagttctttcccatgagcggtgtcatgatttttggaaaagagagcgccggagcttcaaatactgcattggacaatgtcatgatcacagatgaagaggaaattaaagccactaaccctgtggccaccgaaagatttgggaccgtggcagtcaatttccagagcagcagcacagaccccgcgaccggagatgtgcatgttatgggagccttacctggcatggtgtggcaagacagagacgtatacctgcagggtcccatttgggccaaaattcctcacacggatggacactttcacccgtctcctctcatgggcggctttggacttaagcacccgcctcctcaaatcctcatcaaaaacacgcctgttcctgcgaatcctccggcagagttttcggctacaaagtttgcttcattcatcacccagtactccacaggacaagtgagtgtggaaattgaatgggagctgcagaaagaaaacagcaagcgctggaatcccgaagtgcagtacacatccaattatgcaaaatctgccaacgttgatttcactgtggacaacaatggactttatactgagcctcgccccattggcacccgttaccttacccgtcccttg

SEQ ID NO: 673 - DNA, 2208 bp, Artificial Sequence
  Description of Artificial Sequence: Synthetic polynucleotide
atggctgccgatggttatcctccagattggctcgaggacaacctctctgagggcattcgcgagtggtgggacttgaaacctggagtcccgaaacctaaagccaaccagcaaaagcaggacgacggccggggtctggtgcttcctggctacaagtacctcggacccttcaacggactcgacaagggggagcccgtcaacgcggcggacgcagcggccctcgagcacgacaaggcctacgaccagcagctcaaagcgggtgacaatccgtacctgcggtataaccacgccgacgccgagtttcaggagcgtctgcaagaagatacgtcttttgggggcaacctcgggcgagcagtcttccaggccaagaagcgggttctcgaaccttttggtctggttgaggaaggcgctaagacggctcctggaaagaaacgtccggtagagcagtcgccacaagagccagactcctcctcgggcatcggcaagacaggccagcagcccgctaaaaagagactcaattttggtcagactggcgactcagagtcagtccccgacccacaacctctcggagaacctccagcaacccccgctgctgtgggacctactacaatggcttcaggcggtggcgcaccaatggcagacaataacgaaggcgccgacggagtgggtaatgcctcaggaaattggcattgcgattccacatggctgggcgacagagtcatcaccaccagcacccgcacctgggccttgcccacctacaataaccacctctacaagcaaatctccagtgcttcaacgggggccagcaacgacaaccactacttcggctacagcaccccctgggggtattttgatttcaacagattccactgccacttttcaccacgtgactggcagcgactcatcaacaacaattggggattccggcccaagagactcaacttcaagctcttcaacatccaagtcaaggaggtcacgacgaacgatggcgtcacgaccatcgctaataaccttaccagcacggttcaagtcttctcggattcagagtaccaactgccgtacgtcctcggctctgcgcaccagggctgcctccctccgttcccggcggacgtgttcatgattccgcagtacggctacctaacgctcaacaatggcagccaggccgtgggacgttcatccttttactgcctggaatatttcccttctcagatgctgagaacgggcaacaactttaccttcagctacacctttgaggaagtgcctttccacagcagctacgcgcacagccagagcctggaccggctgatgaatcctctcatcgaccaatacctgtattacctgaacagaactcaaaatcagtccggaagtgcccaaaacaaggacttgctgtttagccgtgggtctccagctggcatgtctgttcagcccaaaaactggctacctggaccctgttatcggcagcagcgcgtttctaaaacaaaaacagacaacaacaacagcaattttacctggactggtgcttcaaaatataacctcaatgggcgtgaatccatcatcaaccctggcactgctatggcctcacacaaagacgacgaagacaagttctttcccatgagcggtgtcatgatttttggaaaagagagcgccggagcttcaaatactgcattggacaatgtcatgatcacagatgaagaggaaattaaagccactaaccctgtggccaccgaaagatttgggaccgtggcagtcaatttccagagcagcagcacagaccccgcgaccggagatgtgcatgttatgggagccttacctggcatggtgtggcaagacagagacgtatacctgcagggtcccatttgggccaaaattcctcacacggatggacactttcacccgtctcctctcatgggcggctttggacttaagcacccgcctcctcaaatcctcatcaaaaacacgcctgttcctgcgaatcctccggcagagttttcggctacaaagtttgcttcattcatcacccagtactccacaggacaagtgagtgtggaaattgaatgggagctgcagaaagaaaacagcaagcgctggaatcccgaagtgcagtacacatccaattatgcaaaatctgccaacgttgatttcactgtggacaacaatggactttatactgagcctcgccccattggcacccgttaccttacccgtcccttg

SEQ ID NO: 674 - DNA, 2196 bp, Artificial Sequence
  Description of Artificial Sequence: Synthetic polynucleotide
atggctgccgatggttatcttccagattggctcgaggacaacctctctgagggcattcgcgagtggtgggacttgaaacctggagccccgaaacctaaagccaaccagcaaaagcaggacgacggccggggtctggtgcttcctggctacaagtacctcggacccttcaacggactcgacaagggggagcccgtcaacgcggcggacgcagcggccctcgagcacgacaaggcctacgaccagcagctcaaagcgggtgacaatccgtacctgcggtataaccacgccgacgccgagtttcaggagcgtctgcaagaagatacgtcttttgggggcaacctcgggcgagcagtcttccaggccaagaagcgggttctcgaaccttttggtctggttgaggaaggcgctaagacggctcctggaaagaaacgtccggtagagcagtcgccacaagagccagactcctcctcgggcatcggcaagacaggccagcagcccgctaaaaagagactcaattttggtcagactggcgactcagagtcagtccccgacccacaacctctcggagaacctccagcaacccccgctgctgtgggacctactacaatggcttcaggcggtggcgcaccaatggcagacaataacgaaggcgccgacggagtgggtaatgcctcaggaaattggcattgcgattccacatggctgggcgacagagtcatcaccaccagcacccgcacctgggccttgcccacctacaataaccacctctacaagcaaatctccagtgcttcaacgggggccagcaacgacaaccactacttcggctacagcaccccctgggggtattttgatttcaacagattccactgccacttttcaccacgtgactggcagcgactcatcaacaacaattggggattccggcccaagagactcaacttcaagctcttcaacatccaagtcaaggaggtcacgacgaacgatggcgtcacgaccatcgctaataaccttaccagcacggttcaagccttctcggattcagagtaccaactgccgtacgtcctcggctctgcgcaccagggctgcctccctccgttcccggcggacgtgttcatgattccgcagtacggctacctaacgctcaacaatggcagccaggccgtgggacgttcatccttttactgcctggaatatttcccttctcagatgctgagaacgggcaacaactttaccttcagctacacctttgaggaagtgcctttccacagcagctacgcgcacagccagagcctggaccggctgatgaatcctctcatcgacccatacctgtattacctgaacagaactcaaaatcagtccggaagtgcccaaaacaaggacttgctgtttagccgtgggtctccagctggcatgtctgttcagcccaaaaactggctacctggaccctgttatcggcagcagcgcgtttctaaaacaaaaacagacaacaacaacagcaattttacctggactggtgcttcaaaatataacctcaatgggcgtgaatccatcatcaaccctggcactgctatggcctcacacaaagacgacgaagacaagttctttcccatgagcggtgtcatgatttttggaaaagagagcgccggagcttcaaatactgcattggacaatgtcatgatcacagatgaagaggaaattaaagccactaaccctgtggccaccgaaagatttgggaccgtggcagtcaatttccagagcagcagcacagaccccgcgaccggagatgtgcatgttatgggagccttacctggcatggtgtggcaagacagagacgtatacctgcagggtcccatttgggccaaaattcctcacacggatggacactttcacccgtctcctctcatgggcggctttggacttaagcacccgcctcctcaaatcctcatcaaaaacacgcctgttcctgcgaatcctccggcagagttttcggctacaaagtttgcttcattcatcacccagtactccacaggacaagtgagtgtggaaattgaatgggagctgcagaaagaaaacagcaagcgctggaatcccgaagtgcagtacacatccaattatgcaaaatctgccaacgttgatttcactgtggacaacaatggactttatactgagcctcgccccattggcacccgttacctt

SEQ ID NO: 675 - DNA, 2208 bp, Artificial Sequence
  Description of Artificial Sequence: Synthetic polynucleotide
atggctgccgatggttatcttccagattggctcgaggacaacctctctgagggcattcgcgagtggtgggacttgaaacctggagccccgaaacctaaagccaaccagcaaaagcaggacgacggccggggtctggtgcttcctggctacaagtacctcggacccttcaacggactcgacaagggggagcccgtcaacgcggcggacgcagcggccctcgagcacgacaaggcctacgaccagcagctcaaagcgggtgacaatccgtacctgcggtataaccacgccgacgccgagtttcaggagcgtctgcaagaagatacgtcttttgggggcaacctcgggcgagcagtcttccaggccaagaagcgggttctcgaaccttttggtctggttgaggaaggcgctaagacggctcctggaaagaaacgtccggtagagcagtcgccacaagagccagactcctcctcgggcatcggcaagacaggccagcagcccgctaaaaagagactcaattttggtcagactggcgactcagagtcagtccccgacccacaacctctcggagaacctccagcaacccccgctgctgtgggacctactacaatggcttcaggcggtggcgcaccaatggcagacaataacgaaggcgccgacggagtgggtaatgcctcaggaaattggcattgcgattccacatggctgggcgacagagtcatcaccaccagcacccgcacctgggccttgcccacctacaataaccacctctacaagcaaatctccagtgcttcaacgggggccagcaacgacaaccactacttcggctacagcaccccctgggggtattttgatttcaacagattccactgccacttttcaccacgtgactggcagcgactcatcaacaacaattggggattccggcccaagagactcaacttcaagctcttcaacatccaagtcaaggaggtcacgacgaacgatggcgtcacgaccatcgctaataaccttaccagcacggttcaagtcttctcggattcagagtaccaactgccgtacgtcctcggctctgcgcaccagggctgcctccctccgttcccggcggacgtgttcatgattccgcagtacggctacctaacgctcaacaatggcagccaggccgtgggacgttcatccttttactgcctggaatatttcccttctcagatgctgagaacgggcaacaactttaccttcagctacacctttgaggaagtgcctttccacagcagctacgcgcacagccagagcctggaccggctgatgaatcctctcatcgaccaatacctgtattacctgaacagaactcaaaatcagtccggaagtgcccaaaacaaggacttgctgtttagccgtgggtctccagctggcatgtctgttcagcccaaaaactggctacctggaccctgttatcggcagcagcgcgtttctaaaacaaaaacagacaacaacaacagcaattttacctggactggtgcttcaaaatataacctcaatgggcgtgaatccatcatcaaccctggcactgctatggcctcacacaaagacgacgaagacaagttctttcccatgagcggtgtcatgatttttggaaaagagagcgccggagcttcaaatactgcattggacaatgtcatgatcacagatgaagaggaaattaaagccactaaccctgtggccaccgaaagatttgggaccgtggcagtcaatttccagagcagcagcacagaccccgcgaccggagatgtgcatgttatgggagccttacctggcatggtgtggcaagacagagacgtatacctgcagggtcccatttgggccaaaattcctcacacggatggacactctcacccgtctcctctcatgggcggctttggacttaagcacccgcctcctcaaatcctcatcaaaaacacgcctgttcctgcgaatcctccggcagagttttcggctacaaagtttgcttcattcatcacccagtactccacaggacaagtgagtgtggaaattgaatgggagctgcagaaagaaaacagcaagcgctggaatcccgaagtgcagtacacatccaattatgcaaaatctgccaacgttgatttcactgtggacaacaatggactttatactgagcctcgccccattggcacccgttaccttacccgtcccttg

SEQ ID NO: 676 - DNA, 2208 bp, Artificial Sequence
  Description of Artificial Sequence: Synthetic polynucleotide
atggctgccgatggttatcttccagattggctcgaggacaacctctctgagggcattcgcgagtggtgggacttgaaacctggagccccgaaacctaaagccaaccagcaaaagcaggacgacggccggggtctggtgcttcctggctacaagtacctcggacccttcaacggactcgacaagggggagcccgtcaacgcggcggacgcagcggccctcgagcacgacaaggcctacgaccagcagctcaaagcgggtgacaatccgtacctgcggtataaccacgccgacgccgagtttcaggagcgtctgcaagaagatacgtcttttgggggcaacctcgggcgagcagtcttccaggccaagaagcgggttctcgaaccttttggtctggttgaggaaggcgctaagacggctcctggaaagaaacgtccggtagagcagtcgccacaagagccagactcctcctcgggcatcggcaagacaggccagcagcccgctaaaaagagactcaattttggtcagactggcgactcagagtcagtccccgacccacaacctctcggagaacctccagcaacccccgctgctgtgggacctactacaatggcttcaggcggtggcgcaccaatggcagacaataacgaaggcgccgacggagtgggtaatgcctcaggaaattggcattgcgattccacatggctgggcgacagagtcatcaccaccagcacccgcacctgggccttgcccacctacaataaccacctctacaagcaaatctccagtgcttcaacgggggccagcaacgacaaccactacttcggctacagcaccccctgggggtattttgatttcaacagattccactgccacttttcaccacgtgactggcagcgactcatcaacaacaattggggattccggcccaagagactcaacttcaagctcttcaacatccaagtcaaggaggtcacgacgaacgatggcgtcacgaccatcgctaataaccttaccagcacggttcaagtcttctcggattcagagtaccaactgccgtacgtcctcggctctgcgcaccagggctgcctccctccgttcccggcggacgtgttcatgattccgcagtacggctacctaacgctcaacaatggcagccaggccgtgggacgttcatccttttactgcctggaatatttcccttctcagatgctgagaacgggcaacaactttaccttcagctacacctttgaggaagtgcctttccacagcagctacgcgcacagccagagcctggaccggctgatgaatcctctcatcgacctatacctgtattacctgaacagaactcaaaatcagtccggaagtgcccaaaacaaggacttgctgtttagccgtgggtctccagctggcatgtctgttcagcccaaaaactggctacctggaccctgttatcggcagcagcgcgtttctaaaacaaaaacagacaacaacaacagcaattttacctggactggtgcttcaaaatataacctcaatgggcgtgaatccatcatcaaccctggcactgctatggcctcacacaaagacgacgaagacaagttctttcccatgagcggtgtcatgatttttggaaaagagagcgccggaacttcaaatactgcattggacaatgtcatgatcacagatgaagaggaaattaaagccactaaccctgtggccaccgaaagatttgggaccgtggcagtcaatttccagagcagcagcacagaccccgcgaccggagatgtgcatgttatgggagccttacctggcatggtgtggcaagacagagacgtatacctgcagggtcccatttgggccaaaattcctcacacggatggacactttcacccgtctcctctcatgggcggctttggacttaagcacccgcctcctcaaatcctcatcaaaaacacgcctgttcctgcgaatcctccggcagagttttcggctacaaagtttgcttcattcatcacccagtactccacaggacaagtgagtgtggaaattgaatgggagctgcagaaagaaaacagcaagcgctggaatcccgaagtgcagtacacatccaattatgcaaaatctgccaacgttgatttcactgtggacaacaatggactttatactgagcctcgccccattggcacccgttaccttacccgtcccttg

SEQ ID NO: 677 - DNA, 2208 bp, Artificial Sequence
  Description of Artificial Sequence: Synthetic polynucleotide
atggctgccgatggttatcttccagattggctcgaggacagcctctctgagggcattcgcgagtggtgggacttgaaacctggagccccgaaacctaaagccaaccagcaaaagcaggacgacggccggggtctggtgcttcctggctacaagtacctcggacccttcaacggactcgacaagggggagcccgtcaacgcggcggacgcagcggccctcgagcacgacaaggcctacgaccagcagctcaaagcgggtgacaatccgtacctgcggtataaccacgccgacgccgagtttcaggagcgtctgcaagaagatacgtcttttgggggcaacctcgggcgagcagtcttccaggccaagaagcgggttctcgaaccttttggtctggttgaggaaggcgctaagacggctcctggaaagaaacgtccggtagagcagtcgccacaagagccagactcctcctcgggcatcggcaagacaggccagcagcccgctaaaaagagactcaattttggtcagactggcgactcagagtcagtccccgacccacaacctctcggagaacctccagcaacccccgctgctgtgggacctactacgatggcttcaggcggtggcgcaccaatggcagacaataacgaaggcgccgacggagtgggtaatgcctcaggaaattggcattgcgattccacatggctgggcgacagagtcatcaccaccagcacccgcacctgggccttgcccacctacaataaccacctctacaagcaaatctccagtgcttcaacgggggccagcaacgacaaccactacttcggctacagcaccccctgggggtattttgatttcaacagattccactgccacttttcaccacgtgactggcagcgactcatcaacaacaattggggattccggcccaagagactcaacttcaagctcttcaacatccaagtcaaggaggtcacgacgaacgatggcgtcacgaccatcgctaataaccttaccagcacggttcaagtcttctcggattcagagtaccaactgccgtacgtcctcggctctgcgcaccagggctgcctccctccgttcccggcggacgtgttcatgattccgcagtacggctacctaacgcccaacaatggcagccaggccgtgggacgttcatccttttactgcctggaatatttcccttctcagatgctgagaacgggcaacaactttaccttcagctacacctttgaggaagtgcctttccacagcagctacgcgcacagccagagcctggaccggctgatgaatcctctcatcgaccaataccagtattacctgaacagaactcaaaatcagtccggaagtgcccaaaacaaggacttgctgtttagccgtgggtctccagctggcatgtctgttcagcccaaaaactggctacctggaccctgttatcggcagcagcgcgtttctaaaacaaaaacagacaacaacaacagcaattttacctggactggtgcttcaaaatataacctcaatgggcgtgaatccatcatcaaccctggcactgctatggcctcacacaaagacgacgaagacaagttctttcccatgagcggtgtcatgatttttggaaaagagagcgccggagcttcaaatactgcattggacaatgtcatgatcacagatgaagaggaaattaaagccactaaccctgtggccaccgaaagatttgggaccgtggcagtcaatttccagagcagcagcacagaccccgcgaccggagatgtgcatgttatgggagccttacctggcatggtgtggcaagacagagacgtatacctgcagggtcccatttgggccaaaattcctcacacggatggacactttcacccgtctcctctcatgggcggctttggacttaagcacccgcctcctcaaatcctcatcaaaaacacgcctgttcctgcgaatcctccggcagagttttcggctacaaagtttgcttcattcatcacccagtactccacaggacaagtgagtgtggaaattgaatgggagctgcagaaagaaaacagcaagcgctggaatcccgaagtgcagtacacatccaattatgcaaaatctgccaacgttgatttcactgtggacaacaatggactttatactgagcctcgccccattggcacccgttaccttacccgtcccttg

SEQ ID NO: 678 - DNA, 2208 bp, Artificial Sequence; identical to SEQ ID NO: 669
  Description of Artificial Sequence: Synthetic polynucleotide

SEQ ID NO: 679 - DNA, 2205 bp, Artificial Sequence
  Description of Artificial Sequence: Synthetic polynucleotide
atggctgccgatggttatcttccagattggctcgaggacactctctctgaaggaataagacagtggtggaagctcaaacctggcccaccaccaccaaagcccgcagagcggcataaggacgacagcaggggtcttgtgcttcctgggtacaagtacctcggacccttcaacggactcgacaagggagagccggtcaacgaggcagacgccgcggccctcgagcacgacaaagcctacgaccggcagctcgacagcggagacaacccgtacctcaagtacaaccacgccgacgcggagtttcaggagcgccttaaagaagatacgtcttttgggggcaacctcggacgagcagtcttccaggcgaaaaagagggttcttgaacctctgggcctggttgaggaacctgttaagacggctccgggaaaaaagaggccggtagagcactctcctgtggagccagactcctcctcgggaaccggaaaggcgggccagcagcctgcaagaaaaagattgaattttggtcagactggagacgcagactcagtacctgacccccagcctctcggacagccaccagcagccccctctggtctgggaactaatacgatggctacaggcagtggcgcaccaatggcagacaataacgagggcgccgacggagtgggtaattcctcgggaaattggcattgcgattccacatggatgggcgacagagtcatcaccaccagcacccgaacctgggccctgcccacctacaacaaccacctctacaaacaaatttccagccaatcaggagcctcgaacgacaatcactactttggctacagcaccccttgggggtattttgacttcaacagattccactgccacttttcaccacgtgactggcaaagactcatcaacaacaactggggattccgacccaagagactcaacttcaagctctttaacattcaagtcaaagaggtcacgcagaatgacggtacgacgacgattgccaataaccttaccagcacggttcaggtgtttactgactcggagtaccagctcccgtacgtcctcggctcggcgcatcaaggatgcctcccgccgttcccagcagacgtcttcatggtgccacagtatggatacctcaccctgaacaacgggagtcaggcagtaggacgctcttcattttactgcctggagtactttccttctcagatgctgcgtaccggaaacaactttaccttcagctacacttttgaggacgttcctttccacagcagctacgctcacagccagagtctggaccgtctcatgaatcctctcatcgaccagtacctgtattacttgagcagaacaaacactccaagtggaaccaccacgcagtcaaggcttcagttttctcgggccggagcgagtgacattcgggaccagtctaggaactggcttcctggaccctgttaccgccagcagcgagtatcaaagacatctgcggataacaacaacagtgaatactcgtggactggagctaccaagtaccacctcaatggcagagactctctggtgaatccgggcccggccatggcaagccacaaggacgatgaagaaaagttttttcctcagagcggggttctcatctttgggaagcaaggctcagagaaaacaaatgtggacattgaaaaggtcatgattacagacgaagaggaaatcaggacaaccaatcccgtggctacggagcagtatggttctgtatctaccaacctccagagaggcaacagacaagcagctaccgcagatgtcaacacacaaggcgttcttccaggcatggtctggcaggacagagatgtgtaccttcaggggcccatctgggcaaagattccacacacggacggacattttcacccctctcccctcatgggtggattcggacttaaacaccctcctccacagattctcatcaagaacaccccggtacctgcgaatccttcgaccaccttcagtgcggcaaagtttgcttccttcatcacacagtactccacgggacaggtcagcgtggagatcgagtgggagctgcagaaggaaaacagcaaacgctggaatcccgaaattcagtacacttccaactacaacaagtctgttaatgtggactttactgtggacactaatggcgtgtattcagagcctcgccccattggcaccagatacctgactcgtaatctg

SEQ ID NO: 680 - protein, 736 aa, Artificial Sequence
  Description of Artificial Sequence: Synthetic polypeptide
MAADGYLPDWLEDNLSEGIREWWALKPGAPQPKANQQHQDNARGLVLPDYKYLGPGNGLDKGEPVNAADVAALEHDKAYDQQLKAGDNPYLKYNHADAEFQERLKEDTSFGGNLGRAVFQAKKRLLEPLGLVEEAAKTAPGKKRPVEQSPQEPDSSAGIGKSGAQPAKKRLNFGQTGDTESVPDPQPIGEPPAAPSGVGSLTMASGGGAPVADNNEGADGVGSSSGNWHCDSQWLGDGVITTSTRTWALPTYNNHLYKQISNSTSGGSSNDNAYFGYSTPWGYFDFNRFHCHFSPRDWQRLINNNWGFRPKRLNFKLFNIQVKEVTDNNGVKTIANNLTSTVQVFTDSDYQLPYVLGSAHEGCLPPFPADVFMIPQYGYLTLNDGSQAVGRSSFYCLEYFPSQMLRTGNNFQFSYEFENVPFHSSYAHSQSLDRLMNPLIDQYLHYLPKTINGSGQNQQTLKFSVAGPSNMAVQGRNYIPGPSYRQQRVSTTVTQNNNSEFAWPGASSWALNGRNSLMNPGPAMASYKEGEDSFFPLSGSLIFGKQGTGRDNVDADKVMITNEEEIKTTNPVATESYGQVATNHQSAQAQAQTGWVQNQGILPGMVWQDRDVYLQGPIWAKIPHTDGNFHPSPLMGGFGMKHPPPQTLIKNTPVPADPPTAFNKDKLNSFITQYSTGQVSVEIEWELQKENSKRWNPEIQYTSNYYKSNNVEFAVNTEGVYSEPRPIGTRYLTRNL

SEQ ID NO: 681 - protein, 736 aa, Artificial Sequence
  Description of Artificial Sequence: Synthetic polypeptide
MAADGYLPDWLEDNLSEGIREWWALKPGAPQPKANQQHQDNARGLVLPGYKYLGPGNGLDKGEPVNAADAAALEHDKAYDQQLKAGDNPYLKYNHADAEFQERLKEDTSFGGNLGRAVFQAKRRLLEPLGLVEEAAKTAPGKKRPVEQSPQEPDSSAGIGKSGAQPAKKRLNFGQTGDTESVPDPQPIGEPPAAPSGVGSLTMASGGGAPVADNNEGADGVGSSSGNWHCDSQWLGDRVITTSTRTWALPTYNNHLYKQISNSTSGGSSNDNAYFGYSTPWGYFDFNRFHCHFSPRDWQRLINNNWGFRPKRLNFKLFNIQIKEVTDNNGVKTIANNLTSTVQVFTDLDYQLPYVLGSAHEGCLPPFPADVFMIPQYGYLTLNDGSQAVGRSSFYCLEYFPSQMLRTGNNFQFSYEFENVPFHSSYAHSQSLDRLMNPLIDQYLHYLSKTINGSGQNQQTLKFSVAGPSNMAVQGRNYIPGPSYRQQRVSTTVTQNNNSEFAWPGASSWALNGRNSLMNPGPAMASYKEGEDSFFPLSGSLIFGKQGTGRDNVDADKVMITNEEEIKTTNPVATESYGQVATNHQSAQAQAQTGWVQNQGILPGMVWQDRDVYLQGPIWAKIPHTDGNFHPSPLMGGFGMKHPPPQTLIKNTPVPADPPTAFNKDKLNSFITQYSTGQVSVEIEWELQKENSKRWNPEIQYTSNYYKSNNVEFAVNTEGVYSEPRPIGTRYLTRNL

SEQ ID NO: 682 - protein, 736 aa, Artificial Sequence
  Description of Artificial Sequence: Synthetic polypeptide
MAADGYLPDWLEDNLSEGIREWWALKPGAPQPKANQQHQDNARGLVLPGYKYLGPGNGLDKGEPVSAADAAALEHDKAYDQQLKAGDNPYLKYNHADAEFQERLKEDTSFGGNLGRAVFQAKKRLLEPLGLVEEAAKTAPGKKRPVEQSPQEPDSSAGIGKSGAQPAKKRLNFGQTGDTESVSDPQPIGEPPAAPSGVGSLTMASGGGAPVADNNEGADGVGSSSGNWHCDSQWLGDRVITTSTRTWALPTYNNHLYKQISNSTSGGSSNDNAYFGYSTPWGYFDFNRFHCHFSPRDWQRLINNNWGFRPKRLNFKLFNIQVKEVTDNNGVKTIANNLTSTVQVFTDSDYQLPYVLGSAHEGCLPPSPADVFMIPQYGYLTLNDGSQAVGRSSFYCLEYFPSQMLRTGNNFQFSYEFENVPFHSSYAHSQSLDRLMNPLIDQYLHYLSKTINGSGQNQQTLKFSVAGPSNMAVQGRNYIPGPSYRQQRVSTTVTQNNNSEFAWPGASSWALNGRNSLMNPGPAMASYKEGEDSFFPLSGSLIFGKQGTGRDDVDADKVIITNEEEIKTTNPVATESYGQVATNHQSAQAQAQTGWVQNQGILPGMVWQDRDVYLQGPIWAKIPHTDGNFHPSPLMGGFGMKHPPPQTLIKNTPVPADPPTAFNKDKLNSFITQYSTGQVSVEIEWELQKENSKRWNPEIQYTSNYYKSNNVEFAVNTEGVYSEPRPIGTRYLTRNL

SEQ ID NO: 683 - protein, 736 aa, Artificial Sequence
  Description of Artificial Sequence: Synthetic polypeptide
MAADGYLPDWLEDNLSEGIREWWALKPGAPQPKANQQHQDNARGLVLPGYKYLGPGNGLDKGEPVNAADAAALEHDKAYDQQLKAGDNPYLKYNHAGAEFQERLKEDTSFGGNLGRAVFQAKKRLLEPLGLVEEAAKTAPGKKRPVEQSPQEPDSSAGIGKSGAQPAKKRLNFGQTGDTESVPDPQPIGEPPAAPSGVGSLTMASGGGAPVADNNEGAGGVGSSSGNWHCDSQWLGDRVVTTSTRTWALPTYNNHLYKQISNSTSGGSSNDNAYFGYSTPWGYFDFNRFHCHFSPRDWQRLINNNWGFRPKRLNFKLFNIQVKEVTDNNGVKTIANNLTSTVQVFTDSDYQLPYVLGSAHGGCLPPFPADVFMIPQYGYLTLNDGSQAVGRSSFYCLEYFPSQMLRTGNNFQFSYEFENVPFHSSYAHSQSLDRLMNPLIDQYLHYLSKTINGSGQNQQTLKFSVAGPSNMAVQGRSYIPGPSYRQQRVSTTVTQNNNSEFAWPGASSWALNGRNSLMNPGPAMASYKEGEDSFFPLSGSLIFGKQGTGRDNVDADKVMITNEEEIKTTNPVATESYGQVATNHQSAQAQAQTGWVQNQGILPGMVWQDRDVYLQGPIWAKIPHTDGNFHPSPLMGGFGMKHPPPQTLIKNTPVPADPPTAFNKDKLNSFITQYSTGQVSVEIEWELQKENSKRWNPEIQYTSNYYKSNNVEFAVNTEGVYSEPRPIGTRYLTRNL

SEQ ID NO: 684 - protein, 736 aa, Artificial Sequence
  Description of Artificial Sequence: Synthetic polypeptide
MAADGYLPDWLEDNLSEGIREWWALKPGAPQPKANQQHQDNARGLVLPGYKYLGPGNGLDKGEPVNAADAAALEHDKAYDQQLKAGDNPYLKYNHADAEFQERLKEDTSFGGNLGRAVFQAKKRLLEPLGLVEEAAKTAPGKKRPVEQSPQEPDSSAGIGKSGAQPAKKRLNFGQTGDTESVPDPQPIGEPPAAPSGVGSLTMASGGGAPVADNNEGADGVGSSSGNWHCDSQWLGDRVVTTSTRTWALPTYNNHLYKQISNSTSGGSSNDNAYFGYSTPWGYFDFNRFHCHFSPRDWQRLINNNWGFRPKRLNFKLFNIQVKEVTDNNGVKTIANNLTSTVQVFTDSDYQLPYVLGSAHEGCLPPFPADVFMIPQYGYLTLNDGSQAVGRSSFYCLEYFPSQMLRTGNNFQFSYEFENVPFHSSHAHSQSLDRLMNPLIDQYLHYLSKTINGSGQNQQTLKFSVAGHSNMAVQGRNYIPGPSYRQQRVSTTVTQNNNSEFAWPGASSWALNGRNSLMNPGPAMASYKEGEDSFFPLSGSLIFGKQGTGRDNVDADKVMITNEEEIKTTNPVATESYGQVATNHQSAQAQAQTGWVQNQGILPGMVWQDRDVYLQGPIWAKIPHTDGNFHPSPLMGGFGMKHPPPQTLIKNTPVPADPPTAFNKDKLNSFITQYSTGQVSVEIGWELQKENSKRWNPEIQYTSNYYKSNNVEFAVNTEGVYSEPRPIGTRYLTRNL

SEQ ID NO: 685 - protein, 736 aa, Artificial Sequence
  Description of Artificial Sequence: Synthetic polypeptide
MAADGYLPDWLEDNLSEGIREWWALKPGAPQPKANQQHQDNARGLVLPGYKYLGPGNGLDKGEPVNAADAAALEHDKAYDQQLKAGDNPYLKYNHADAEFQERLKEDTSFGGNLGRAVFQAKKRLLEPLGLVEEAAKTAPGKKRPVEQSPQEPDSSAGIGKSGAQPAKKRLNFGQTGDTESVPDPQPIGEPPAAPSGVGSLTMASGGGAPVADNNEGADGVGSSSGNWHCDSQWLGDRVITTSTRTWALPTYNNRLYKQISNSTSGGSSNDNAYFGYSTPWGYFDFNRFHCHFSPRDWQRLINNNWGFRPKRLNFKPFNIQVKEVTDNNGVKTIANNLTSTVQVFTDSDYQLPYVLGSAHEGCLPPFPADVFMIPQYGYLTLNDGSQAVGRSSFYCLEYFPSQMLRTGNNFQFSYEFENVPFHSSYAHSQSLDRLMNPLIDQYLHYLSKTINGSGQNQQTLKFSVAGPSNMAVQGRNYIPGPSYRQQRVSTTVTQNNNSEFAWPGASSWALNGRNSLMNPGPAMASYKEGEDSFFPLSGSLIFGKQGTGRDNVDADKVMITNEEEIKTTNPVATESYGQVATNHQSAQAQAQTGWVQNQGILPGMVWQDRDVYLQGPIWAKIPHTDGNFHPSPLMGGFGMKHPPPQTLIKNTPVPADPPTAFNKDKLNSFITQYSTGQVSVEIEWELQKENSKRWNPEIQYTSNYYKSNNVEFAVNTEGVYSEPRPIGTRYLTRNL

SEQ ID NO: 686 - protein, 736 aa, Artificial Sequence
  Description of Artificial Sequence: Synthetic polypeptide
MAADGYLPDWLEDNLSEGIREWWALKPGAPQPKANQQHQDNARGLVLPGYKYLGPGNGLDKGEPVNAADAAALEHDKAYDQQLKAGDNPYLKYNHADAEFQERLKEDTSFGGNLGRAVFQAKKRLLEPLGLVEEAAKTAPGKKRPVEQSPQEPDSSAGIGKSGAQPAKKRLNFGQTGDTESVPDPQPIGEPPAAPSGVGSLTMASGGGAPVADNNEGADGVGSSSGNWHCDSQWLGDRVITTSTRTWALPTYNNHLYKQISNSTSGGSSNDNAYFGYSTPWGYFDFNRFHCHFSPRDWQRLINNNWGFRPKRLNFKLFNIQVKEVTDNNGVKTIANNLTSTVQVFTDSDYQLPYVLGSAHEGCLPPFPADVFMIPQYGYLTLNDGSQAVGRSSFYCLEYFPSQMLRTGNNFQFSYEFENVPFHSSYAHSQSLDRLMNPLIDQYLHYLSKTINGSGQNQQTLKFSVAGPSNMAVQGRNYIPGPSYRQQRVSTTVTQNNNSEFAWPGASSWALNGRNSLMNPGPAMASYKEGEDSFFPLSGSLIFGKQGTGRDNVDADKVMITNEEEIKTTNPVATESYGQVATNHQSAQAQAQTGWVQNQGILPGMVWQDRDVYLQGPIWAKIPHTDGNFHPSPLMGGFGMKHPPPQTLIKNTPVPADPPTAFNKDKLNSFITQYSTGQVSVEIEWELQKENSKRWNPEIQYTSNYYKSNNVEFAVNTEGVYSEPRPIGTRYLTRNL

SEQ ID NO: 687 - protein, 736 aa, Artificial Sequence; identical to SEQ ID NO: 686
  Description of Artificial Sequence: Synthetic polypeptide

SEQ ID NO: 688 - protein, 736 aa, Artificial Sequence
  Description of Artificial Sequence: Synthetic polypeptide
MAADGYLPDWLEDNLSEGIREWWDLKPGAPKPKANQQKQDDGRGLVLPGYKYLGPFNGLDKGEPVNAADAAALEHDKAYDQQLKAGDNPYLRYNHADAEFQERLQEDTSFGGNLGRAVFQAKKRVLEPFGLVEEGAKTAPGKKRPVEQSPQEPDSSSGIGKSGQQPAKKRLNFGQTGDSESVPDPQPLGEPPATPAALGPTTMASGGGAPMADNNEGADGVGNASGNWHCDSTWLGDRVITTSTRTWALPTYNNHLYKQISSASTGASNDNHYFGYSTPWGYFDFNRFHCHFSPRDWQRLINNNWGFRPKRLNFKLFNIQVKEVTTNDGVTTIANNLTSTVQVFSDSEYQLPYVLGSAHQGCLPPFPADVFMIPQYGYLTLNNGSKAVGRSSFYCLEYFPSQMLRTGNNFTFSYTFEEVPFHSSYAHSQSLDRLMNPLIDQYLYYLNRTQNQSGSAQNKDLLFSRGSPAGMSVQPKNWLPGPCYRQQRVSKTKTDNNNSNFTWTGASKYNLNGRESIINPGTAMASHKDDEDKFFPMSGVMIFGKESAGASNTALDNVMITDEEEIKATNPVATERFGTVAVNFQSSSTDPATGDVHVMGALPGMVWQDRDVYLQGPIWAKIPHTDGHFHPSPLMGGFGLKHPPPQILIKNTPVPANPPAEFSATKFASFITQYSTGQVSVEIEWELQKENSKRWNPEVQYTSNYAKSANVDFTVDNNGLYTEPRPIGTRYLTRPL

SEQ ID NO: 689 - protein, 736 aa, Artificial Sequence
  Description of Artificial Sequence: Synthetic polypeptide
MAADGYLPDWLEDNLSEGIREWWDLKPGAPKPKANQQKQDDGRGLVLPGYKYLGPFNGLDKGEPVNAADAAALEHDKAYDQQLKAGDNPYLRYNHADAEFQERLQEDTSFGGNLGRAVFQAKKRVLEPLGLVEEGAKTAPGKKRPVEQSPQEPDSSSGIGKTGQQPAKKRLNFGQTGDSESVPDPQPLGEPPATPAAVGPTTMASGGGAPMADNNEGADGVGNASGNWHCDSTWLGDRVITTSTRTWALPTYNNHLYKQISSTSTGASNDNHYFGYSTPWGYFDFNRFHCHFSPRDWQRLINNNWGFRPKRLNFKLFNIQVKEVTTNDGVTTIANNLTSTVQVFSDSEYQLPYVLGSAHQGCLPPFPADVFMIPQYGYLTLNNGSQAVGRSSFYCLEYFPSQMLRTGNNFTFSYTFEEVPFHSSYAHSQSLDRLMNPLIDQYLYYLNRTQNQSGSAQNKDLLFSRGSPAGMSVQPKNWLPGPCYRQQRVSKTKTDNNNSNFTWTGASKYNLNGRESIINPGTAVASHKDDEDKFFPMSGVMIFGKESAGASNTALDNVMITDEEEIKATNPVATERFGTVAVNFQSSSTDPATGDVHAMGALPGMVWQDRDVYLQGPIWAKIPHTDGHFHPSPLMGGFGLKNPPPQILIKNTPVPANPPAEFSATKFASFITQYSTGQVSVEIEWELQKENSKRWNPEVQYTSNYAKSANVDFTVDNNGLYTEPRPIGTRYLTRPL

SEQ ID NO: 690 - protein, 736 aa, Artificial Sequence
  Description of Artificial Sequence: Synthetic polypeptide
MAADGYLPDWLEDNLSEGIREWWALKPGAPQPKANQQHQDNARGLVLPGYKYLGPGNGLDKGEPVNAADAAALEHDKAYDQQLKAGDNPYLKYNHADAEFQERLKEDTSFGGNLGRAVFQAKKRLLEPLGLVEEAAKTAPGKKRPVEQSPQEPDSSAGIGKSGAQPAKKRLNFGQTGDTESVPDPQPIGEPPAAPSGVGSLTMASGGGAPVADNNEGADGVGSSSGNWHCDSQWLGDRVITTSTRTWALPTYNNHLYKQISNSTSGGSSNDNAYFGYSTPWGYFDFNRFHCHFSPRDWQRLINNNWGFRPKRLNFKLFNIQVKEVTDNNGVKTIANNLTSTVQVFTDSDYQLPYVLGSAHEGCLPPFPADVFMIPQYGYLTLNDGSQAVGRSSFYCLEYFPSQMLRTGNNFQFGYEFENVPFHSSYAHSQSLDRLMNPLIDQYLYYLSKTINGSGQNQQTLKFSVAGPSNMAVQGRNYIPGPSYRQQRVSTTVTQNNNSEFAWPGASSWALNGRNSLMNPGPAMASHKEGEDRFFPLSGSLIFGKQGTGRDNVDADKVMITNEEEIKTTNPVATESYGQVATNHQSAQAQAQTGWVQNQGILPGMVWQDRDVYLQGPIWAKIPHTDGNFHPSPLMGGFGMKHPPPQILIKNTPVPADPPTAFNKDKLNSFITQYSTGQVSVEIEWELQKENSKRWDPEIQYTSNYYKSNNVEFAVNTEGVYSEPRPIGTRYLTRNL

SEQ ID NO: 691 - protein, 736 aa, Artificial Sequence
  Description of Artificial Sequence: Synthetic polypeptide
MAADGYLPDWLEDNLSEGIREWWALKPGAPQPKANQQHQDNARGLVLPGYKYLGPGNGLDKGEPVNAADAAALEHDKAYDQQLKAGDNPYLKYNHADAEFQERLKEDTSFGGNLGRAVFQAKKRLLEPLGLVEEAAKTAPGKKRPVEQSPQEPDSSAGIGKSGAQPAKKRLNFGQTGDTESVPDPQPIGEPPAAPSGVGSLTMASGGGAPVADNNEGADGVGSSSGNWHCDSQWLGDRVITTSTRTWALPTYNNHLYKQISNSTSGGSSNDNAYFGYSTPWGYFDFNRFHCRFSPRDWQRLINNNWGFRPKRLNFKLFNIQVKEVTDNNGVKTIANNLTSTVQVFTDSDYQLPYVLGSAHEGCLPPFPADVFMIPQYGYLTLNDGSQAVGRSSFYCLEYFPSQMLRTGNNFQFSYEFENVPFHSSYAHSQSLDRLMNPLIDQYLYYLSKTINGSGQNQQTLKFSVAGPSNMAVQGRNYIPGPSYRQQRVSTTVTQNNNSEFAWPGASSWALNGRNSLMNPGPAMASHKEGEDRFFPLSGSLIFGKQGTGRDNVDADKVMITNEEEIKTTNPVATESYGQVATNHQSAQAQAQTGWVQNQGILPGMVWQDRDVYLQGPIWAKIPHTDGNFHPSPLMGGFGMKHPPPQILIKNAPVPADPPTAFNKDKLNSFITQYSTGQVSVEIEWELQKENSKRWNPEIQYTSNYYKSNNVEFAVNTEGVYSEPRPIGTRYLTRNL

SEQ ID NO: 692 - protein, 736 aa, Artificial Sequence
  Description of Artificial Sequence: Synthetic polypeptide
MAADGYLPDWLEDNLSEGIREWWALKPGAPQPKANQQHQDNARGLVLPGYKYLGPGNGLDKGEPVSAADAAALEHDKAYDQQLKAGDNPYLKYNHADAEFQERLKEDTSFGGNLGRAVFQAKKRLLEPLGLVEEAAKTAPGKKRPVEQSPQEPDSSAGIGKSGAQPAKKRLNFGQTGDTESVPDPQPIGEPPAAPSGVGSLTMASGGGAPVADNNEGADGVGSSSGNWHCDSQWLGDRVITTSTRTWALPTYNNHLYKQISNSTSGGSSNDNAYFGYSTPWGYFDFNRFHCHFSPRDWQRLINNNWGFRPKRLNFKLFNIQVKEVTDNNGVKTIANNLTSTVQVFTDSDYQLPYVLGSAHEGCLPPFPADVFMIPQYGYLTLNDGSQAVGRSSFYCLEYFPSQMLRTGNNFQFSYEFENVPFHSSYAHSQSLDRLMNPLIDQYLYYLSKTINGSGQNQQTLKFSVAGPSNMAVQGRNYIPGPSYRQQRVSTTVTQNNNSEFAWPGASSWALNGRNSLMNPGPAMASHKEGEDRFFPLSGSLIFGKQGTGRDNVDADKVMITNEEEIKTTNPVATESYGQVATNHQSAQAQAQTGWVQNQGILPGMVWQDRDVYLQGPIWAKIPHTDGNFHPSPLMGGFGMKHPPPQILIKNTPVPADPPTAFNKDKLNSFITQYSTGQVSVEIEWELQKENSKRWNPEIQYTSNYYKSNNVEFAVNTEGVYSEPRPIGTRYLTRNL

SEQ ID NO: 693 - protein, 736 aa, Artificial Sequence
  Description of Artificial Sequence: Synthetic polypeptide
MAADGYLPDWLEDNLSEGIREWWALKPGAPQPKANQQHQDNARGLVLPGYKYLGPGNGLDKGEPVNAADAAALEHDKAYDQQLKAGDNPYLKYNHADAEFQERLKEDTSFGGNLGRAVFQAKKRLLEPLGLVEEAAKTAPGKKRPVEQSPQEPDSSAGIGKSGAQPAKKRLNFGQTGDTESVPDPQPIGEPPAAPSGVGSLTMASGGGAPVADNNEGADGVGSSSGNWHCDSQWLGDRVITTSTRTWALPTYNNHLYKQISNSTSGGSSNDNAYFGYSTPWGYFDFNRFHCHFSPRDWQRLINNNWGFRPKRLNFKLFNIQVKEVTDNNGVKTIANNLTSTVQVFTDSDYQLPYVLGSAHEGCLPPFPADVFMIPQYGYLTLNDGSQAVGRSSFYCLEYFPSQMLRTGNNFQFSYEFENVPFHSSYAHSQSLDRLMNPLIDQYLYYLSKTINGSGQNQQTLKFSVAGPSNTAVQGRNYIPGPSYRQQRVSTTVTQNNNSEFAWPGASSWALNGRNSLMNPGPAMASHKEGEDRFFPLSGSLIFGKQGTGRDNVDADKVMITNEEEIKTTNPVATESYGQVATNHQSAQAQAQTGWVQNQGILPGMVWQDRDVYLQGPIWAKIPHTDGNFHPSPLMGGFGMKHPPPQILIKNTPVPADPPTAFNKDKLNSFITQYSTGQVSVEIEWELQKENSKRWNPEIQYTSNYYKSNNVEFAVNTEGVYSEPRPIGTRYLTRNL

SEQ ID NO: 694 - protein, 736 aa, Artificial Sequence
  Description of Artificial Sequence: Synthetic polypeptide
MAADGYLPDWLEDNLSEGIREWWALKPGAPQPKANQQHQDNARGLVLPGYKYLGPGNGLDKGEPVNAADAAALEHDKAYDQQLKAGDNPYLKYNHADAEFQERLKEDTSFGGNLGRAVFQAKKRLLEPLGLVEEAAKTAPGKKRPVEQSPQEPDSSAGIGKSGAQPAKKRLNFGQTGDTESVPDPQPIGEPPAAPSGVGSLTMASGGGAPVADNNEGADGVGSSSGNWHCDSQWLGDRVITTSTRTWALPTYNNHLYKQISNSTSGGSSNDNAYFGYSTPWGYFDFNRFHCHFSPRDWQRLINNNWGFRPKRLNFKLFNIQVKEVTDNNGVKTIANNLTSTVQVFTDSDYQLPYVLGSAHEGCLPPFPADVFMIPQYGYLTLNDGSQAVGRSSFYCLEYFPSQMLRTGSNFQFSYEFENVPFHSSYAHSQSLDRLMNPLIDQYLYYLSKTINGSGQNQQTLKFSVAGPSNMAVQGRNYIPGPSYRQQRVSTTVTQNNNSEFAWPGASSWALNGRNSLMNPGPAMASHKEGEDRFFPLSGSLIFGKQGTGRDNVDADKVMITNEEEIKTTNPAATESYGQVATNHQSAQAQAQTGWVQNQGILPGMVWQDRDVYLQGPIWAKIPHTDGNFHPSPLMGGFGMKHPPPQILIKNTPVPADPPTAFNKDKLNSFITQYSTGQVSVEIEWELQKENSKRWNPEIQHTSNYYKSNNVEFAVNTEGVYSEPRPIGTRYLTRNL

SEQ ID NO: 695 - protein, 736 aa, Artificial Sequence
  Description of Artificial Sequence: Synthetic polypeptide
MAADGYLPDWLEDNLSEGIREWWALKPGAPQPKANQQHQDNARGLVLPGYKYLGPGNGLDKGEPVNAADAAALEHDKAYDQQLKAGDNPYLKYNHADAEFQERLKEDTSFGGNLGRAVFQAKKRLLEPLGLVEEAAKTAPGKKRPVEQSPQEPDSSAGIGKSGAQPAKKRLNFGQTGDTESVPDPQPIGEPPAAPSGVGSLTMASGGGAPVADNNEGADGVGSSSGNWHCDSQWLGDRVITTSTRTWALPTYNNHLYKQISNSTSGGSSNDNAYFGYSTPWGYFDFNRFHCHFSPRDWQRLINNNWGFRPKRLNFRLFNIQVKEVTDNNGVKTIANNLTSTVQVFTDSDYQLPYVLGSAHEGCLPPFPADVFMIPQYGYLTLNDGSQAVGRSSFYCLEYFPSQMLRTGNNFQFSYEFENVPFHSSYAHSQSLDRLMNPLIDQYLYYLSKTINGSGQNQQTLKFSVAGPSNMAVQGRNYIPGPSYRQQRVSTTVTQNNNSEFAWPGASSWALNGRNSLMNPGPAMASHKEGEDRFFPLSGSLIFGKQGTGRDNVDADKVMITNEEEIKTTNPVATESYGQVATNHQSAQAQAQTGWVQSQGILPGMVWQDRDVYLQGPIWAKIPHTDGNFHPSPLMGGFGMKHPPPQILIKNTPVPADPPTAFNKDKLNSFITQYSTGQVSVEIEWELQKENSKRWNPEIQYTSNYYKSNNVEFAVNTEGVYSEPRPIGTRYLTRNL

SEQ ID NO: 696 - protein, 735 aa, Artificial Sequence
  Description of Artificial Sequence: Synthetic polypeptide
MAADGYLPDWLEDNLSEGIREWWALKPGAPQPKANQQHQDNARGLVLPGYKYLGPGNGLDKGEPVNAADAAALEHDKAYDQQLKAGDNPYLKYNHADAEFQERLKEDTSFGGNLGRAVFQAKKRLLEPLGLVEEAAKTAPGKKRPVEQSPQEPDSSAGIGKSGAQPAKKRLNFGQTGDTESVPDPQPIGEPPAAPSGVGSLTMASGGGAPVADNNEGADGVGSSSGNWHCDSQWLGDRVITTSTRTWALPTYNNHLYKQISNSTSGGSSNDNAYFGYSTPWRYFDFNRFHCHFSPRDWQRLINNWGFRPKRLNFKLFNIQVKEVTDNNGVKTIANNLTSTVQAFTDSDYQLPYVLGSAHEGCLPPFPADVFMIPQYGYLTLNDGSQAVGRSSFYCLEYFPSQMLRTGNNFQFSYEFENVPFHSSYAHSQSLDRLMNPLIDQYLYYLSKTINGSGQNQQTLKFSVAGPSNMAVQGRNYIPGPSYRQQRVSTTVTQNNNSEFAWPGASSWALNGRNSLMNPGPAMASHKEGEDRFFPLSGSLIFGKQGTGRDNVDADKVMITNEEEIKTTNPVATESYGQVATNHQSAQAQAQTGWVQNQGILPGMVWQDRDVYLQGPIWAKIPHTDGNFHPSPLMGGFGMKHPPPQILIKNTPVPADPPTAFNKDELNSFITQYSTGQVSVEIEWELQKENSKRWNPEIQYTSNYYKSNNVEFAVNTEGVYSEPRPIGTRYLTRNL

SEQ ID NO: 697 - protein, 735 aa, Artificial Sequence
  Description of Artificial Sequence: Synthetic polypeptide
MAADGYLPDWLEDNLSEGIREWWALKPGAPQPKANQQHQDNARGLVLPGYKYLGPGNGLDKGEPVNAADAAALEHDKAYDQQLKAGDNPYLKYNHADAEFQERLKEDTSFGGNLGRAVFQDKKRLLEPLGLVEEAAKTAPGKKRPVEQSPQEPDSSAGIGKSGAQPAKKRLNFGQTGDTESVPDPQPIGEPPAAPSGVGSLTMASGGGAPVADNNEGADGVGSSSGNWHCDSQWLGDRVITTSTRTWALPTYNNHLYKQISNSTSGGSSNDNAYFGYSTPWGYFDFNRFHCHFSPRDWQRLINNWGFRPKRLNFKLFNIQVKEVTDNNGVKTIANNLTSTVQVFTDSDYQLPYVLGSAHEGCLPPFPADVFMIPQYGYLTLNDGSQAVGRSSFYCLEYFPSQMLRTGNNFQFSYEFENVPFHSSYAHSQSLDRLMNPLIDQYLYYLSKTINGSGQNQQTLKFSVAGPSNMAVQGRNYIPGPSYRQQRVSTTVTQNNNSEFAWPGASSWALNGRNSLMNPGPAMASHKEGEDRFFPLSGSLIFGKQGTGRDNVDADKVMITNEEEIKTTNPVATESYGQVATNHQSAQAQAQTGWVQNQGILPGMVWQDRDVYLQGPIWAKIPHTDGNFHPSPLMGGFGMKHPPPQILIKNTPVPADPPTAFNKDKLNSFITQYSTGQVSVEIEWELQKENSKRWNPEIQYTSNYYKSNNVEFAVNTEGVYSEPRPIGTRYLTRNL

SEQ ID NO: 698 - protein, 736 aa, Artificial Sequence
  Description of Artificial Sequence: Synthetic polypeptide
MAADGYLPDWLEDNLSEGIREWWALKPGAPQPKANQQHQDNARGLVLPGYKYLGPGNGLDKGEPVNAADAAALEHDKAYDQQLKAGDNPYLKYNHADAEFQERLKEDTSFGGNLGRAVFQAKKRLLEPLGLVEEAAKTAPGKKRPVEQSPQEPDSSAGIGKSGAQPAKKRLNFGQTGDTESVPDPQPIGEPPAAPSGVGSLTMASGGGAPVADNNEGADGVGSSSGNWHCDSQWLGDRAITTSTRTWALPTYNNHLYKQISNSTSGGSSNDNAYFGYSTPWGYFDFNRFHCHFSPRDWQRLINNNWGFRPKRLNFKLFNIQVKEVTDNNGVKTIANNLTSTVQVFTDSDYQLPYVLGSAHEGCLPPFPADVFMIPQYGYLTLNDGSQAVGRSSFYCLEYFPSQMLRTGNNFQFSYEFENVPFHSSYAHSQSLDRLMNPLIDQYLYYLSKTINGSGQNQQTLKFSVAGPSNMAVQGRNYIPGPSYRQQRVSTTVTQNNNSEFAWPGASSWALNGRNSLMNPGPAMASHKEGEDRFFPLSGSLIFGKQGTGRDNVDADKVMTTNEEEIKTTNPVATESYGQVATNHQSAQAQAQTGWVQNQGILPGMVWQDRDVYLQGPIWAKIPHTDGNFHPSPLMGGFGMKHPPPQILIKNTPVPADPPTAFNKDKLNSFITQYSTGQVSVEIEWELQKENSKRWNPEIQYTSNYYKSNNVEFAVNTEGVYSEPRPIGTRYLTRNL

SEQ ID NO: 699 - protein, 736 aa, Artificial Sequence
  Description of Artificial Sequence: Synthetic polypeptide
MAADGYLPDWLEDNLSEGIREWWALKPGAPQPKANQQHQDNARGLVLPGYKYLGPGNGLDKGEPVNAADAAALEHDKAYDQQLKAGDNPYLKYNHADAEFQERLKEDTSFGGNLGRAVFQTKKRLLEPLGLVEEAAKTAPGKKRPVEQSPQEPGSSAGIGKSGAQPAKKRLNFGQTGDTESVPDPQPIGEPPAAPSGVGSLTMASGGGAPVADNNEGADGVGSSSGNWHCDSQWLGDRVITTSTRTWALPTYNNHLYKQISNSTSGGSSNDNAYFGYSTPWGYFDFNRFHCHFSPRDWQRLINNNWGFRPKRLNFKLFNIQVKEVTDNNGVKTIANNLTSTVQVFTDSDYQLPYVLGSAHEGCLPPFPADVFMIPQYGYLTLNDGSQAVGRSSFYCLEYFPSQMLRTGNNFQFSYEFENVPFHSSYAHSQSLDRLMNPLIDQYLHYLSKTINGSGQNQQTLKFSVAGPSNMAVQGRNYIPGPSYRQQRVSTTVTQNNNSEFAWPGASSWALNGRNSLMNPGPAMASHKEGEDRFFPLSGSLIFGKQGTGRDNVDADKVMITNEEEIKTTNPVATESYGQVATNHQSAQAQAQTGWVQNQGILPGMVWQDRDVYLQGPIWAKIPHTDGNFHPSPLMGGFGMKHPPPQILIKNTPVPADPPTAFNKDKLNSFITQYSTGQVSVEIEWELQKENSKRWNPEIQYTSNYYKSNNVEFAVNTEGVYSEPRPIGTRYLTRNL

SEQ ID NO: 700 - protein, 736 aa, Artificial Sequence
  Description of Artificial Sequence: Synthetic polypeptide
MAADGYFPDWLEDNLSEGIREWWALKPGAPQPKANQQHQDNARGLVLPGYKYLGPGNGLDKGEPVNAADAAALEHDKAYDQQLKAGDNPYLKYNHADAEFQERLKEDTSFGGNLGRAVFQAKKRLLEPLGLVEEAAKTAPGKKRPVEQSPQEPDSSAGIGKSGAQPAKKRLNFGQTGDTESVPDPQPIGESPAAPSGVGSLTMASGGGAPVADNNEGADGVGSSSGNWHCDSQWLGDRVITTSTRTWALPTYNNHLYKQISNSTSGGSSNDNAYFGYSTPWGYFDFNRFHCHFSPRDWQRLINNNWGFRPKRLNFKLFNIQVKEVTDNNGVKTIANNLTSTVQVFTDSDYQLPYVLGSAHEGCLPPFPADVFMIPQYGYLTLNDGSQAVGRSSFYCLEYLPSQMLRTGNNFQFSYEFENVPFHSSYAHSQSLDRLMNPLIDQYLHYLSKTINGSGQNQQTLKFSVAGPSNMAVQGRNYIPGPSYRQQRVSTTVTQNNNSEFAWPGASSWALNGRNSLMNPGPAVASHKEGEDRFFPLSGSLIFGKQGTGRDNVDADKVMITNEEEIKTTNPVATESYGQVATNHQSAQAQAQTGWVQNQGILPGMVWQDRDVYLQGPIWAKIPHTDGNFHPSPLMGGFGMKHPPPQILIKNTPVPADPPTAFNKDKLNSFITQYSTGQVSVEIEWELQKENSKRWNPEIQYTSNYYKSNNVEFAVNTEGVYSEPRPIGTRYLTRNL

SEQ ID NO: 701 - protein, 736 aa, Artificial Sequence
  Description of Artificial Sequence: Synthetic polypeptide
MAADGYLPDWLEDNLSEGIREWWALKPGAPQPKANQQHQDNARGLVLPGYKYLGPGNGLDKGEPVNAADAAALEHDKAYDQQLKAGDNPYLKYNHADAEFQERLKEDTSFGGNLGRAVFQAKKRLLEPLGPVEEAAKTAPGKKRPVEQSPQEPDSSAGIGKSGAQPAKKRLNFGQTGDTESVPDPQPIGEPPAAPSGVGSLTMASGGGAPVADNNEGADGVGSSSGNWHCDSQWLGDRVITTSTRTWALPTYNNHLYKQISNSTSGGSSNDNAYFGYSTPWGYFDFNRFHCHFSPRDWQRLINNNWGFRPKRLNFKLFNIQVKEVTDNNGVKTIANNLTSTVQVFTDSDYQLPYVLGSAHEGCLPPFPADVFMIPQYGYLTLNDGSQAVGRSSFYCLEYFPSQMLRTGNNFQFSYEFENVPFHSSYAHSQSLDRLMNPLIDQYLYYLSKTINGSGQNQQTLKFSVAGPSNMAVQGRNYIPGPSYRQQRVSTTVTQNNNSEFAWPGASSWALNGRNSLMNPGPAMASHKEGEDRFFPLSGSLIFGKQGTGRDNVDADKVMITNEEEIKTTNPVATESYGQAATNHQSAQAQAQTGWVQNQGILPGMVWQDRDVYLQGPIWAKIPHTDGNFHPSPLMGGFGMKHPPPQILIKNTPVPADPPTAFNKDKLNSFITQYSTGQVSVEIEWELQKENSKRWNPEIQYTSNYYKSNNVEFAVNTEGVYSEPRPIGTRYLTRNL

SEQ ID NO: 702 - protein, 736 aa, Artificial Sequence
  Description of Artificial Sequence: Synthetic polypeptide
MAADGYLPDWLEDNLSEGIREWWALKPGAPQPKANQQHQDNARGLVLPGYKYLGPGNGLDKGEPVNAADAAALEHDKAYDQQLKAGDNPYLKYNHADAEFQERLKEDTSFGGNLGRAVFQAKKRLLEPLGPVEEAAKTAPGKKRPVEQSPQEPDSSAGIGKSGAQPAKKRLNFGQTGDTESVPDPQPIGEPPAAPSGVGSLTMASGGGAPVADNNEGADGVGSSSGNWHCDSQWLGDRVITTSTRTWALPTYNNHLYKQISNSTSGGSSNDNAYFGYSTPWGYFDFNRFHCHFSPRDWRRLINNNWGFRPKRLNFKLFNIQVKEVTDNNGVKTIANNLTSTVQVFTDSDYQLPYVLGSAHEGCLPPFPADVFMIPQYGYLTLNDGSQAVGRSSFYCLEYFPSQMLRTGNNFQFSYEFENVPFHSSYAHSQSLDRLMNPLIDQYLYYLSKTINGSGQNQQTLKFSVAGPSNMAVQGRNYIPGPSYRQQRVSTTVTQNNNSEFAWPGASSWALNGRNSLMNPGPAMASHKEGEDRFFPLSGSLIFGKQGTGRDNVDADKVMITNEEEIKTTNPVATESYGQVATNHQSAQAQAQTGWVQNQGILPGMVWQDRDVYLQGPIWAKIPHTDGNFHPSPLMGGFGMKHPPPQILIKNTPVPADPPTAFNKDKLNSFITQYSTGQVSVEIEWELQKENSKRWNPEIQYTSNYYKSNNVEFAVNTEGVYSEPRPIGTRYLTRNL

SEQ ID NO: 703 - protein, 736 aa, Artificial Sequence
  Description of Artificial Sequence: Synthetic polypeptide
MAADGYLPDWLEDNLSEGIREWWALKPGAPQPKANQQHQDNARGLVLPGYKYLGPGNGLDKGEPVNAADAAALEHDKAYDQQLKAGDNLYLKYNHADAEFQERLKEDTSFGGNLGRAVFQAKKRLLEPLGLVEEAAKTAPGKKRPVEQSPQEPDSSAGIGKSGAQPAKKRLNFGQTGDTESVPDPQPIGEPPAAPSGVGSLTMASGGGAPVADNNEGADGVGSSSGNWHCDSQWLGDRVITTSTRTWALPTYNNHLYKQISNSTSGGSSNDNAYFGYSTPWGYFDFNRFHCHFSPRDWQRLINNNWGFRPKRLNFKLFNIQVKEVTDNNGVKTIANNLTSTVQVFTDSDYQLPYVLGSAHEGCLPPFPADVFMIPQYGYLTLNDGSQAVGRSSFYCLEYFPSQMLRTGNNFQFSYEFENVPFHSSYAHSQSLDRLMNPLIDQYLHYLSKTINGSGQNQQTLKFSVAGPSNMAVQGRNYIPGPSYRQQRVSTTVTQNNNSEFAWPGASSWALNGRNSLMNPGPAMASHKEGEDRFFPLSGSLIFGKQGTGRDNVDADKVMITNEEEIKTTNPVATESYGQVATNHQSAQAQAQTGWVQNQGILPGMVWQDRDVYLQGPIWAKIPHTDGNFHPSPLMGGFGMKHPPPQILIKNTPVPADPPTAFNKDKLNSFITQYSTGQVSVEIEWELQKENSKRWNPEIQYTSNYYKSNNVEFAVNTEGVYSEPRPIGTRYLTRNL

SEQ ID NO: 704 - protein, 736 aa, Artificial Sequence
  Description of Artificial Sequence: Synthetic polypeptide
MAADGYLPDWLEDNLSEGIREWWALKPGAPQPKANQQHQDNARGLVLPGYKYLGPGNGLDKGEPVNAADAAALEHDKAYDQQLKAGDNPYLKYNHADAEFQERLKEDTSFGGNLGRAVFQAKKRLLEPLGLVEEAAKTAPGKKRPVEQSPQEPDSSAGIGKSGAQPAKKRLNFGQTGDTESVPDPQPIGEPPAAPSGVGSLTMASGGGAPVADNNEGADGVGSSSGNWHCDSQWLGDRVITTSTRTWALPTYNNHLYKQISNSTSGGSSNDNAYFGYSTPWGYFDFNRFHCHFSPRDWQRLINNNWGFRPKRLNFKLFNIQVKEVTDNNGVKTIANNLTSTVQVFTDSDYQLPYVLGSAHEGCLPPFPADVFMIPQYGYLTLNDGSQAVGRSSFYCLEYFPSQMLRTGNNFQFSYEFENVPFHSSYAHSQSLDRLMNPLIDQYLHYLSKTINGSGQNQQTLKFSVAGPSNMAVQGRNYIPGPSYRQQRVSTTVTQNNNSEFAWPGASSWALNGRNSLMNPGPAMASHKEGEDRFFPLSGSLIFGKQGTGRDNVDADKVMITNEEEIKTTNPVATESYGQVATNHQSAQAQAQTGWVQNQGILPGMVWQDRDVYLQGPIWAKIPHTDGNFHPSPLMGGFGMKHPPPQILIKNTPVPADPPTAFNKDKLNSFITQYSTGQVSVEIEWELQKENSKRWNPEIQYTSNYYKSNNVEFAVNTEGVYSEPRPIGTRYLTRNL

SEQ ID NO: 705 - protein, 736 aa, Artificial Sequence
  Description of Artificial Sequence: Synthetic polypeptide
  MOD_RES (442)..(442): Xaa = any amino acid
MAADGYLPDWLEDNLSEGIREWWALKPGAPQPKANQQHQDNARGLVLPGYKYLGPGNGLDKGEPVNAADAAALEHDKAYDQQLKAGDNPYLKYNHADAEFQERLKEDTSFGGNLGRAVFQAKKRLLEPLGLVEEAAKTAPGKKRPVEQSPQEPDSSAGIGKSGAQPAKKRLNFGQTGDTESVPDPQPIGEPPAAPSGVGSLTMASGGGAPVADNNEGADGVGSSSGNWHCDSQWLGDRVITTSTRTWALPTYNNHLYKQISTSTSGGSSNDNAYFGYSTPWGYFDFNRFHCHFSPRDWQRLINNNWGFRPKRLNFKLFNIQVKEVTDNNGVKTIANNLTSTVQVFTDSDYQLPYVLGSAHEGCLPPFPADVFMIPQYGYLTLNDGSQAVGRSSFYCLEYFPSQMLRTGNNFQFSYEFENVPFHSSYAHSQSLDRLMNPLIDXYLHYLSKTINGSGQNQQTLKFSVAGPSNMAVQGRNYIPGPSYRQQRVSTTVTQNNNSEFAWPGASSWALNGRNSLMNPGPAMASHKEGEDRFFPLSGSLIFGKQGTGRDNVDADKVMITNEEEIKTTNPVATESYGQVATNHQSAQAQAQTGWVQNQGILPDMVWQDRDVYLQGPIWAKIPHTDGNFHPSPLMGGFGMKHPPPQILIKNTPVPADPPTAFNKDKLNSFITQYSTGQVSVEIEWELQKENSKRWNPEIQYTSNYYKSNNVEFAVNTEGVYSEPRPIGTRYLTRNL

SEQ ID NO: 706 - protein, 736 aa, Artificial Sequence; identical to SEQ ID NO: 686
  Description of Artificial Sequence: Synthetic polypeptide

SEQ ID NO: 707 - protein, 736 aa, Artificial Sequence; identical to SEQ ID NO: 690
  Description of Artificial Sequence: Synthetic polypeptide

SEQ ID NO: 708 - protein, 736 aa, Artificial Sequence
  Description of Artificial Sequence: Synthetic polypeptide
MAADGYLPDWLEDNLSEGIREWWALKPGAPQPRANQQHQDNARGLVLPGYKYLGPGNGLDKGEPVNAADAAALEHDKAYDQQLKAGDNPYLKYNHADAEFQERLKEDTSFGGNLGRAVFQAKKRLLEPLGLVEEAAKTAPGKKRPVEQSPQEPDSSAGIGKSGAQPAKKRLNFGQTGDTESVPDPQPIGEPPAAPSGVGSLTMASGGGAPVADNNEGADGVGSSSGNWHCDSQWLGDRVITTSTRTWALPTYNNHLYKQISNSTSGGSSNDNAYFGYSTPWGYFDFNRFHCHFSPRDWQRLINNNWGFRPKRLNFKLFNIQVKEVTDNNGVKTIANNLTSTVQVFTDSDCQLPYVLGSAHEGCLPPFPADVFMIPQYGYLTLNDGSQAVGRSSFYCLEYFPSQMLRTGNNFQFSYEFENVPFHSSYAHSQSLDRLTNPLIDQYLYYLSKTINGSGQNQQTLKFSVAGPSNMAVQGRNYIPGPSYRQQRVSTTVTQNNNSEFAWPGASSWALNGRNSLMNPGPAMASHKEGEDRFFPLSGSLIFGKQGTGRDNVDADKVMITNEEEIKTTNPVATESHGQVATNHQSAQAQAQTGWVQNQGILPGMVWQDRDVYLQGPIWAKIPHTDGNFHPSPLMGGFGMKHPPPQILIKNTPVPADPPTAFNKDKLNSFITQYSTGQVSVEIEWELQKENSKRWNPEIQYTSNYYKSNNVEFAVNTEGVYSEPRPIGTRYLTRNL

SEQ ID NO: 709 - protein, 736 aa, Artificial Sequence
  Description of Artificial Sequence: Synthetic polypeptide
MAADGYLPDWLEDNLSEGIREWWALKPGAPQPKANQQHQDNARGLVLPGYKYLGPGNGLDKGEPVNAADAAALEHDKAYDQQLKAGDNPYLKYNHADAEFQERLKEDTSFGGNLGRAVFQAKKRLLEPLGLVEEAAKTAPGKKRPVEQSPQEPDSSAGIGKSGAQPAKKRLNFGQTGDTESVPDPQPIGEPPAAPSGVGSLTMASGGGAPVADNNEGADGVGSSSGNWHCDSQWLGDRVITTSTRTWALPTYNNHLYKQISNSTSGGSSNDNAYFGYSTPWGYFDFNRFHCHFSPRDWQRLINNNWGFRPKRLNFKLFNIQVKEVTDNNGVKTIANNLTSTVQVFTDSDYQLPYVLGSAHEGCLPPFPADVFMIPQYGYLTLNDGSQAVGRSSFYCLEYFPSQMLRTGNNFQFSYEFENVPFHSSYAHSQSLDRLMNPPIDQYLYYLSKTINGSGQNQQTLKFSVAGPSNMAVQGRNYIPGPSYRQQRVSTTVTQNNNSEFAWPGASSWALNGRNSLMNPGPAMASHKEGEDRFFPLSGSLIFGKQGTGRDNVDADKVMITNEEEIKTTNPVATESYGQVATNHQSAQAQAQTGWVQNQGILPGMVWQDRDVYLQGPIWAKIPHTDGNFHPSPLMGGFGMKHPPPQILIKNTPVPADPPTAFNKDKLNSFITQYSTGQVSVEIEWELQKENSKRWNPEIQYTSNYYKSNNVEFAVNTEGVYGEPRPIGTRYLTRNL

SEQ ID NO: 710 - protein, 736 aa, Artificial Sequence
  Description of Artificial Sequence: Synthetic polypeptide
MAADGYLPDWLEDNLSEGIREWWALKPGAPQPKANQQHQDNARGLVLPGYKYLGPGNGLDKGEPVNAADAAALEHDKAYDQQLKAGDNPYLKYNHADAEFQERLKEDTSFGGNLGRAVFQAKKRLLEPLGLVEEAAKTAPGKKRPVEQSPQEPDSSAGIGKSGAQPAKKRLNFGQTGDTESVPDPQPIGEPPAAPSGVGSLTMASGGGAPVADNNEGADGVGSSSGNWHCDSQWLGDRVITTSTRTWALPTYNNHLYKQISNSTSGGSSNDNAYFGYSTPWGYFDFNRFHCHFSPRDRQRLINNNWGFRPKRLNFKLFNIQVKEVTDNNGVKTIANNLTSTVQVFTDSDYQLPYVLGSAHEGCLPPFPADVFMIPQYGYLTLNDGSQAVGRSSFYCLEYFPSQMLRTGNNFQFSYEFENVPFHSSYAHSQSLDRLMNPLIDQYLYYLSKTINGSGQNQQTLKFSVAGPSNMAVQGRNYIPGPSYRQQRVSTTVTQNNNSEFAWPGASSWALNGRNSLMNPGPAMASHKEGEDRFFPLSGSLIFGKQGTGRDNVDADKVMITNEEEIKTTNPVATESYGQVATNHQSAQAQAQTGWVQNQGILPGMVWQDRDVYLQGPIWAKIPHTDGNFHPSPLMGGFGMKHPPPQILIKNTPVPADPPTAFNKDKLNSFITQYSTGQVSVEIEWELQKENSKRWNPEIQYTSNYYKSNNVEFAVNTEGVYSEPRPIGTRYLTRNL

SEQ ID NO: 711 - protein, 736 aa, Artificial Sequence
  Description of Artificial Sequence: Synthetic polypeptide
MAADGYLPDWLEDNLSEGIREWWALKPGAPQPKANQQHQDNARGLVLPGYKYLGPGNGLDKGEPVNAADAAALEHDKAYDQQLKAGDNPYLKYNHADAEFQERLKEDTSFGGNLGRAVFQAKKRLLEPLGLVEEAAKTAPGKKRPVEQSPQEPDSSAGIGKSGAQPAKKRLNFGQTGDTESVPDPQPIGEPPAAPSGVGSLTMASGGGAPVADNNEGADGVGSSSGNWHCNSQWLGDRVITTSTRTWALPTYNNHLYKQISNSTSGGSSNDNAYFGYSTPWGYFDFNRFHCHFSPRDWQRLINNNWGFRPKRLNFKLFNIQVKEVTDNNGVKTIANNLTSTVQVFTDSDYQLPYVLGSAHEGCLPPFPADVFMIPQYGYLTLNDGSQAVGRSSFYCLEYFPSQMLRTGNNFQFSYEFENVPFHSSYAHSQSLDRLMNPLIDQYLYYLSKTINGSGQNQQTLKFSVAGPGNMAVQGRNYIPGPSYRQQRVSTTVTQNNNSEFAWPGASSWALNGRNSLMNPGPAMASHKEGEDRFFPLSGSLIFGKQGTGRDNVDADKVMITNEEEIKTTNPVATESYGQVATNHQSAQAQAQTGWVQNQGILPGMVWQDRDVYLQGPIWAKIPHTDGNFHPSPLMGGFGMKHPPPQILIKNTPVPADPPTAFNKDKLNSFITQYSTGQVSVEIEWELQKENSKRWNPEIQYTSNYYKSNNVEFAVNTEGVYSEPRPIGTRYLTRNL

SEQ ID NO: 712 - protein, 736 aa, Artificial Sequence
  Description of Artificial Sequence: Synthetic polypeptide
MAADGYLPDWLEDNLSEGIREWWALKPGAPQPKANQQHQDNARGLVLPGYRYLGPGNGLDKGEPVNAADAAALEHDKAYDQQLKAGDNPYLKYNHADAEFQERLKEDTSFGGNLGRAVFQAKKRLLEPLGLVEEAAKTAPGKKRPVEQSPQEPDSSAGIGKSGAQPAKKRLNFGQTGDTESVPDPQPIGEPPAAPSGVGSLTMASGGGAPVADNNEGADGVGSSSGNWHCDSQWLGDRVITTSTRTWALPTYNNHLYKQISNSTSGGSSNDNAYFGYSTPWGYFDFNRFHCHFSPRDWQRLINNNWGFRPKRLNFKLFNIQVKEVTDNNGVKTVANNLTSTVQVFTDSDYQLPYVLGSAHEGCLPPFPADVFMIPQYGYLTLNDGSQAVGRSSFYCLEYFPSQMLRTGNNFQFSYEFENVPFHSSYAHSQSLDRLMNPLIDQYLYYLSKTINGSGQNQQTLKFSVAGPSNMAVQGRNYIPGPSYRQQRVSTTVTQNNNSEFAWPGASSWALNGRNSLMNPGPAMASHKEGEDRFFPLSGSLIFGKQGTGRDNVDADKVMITNEEEIKTTNPVATESYGQVATNHQSAQAQAQTGWVQNQGILPGMVWQDRDVYLQGPIWAKIPHTDGNFHPSPLMGGFGMKHPPPQILIKNTPVPADPPTAFNKDKLNSFITQYSTGQVSVEIEWELQKENSKRWNPEIQYTSNYYKSNNVEFAVNTEGVYSGPRPIGTRYLTRNL

SEQ ID NO: 713 - protein, 736 aa, Artificial Sequence; identical to SEQ ID NO: 123
  Description of Artificial Sequence: Synthetic polypeptide

SEQ ID NO: 714 - protein, 736 aa, Artificial Sequence
  Description of Artificial Sequence: Synthetic polypeptide
MAADGYLPDWLEDNLSEGIREWWALKPGAPQPKANQQRQDNARGLVLPGYKYLGPGNGLDKGEPVNAADAAALEHDKAYDQQLKAGGNPCLKYNHADAEFQERLKEDTSFGGNLGRAVFQAKKRLLEPLGLVEEAAKTAPGKKRPVEQSPQEPDSSAGIGRSGAQPAKKRLNFGQTGDTESVPDPQPIGEPPAAPSGVGSLTMASGGGAPVADNNEGADGVGSSSGNWHCDSQWLGDRVITTSTRTWALPTYNNHLYKQISNSTSGGSSNDNAYFGYSTPWGYFDFNRFHCHFSPRDWQRLINNNWGFRPKRLNFKLFNIQVKEVTDNNGVKAIANNLTSTVQVFTDSDYQLPYVLGSAHEGCLPPFPADVFMIPQYGYLTLNDGSQAVGRSSFYCLEYFPSQMLRTGNNFQFSYEFENVPFHSSYAHSQSLDRLMNPLIDQYLYYLSKTIDGSGQNQQTLKFSVAGPSNMAVQGRNYIPGPSYRQQRVSTTVTQNNNSEFAWPGASSWALNGRNSLMDPGPAMASHKEGEDRFFPLSGSLIFGKQGTGRDNVDADKVMITNEEEIKTTNPVATESYGQVATNHQSAQAQAQTGWVQNQGILPGMVWQDRDVYLQGPIWAKIPHTGGNFHPSPLMGGFGMKHPPPQILIKNTPVPADPPTAFNKDKLNSFITQYSTGQVSVEIEWELQKENSKRWNPEIQYTSNYYKSNNVEFAVNTEGVYSEPRPIGTRYLTRNL

SEQ ID NO: 715 - protein, 736 aa, Artificial Sequence
  Description of Artificial Sequence: Synthetic polypeptide
MAADGYLPDWLEDNLSEGIREWWALKPGAPQPKANQQHQDNARGLVLPGYKYLGPGNGLDKGEPVNAADAAALEHDKAYDQQLKAGDNPYLKYNHADAEFQERLKEDTSFGGNLGRAVFQAKKRLLEPLGLVEEAAKTAPGKKRPVEQSPQEPDSSAGIGKSGAQPAKKRLNFGQTGDTESVPDPQPIGEPPAAPSGVGSLTMASGGGAPVADNNEGADGVGSSSGNWHCDSQWLGDRVITTSTRTWALPTYNNHLYKQISNSTSGGSSNDNAYFGYSTPWGYFDFNRFHCHFSPRDWQRLINNNWGFRPKRLNFKLFNIQVKEVTDNNGVKTIANNLTSTVQVFTDSDYQLPYVLGSAHEGCLPPFPADVFMIPQYGYLTLNDGSQAVGRSSFYCLEYFPSQMLRTGNNFQFSYEFENVPFHSSYAHSQSLDRLMNPLIDQYLYYLSKTINGSGQNQQTLKFSVAGPSNMAVQGRNYIPGPSYRQQRVSTTVTQNNNSEFAWPGASSWALNGRNSLMNPGPAMASHKEGEDRFFPLSGSLIFGKQGTGRDNVDADKVMITNEEEIKTTNPVATESYGQVATNHQSAQAQAQTGWVQNQGILPGMVWQDRDVYLQGPIWAKIPHTDGNFHPSPLMGGFGMKHPPPQILIKNTPVPADPPTAFNKDKLNSFITQYSTGQVSVEIEWELQKENSKRWNPEIQYTSNYYKPNNVEFAVNTEGVYSEPRPIGTRYLTRNL

SEQ ID NO: 716 - protein, 736 aa, Artificial Sequence
  Description of Artificial Sequence: Synthetic polypeptide
MAADGYLPDWLEDNLSEGIREWWALKPGAPQPKANQQHQDNARGLVLPGYKYLGPGNGLDKGEPVNAADAAALEHNKAYDQQLKAGDNPYLKCNHADAEFQERLKEDTSFGGNLGRAVFQAKKRPLEPLGLVEEAAKTAPGKKRPVEQSPQEPDSSAGIGKSGAQPAKKRLNFGQTGDTESVPDPQPIGEPPAAPSGVRSLTMASGGGAPVADNNEGADGVGSSSGNWHCDSQWLGDRVITTSTRTWALPTYNNHLYKQISNSTSGGSSNDNAYLGYSTPWGYFDFNRFHCHFSPRDWQRLINNNWGFRPKRLNFKLFNIQVKEVTDNNGVKTIANNLTSTVQVFTDSDYQLPYVLGSAHEGCLPPFPADVFMIPQYGYLTLNDGSQAVGRSSFYCLEYFPSQMLRTGNNFQFSYEFENVPFHSSYAHSQSLDRLMNPLIDQYLYYLSKTINGSGQNQQTLKFSVAGPSNMAVQGRNYIPGPSYRQQRVSTTVTQNNNSEFAWPGASSWALNGRNSLMNPGPTMASHKEGEDRFFPLSGSLIFGKQGTGRDNVDADKVMITNEEEIKTTNPVATESYGQVATNHQSAQAQAQTGWVQNQGILPGMVWQDRDVYLQGPIWAKIPHTDGNFHPSPLMGGFGMKHPPPQILIKNTPVPADPPTAFNKDKLNSFITQYSTGQVSVEIEWELQKENSKRWNPEIQYTSNYYKSNNVEFAVNTEGVYSEPRPIGTRYLTRNL

SEQ ID NO: 717 - protein, 736 aa, Artificial Sequence
  Description of Artificial Sequence: Synthetic polypeptide
MAADGYLPDWLEDNLSEGIREWWALKPGAPQPKANQQHQDNARGLVLPGYKYLGPGNGLDKGEPVNAADAAALVHDKAYDQQLKAGDNPYLKCNHADAEFQERLKEDTSFGGNLGRAVFQAKKRLLEPLGLVEEAAKTAPGKKRPVEQSPQEPDSSAGIGKSGAQPAKKRLNFGQTGDTESVPDPQPIGEPPAAPSGVGSLTMASGGGAPVADNNEGADGVGSSSGNWHCDSQWLGDRVITTSTRTWALPTYNNHLYKQISNSTSGGSSNDNAYLGYSTPWGYFDFNRFHCHFSPRDWQRLINNNWGFRPKRLNFKLFNIQVKEVTDNNGVKTIANNLTSTVQVFTDSDYQLPYVLGSAHEGCLPPFPADVFTIPQYGYLTLNDGSQAVGRSSFYCLEYFPSQMLRTGNNFQFSYEFENVPFHSSYAHSQSLDRLMNPLIDQYLYYLSKTINGSGQNQQTLKFSVAGPSNMAVQGRNYIPGPSYRQQRVSTTVTQNNNSEFAWPGASSWALNGRNSLMNPGPAMASHKEGEDRFFPLSGSLIFGKQGTGRDNVDADKVMITNEEEIKTTNPVATESYGQVATNHQSAQAQAQTGWVQNQGILPGMVWQDRDVYLQGPIWAKIPHTDGNFHPSPLMGGFGMKHPPPQILIKNTPVPADPPTAFNKDKLNSFITQYSTGQVSVEIEWELQKENSKRWNPEIQYTSNYYKSNNVEFAVNTEGVYSEPRPIGPRYLTRNF

SEQ ID NO: 718 - protein, 736 aa, Artificial Sequence
  Description of Artificial Sequence: Synthetic polypeptide
MAADGYLPDWLEDNLSEGIREWWALKPGAPQPKANQQHQDNARGLVLPGYKYLGPGNGLDKGEPVNAADAAALEHNKAYDQQLKAGDNPYLKCNHADAEFQERLKEDTSFGGNLGRAVFQAKKRLLEPLGLVEEAAKTAPGKKRPVEQSPQEPDSSAGIGKSGAQPAKKRLNFGQTGDTESVPDPQPIGEPPAAPSGVRSLTMASGGGAPVADNNEGADGVGSSSGNWHCDSQWLGDRVITTSTRTWALPTYNNHLYKQISNSTSGGSSNDNAYLGYSTPWGYFDFNRFHCHFSPRDWQRLINNNWGFRPKRLNFKLFNIQVKEVTDNNGVKTIANNLTSTVQVFTDSDYQLPYVLGSAHEGCLPPFPADVFMIPQYGYLTLNDGSQAVGRSSFYCLEYFPSQMLRTGNNFQFSYEFENVPFHSSYAHSQSLDRLMNPLIDQYLYYLSKTINGSGQNQQTLKFSVAGPSNMAVQGRNYIPGPSYRQQRVSTTVTQNNNSEFAWPGASSWALNGRNSLMNPGPAMASHKEGEDRFFPLSGSLIFGKQGTGRDNVDADKVMITNEEEIKTTNPVATESYGQVATNHQSAQAQAQTGWVQNQGILPGMVWQDRDVYLQGPIWAKIPHTDGNFHPSPLMGGFGMKHPPPQILIKNTPVPADPPTAFNKDKLNSFITQYSTGQVSVEIEWELQKENSKRWNPEIQYTSNYYKSNNVEFAVNTEGVYSEPRPIGTRYLTRNL

SEQ ID NO: 719 - protein, 736 aa, Artificial Sequence
  Description of Artificial Sequence: Synthetic polypeptide
MAADGYLPDWLEDNLSEGIREWWALKPGAPQPKANQQHQDNARGLVLPGYKYLGPGNGLDKGEPVNAADAAALEHDKAYDQQLKAGDNPYLKCNHADAEFQERLKEDTSFGGNLGRAVFQAKKRLLEPLGLVEEAAKTAPGKKRPVEQSPQEPDSSAGIGKSGAQPAKKRLNFGQTGDTESVPDPQPIGEPPAAPSGVGSLTMASGGGAPVADNNEGADGVGSSSGNWHCDSQWLGDRVITTSTRTWALPTYNNHLYKQISNSTSGGSSNDNAYLGYSTPWGYFDFNRFHCHFSPRDWQRLINNNWGFRPKRLNFELFNIQVKEVTDNNGVKTIANNLTSTVQVFTDSDYQLPYVLGSAHEGCLPPFPADVFMIPQYGYLTLNDGSQAVGRSSFYCLEYFPSQMLRTGNNFQSSYEFENVPFHSSYAHSQSLDRLMNPLIDQYLYYLSKTINGSGQNQQTLKFSVAGPSNMAVQGRNYIPGPSYRQQRASTTVTQNNNSEFAWPGASSWALNGRNSLMNPGPAMASHKEGEDRFFPLSGSLIFGKQGTGRDNVDADKVMITNEEEIKTTNPVATESYGQVATNHQSAQAQAQTGWVQNQGILPGMVWQDRDVYLQGPIWAKIPHTDGNFHPSPLMGGFGMKHPPPQILIKNTPVPADPPTAFNKDKLNSFITQYSTGQVSVEIEWELQKENSKRWNPEIQYTSNYYKSNNVEFAVNTEGVYSEPRPIGTRYLTRNL

SEQ ID NO: 720 - protein, 736 aa, Artificial Sequence
  Description of Artificial Sequence: Synthetic polypeptide
MAADGYLPDWLEDNLSEGIREWWALKPGAPQPKANQQHQDNARGLVLPGYKYLGPGNGLDKGEPVNAADAAALEHDKAYDQQLKAGDNPYLKCNHADAEFQERLKEDTSFGGNLGRAVFQAKKRLLEPLGLVEEAAKTAPGKKRPVEQSPQEPDSSAGIGKSGAQPAKKRLNFGQTGDTESVPDPQPIGEPPAAPPGVGSLTMASGGGAPVADNNEGADGVGSSSGNWHCDSQWLGDRVITTSTRTWALPTYNNHLYKQISNSTSGGSSNDNAYLGYSTPWGYFDFNRFHCHFSPRDWQRLINNNWGFRPKRLNFKLFNIQVKEVTDNNGVKTIANNLTSTVQVFTDSDYQLPYVLGSAHEGCLPPFPADVFMIPQYGYLTLNDGSQAVGRSSFYCLEYFPSQMLRTGNNFQFSYEFENVPFHSSYAHSQSLDRLMNPLIDQYLYYLSKTISGSGQNQQTLKFSVAGPSNMAVQGRNYIPGPSYRQQRVSTTVTQNNSSEFAWPGASSWALNGRNSLMNPGPAMASHKEGEDRFFPLSGSLIFGKQGTGRDNVDADKVMITNEEEIKTTNPVATESYGQVATNHQSAQAQAQTGWVQNQGILSGMVWQDRDVYLQGPIWAKIPHTDGNFHPSPLMGGFGMKHPPPQILIKNTPVPADPPTAFNKDKLNSFITQYSTGQVSVEIEWELQKENSKRWNPEIQYTSNYYKSNNVEFAVNTEGVYSEPRPIGTRYLTRNL

SEQ ID NO: 721 - protein, 736 aa, Artificial Sequence
  Description of Artificial Sequence: Synthetic polypeptide
MAADGYLPDWLEDNLSEGIREWWALKPGAPQPKANQQHQDNARGLVLPGYKYLGPGNGLDKGEPVNAADAAALEHDKAYDQQLKAGDNPYLKCNHADAEFQERLKEDTSFGGNLGRAVFQAKKRLLEPLGLVEEAAKTAPGKKRPVEQSPQEPDSSAGIGKSGAQPAKKRLNFGQTGDTESVPDPQPIGEPPAAPSGVGSLTMASGGGAPVADNNEGADGVGSSSGNWHCDSQWLGDRVITTSTRTWALPTYNNHLYKQISNSTSGGSSNDNAYLGYSTPWGYFDFNRFHCHFSPRDWQRLINNNWGFRPKRLNFKLFNIQVKEVTDNNGVKTIANNLTSTVQVFTDSDYQLPYVLGSAHEGCLPPFPADVFMIPQYGYLTLNDGSQAVGRSSFYCLEYFPSQMLRTGNNFQFSYEFENVPFHSSYAHSQSLDRLMNPLIDQYLYYLSKTINGSGQNQQTLKFSVAGPSNMAVQGRNYIPGPSYRQQRVSTTVTQNNNSEFAWPGASSWALNGRNSLMNPGPAMASHKEGEDRFFPLSGSLIFGKQGTGRDNVDADKVMITNEEEIKTTNPVATESYGQVATNHQSAQAQAQTGWVQNQGILPGMVWQDRDVYLQGPIWAKIPHTDGNFHPSPLMGGFGMKHPPPQILIKNTPVPADPPTAFNKDKLNSFITQYSTGQVSVEIEWELQKENSKRWNPEIQYTSNYYKSNNVEFAVNTEGVYSEPRPIGTRYLTRNL

SEQ ID NO: 722 - protein, 736 aa, Artificial Sequence; identical to SEQ ID NO: 721
  Description of Artificial Sequence: Synthetic polypeptide

SEQ ID NO: 723 - protein, 736 aa, Artificial Sequence
  Description of Artificial Sequence: Synthetic polypeptide
MAADGYLPDWLEDNLSEGIREWWALKPGAPQPKANQQHQDNARGLVLPGYKYLGPGNGLDKGEPVNAADAAALEHDKAYDQQLKAGDNPYLKCNHADAEFQERLKEDTSFGGNLGRAVFQAKKRLLEPLGLVEEAAKTAPGKKRPVEQSPQEPDSSAGIGKSGAQPAKKRLNFGQTGDTESVPDPQPIGEPPAAPSGVGSLTMASGGGAPVADNNEGADGVGSSSGNWHCDSQWLGDRVITTSTRTWALPTYNNHLYKQISNSTSGGSSNDNAYLDYSTPWGYFDFNRFHCHFSPRDWQRLINNNWGFRPKRLNFKLFNIQVKEVTDNNGVKTIANNLTSTVQVFTDSDYQLPYVLGSAHEGCLPPFPADVFMIPQYGYLTLNDGSQAVGRSSFYCLEYFPSQMLRTGNNFQFSYEFENVPFHSSYAHSQSLDRLMNPLIDQYLYYLSKTINGSGQNQQTLKFSVAGPSNMAVQGRNYIPGPSYRQQRVSTTVTQNNNSEFAWPGASSWALNGRNSLMNPGPAMASHKEGEDRFFPLSGSLIFGKQGTGRDNVDADKVMITNEEEIKTTNPVATESYGQVATNHQSAQAQAQTGWVQNQGILPGMVWQGRDVYLQGPIWAKIPHTDGNFHPSPLMGGFGMKHPPPQILIKNTPVPADPPTAFNKDKLNSFITQYSTGQVSVEIEWELQKENSKRWNPEIQYTSNYYKSNNVEFAVNTEGVYSEPRPIGTRYLTRNL

SEQ ID NO: 724 - protein, 736 aa, Artificial Sequence; identical to SEQ ID NO: 721
  Description of Artificial Sequence: Synthetic polypeptide

SEQ ID NO: 725 - protein, 736 aa, Artificial Sequence
  Description of Artificial Sequence: Synthetic polypeptide
MAADGYPPDWLEDNLSEGIREWWALKPGAPQPKANQQHQDNARGLVLPGYKYLGPGNGLDKGEPVNAADAAALEHDKAYDQQLKAGDNPHLKYNHADAEFQERLKEDTSFGGNLGRAVFQAKKRLLEPLGLVEEAAKTAPGKKRPVEQSPQEPDSSAGIGKSGAQPAKKRLNFGQTGDTESVPDPQPIGEPPAAPSGVGSLTMASGGGAPVADNNEGADGVGSSSGNWHCDSQWLGDRVITTSTRTWALPTYNNHLYKQISNSTSGGSSNDNAYFGYSTPWGYFDFNRFHCHFSPRDWQRLINNNWGFRPKRLNFKLFNIQVKEVTDNNGVKTIANNLTSTVQVFTDSDYQLPYVLGSAHEGCLPPFPADVFMIPQYGYLTLNDGSQAVGRSSFYCLEYFPSQMLRTGNNFQFSYEFENVPFHSSYAHSQSLDRLMNPLIDQYLYYLSKTINGSGQNQQTLKFSVAGPSNMAVQGRNYIPGPSYRQQRVSTTVTQNNNSEFAWPGASSWALNGRNSLMNPGPAMASHKEGEDRFFPLSGSLIFGKQGTGRDNVDADKVMITNEEEIKTTNPVATESYGQVATNHQSAQAQAQTGWVQNQGILPGMVWQDRDVYLQGPIWAKIPHTDGNFHPSPLMGGFGVKHPPPQILIKNTPVPADPPTAFNKDRLNSFITQYSTGQVSVEIEWELQKENSKRWNPEIQYTSNYYKSNNVEFAVNTEGVYSEPRPIGTRYLTRNL

SEQ ID NO: 726 - protein, 736 aa, Artificial Sequence
  Description of Artificial Sequence: Synthetic polypeptide
MAADGYLPDWLEDNLSEGIREWWALKPGAPQPKANQQHQDNARGLVLPGYKYLGPGNGLDKGEPVNAADAAALEHDKAYDQQLKAGDNPYLKYNHADAEFQERLKEDTSFGGNLGRAVFQAKKRLLEPLGLVEEAAKTAPGKKRPVEQSPQEPDSSAGIGKSGAQPAKKRLNFGQTGDTESVPDPQPIGEPPAAPSGVGSLTMASGGGAPVADNNEGADGVGSSSGNWHCDSQWLGDRVITTSTRTWALPTYNNHLYKQISNSTSGGSSNDNAYFGYSTPWGYFDFNRFHCHFSPRDWQRLINNNWGFRPKRLNFKLFNIQVKEVTDNNGVKTIANNLTSTVQVFTDSDYQLPYVLGSAHEGCLPPFPADVFMIPQYGYLTLNDGSQAVGRSSFYCLEYFPSQMLRTGNNFQFSYEFENVPFHSSYAHSQSLDRLMNPLIDQYLYYLSKTINGSGQNQQTLKFSVAGPSNMAVQGRNYIPGPSYRQQRVSTTVTQNNNSEFAWPGASSWALNGRNSLMNPGPAMASHKEGEDRFFPLSGSLIFGKQGTGRDNVDADKVMITNEEEIKTTNPVATESYGQVATNHQSAQAQAQTGWVQNQGILPGMVWQDRDVYLQGPIWAKIPHTDGNFHPSPLMGGFGVKHPPPQILIKNTPVPADPPTAFNKDKLNSFITQYSTGQVSVEIEWELQKENSKRWNPEIQYTSNYYKSNNVEFAVNTEGVYSEPRPIGTRYLTRNL

SEQ ID NO: 727 - protein, 736 aa, Artificial Sequence
  Description of Artificial Sequence: Synthetic polypeptide
MAADGYLPDWLEDNLSEGIREWWALKPGAPQPKANQQHQDNARGLVLPGYKYLGPGNGLDKGEPVNAADAAALEHDKAYDQQLKAGDNPYLKYNHADAEFQERLKEDTSFGGNLGRAVFQAKKRLLEPLGLVEEAAKTAPGKKRPVEQSPQEPDSSAGIGKSGAQPAKKRLNFGQTGDTESVPDPQPIGEPPAAPSGVGSLTMASGGGAPVADNNEGADGVGSSSGNWHCDSQWLGDRVITTSTRTWALPTYNNHLYKQISNSTSGGSSNDNAYFGYSTPWGYFDFNRFHCHFSPRDWQRLTNNNWGFRPKRLNFKLFNIQVKEVTDNNGVKTIANNLTSTVQVFTDSDYQLPYVLGSAHEGCLPPFPADVFMIPQYGYLTLNDGSQAVGRSSFYCLEYIPSQMLRTGNNFQFSYEFENVPFHSSYAHSQSLDRLMNPLIDQYLYYLSKTINGSGQNQQTLKFSVAGPSNMAVQGRNYIPGPSYRQQRVSTTVTQNNNSEFAWPGASSWALNGRNSLMNPGPAMASHKEGEDRFFPLSGSLIFGKQGTGRDNVDADKVMITNEEEIKTTNPVATESYGQVATNHQSAQAQAQTGWVQNQGILPGMVWQDRDVYLQGPIWAKIPHTDGNFHPSPLMGGFGVKHPPPQILIKNTPVPADPPTAFNKDKLNSFITQYSTGQVSVEIEWELQKENSKRWNPEIQYTSNYYKSNNVEFAVNTEGVYSEPRPIGTRYLTRNL

SEQ ID NO: 728 - protein, 736 aa, Artificial Sequence
  Description of Artificial Sequence: Synthetic polypeptide
MAADGYLPDWLEDNLSEGIREWWALKPGAPQPKANQQHQDNARGLVLPGYKYLGPGNGLDKGEPVNAADAAALEHDKAYDQQLKAGDNPYLKYNHADAEFQERLKEDTSFGGNLGRAVFQAKKRLLEPLGLVEEAAKTAPGKKRPVEQSPQEPDSSAGIGKSGAQPAKKRLNFGQTGDTESVPDPQPIGEPPAAPSGVGSLTMASGGGAPVADNNEGADGVGSSSGNWHCDSQWLGDRVITTSTRTWALPTYNNHLYKQISNSTSGGSSNDNAYFGYSTPWGYFDFNRFHCHFSPRDWQRLINNNWGFRPKRLNFKLFNIQVKEVTDNNGVKTIANNLTSTVQVFTDSDYQLPYVLGSAHEGCLPPFPADVFMIPQYGYLTLNDGSQAVGRSSFYCLEYFPSQMLRTGNNFQFSYEFENVPFHSSYAHSQSLDRLMNPLIDQYLYYLSKTINGSGQNQQTLKFSVAGPSNMAVQGRNYIPGPSYRQQRVSTTVTQNNNSEFAWPGASSWALNGRNSLMNPGPAMASHKEGEDRFFPLSGSLISGKQGTGRDNVDANKVMITNEEEIKTTNPVATESYGQVATNHQSAQAQAQTGWVQNQGILPGMVWQDRDVYLQGPIWAKIPHTDGNFHPSPLMGGFEMKHPPPQILIKNTPVPADPPTAFNKDKLNSFITQYSTGQVSVEIEWELQKENSKRWNPEIQYTSNYYKSNNVEFAVNTEGVYSEPRPIGTRYLTRNL

SEQ ID NO: 729 - protein, 736 aa, Artificial Sequence
  Description of Artificial Sequence: Synthetic polypeptide
MAADGYLPDWLEDNLSEGIREWWALKPGAPQPKANQQHQDNARGLVLPGYKYLGPGNGLDKGEPVNAADAAALEHDKAYDQQLKAGDNPYLKYNHADAEFQERLKEDTSFGGNLGRAVFQAKKRLLEPLGLVEEAAKTAPGKKRPVEQSPQEPDSSAGIGKSGAQPAKKRLNFGQTGDTESVPDPQPIGEPPAAPSGVGSLTIASGGGAPVADNNEGADGVGSSSGNWHCDSQWLGDRVITTSTRTWALPTYNNHLYKRISNSTSGGSSNDNAYFGYSTPWGYFDFNRFHCHFSPRDWQRLINNNWGFRPKRLNFKLFNIRVKEVTDNNGVKTITNNLTSTVQVFTDSDYQLPYVLGSAHEGCLPPFPADVFMIPQYGYLTLNDGSQAVGRSSFYCLEYFPSQMLRTGNNFQFSYEFENVPFHSSYAHSQSLDRLMNPLIDQYLYYLSKTINGSGQNQQTLKFSVAGPSNMAVQGRNYIPGPSYRQQRVSTTVTRNNNSEFAWPGASSWALNGRNSLMNPGPAMASHKEGEDRFFPLSGSLIFGKQGTGRDNVDADKVMITNEEEIKTTNPVATESYGQVATNHQSAQAQAQTGWVQNQGILPGMVWQDRDVYLQGPIWAKIPHTDGNFHPSPLMGGFGVKHPPPQILIKNTPVPADPPTAFNKDKLNSFITQYSTGQVSVEIEWELQKENSKRWNPEIQYTSNYYKSNNVEFAVNTEGVYSEPRPIGTRYLTRNL

SEQ ID NO: 730 - protein, 736 aa, Artificial Sequence
  Description of Artificial Sequence: Synthetic polypeptide
MAADGYLPDWLEDNLSEGIREWWALKPGAPQPKANQQHQDNARGLVLPGYKYLGPGNGLDKGEPVNAADAAALEHDKAYDQQLKAGDNPYLKYNHADAEFQERLKEDTSFGGNLGRAVFQAKKRLLEPLGLVEEAAKTAPGKKRPVEQSPQEPDSSAGIGKSGAQPAKKRLNFGQTGDTEPVPDPQPIGEPPAAPSGVGSLTMASGGGAPVADNNEGADGVGSSSGNWHCDSQWLGDRVITTSTRTWALPTYNNHLYKQISNSTSGGSSNDNAYFGYSTPWGYFDFNRFHCHFSPRDWQRLINNNWGFRPKRLNFKLFNIQVKEVTDNNGVKTIANNLTSTVQVFTDSDYQLPYVLGSAHEGCLPPFPAGVFMIPQYGYLTLNDGSQAVGRSSFYCLEYFPSQMLRTGNNFQFSYEFENVPFHSSYAHSQSLDRLMNPLIDQYLYYLSKTINGSGQNQQTLKFSVAGPSNMAVQGRNYIPGPSYRQQRVSTTATQNNNSEFAWPGASSWALNGRNSLMNPGPAMASHKEGEDRFFPLSGSLIFGKQGTGRDNVDADKVMITNEEEIKTTNPVATESYGQVATNHQSAQAQAQTGWVQNQGILPGMVWQDRDVYLQGPIWAKIPHTDGNFHPSPLMGGFGMKHPPPQILIKNTPVPADPPTAFNKDKLNSFITQYSTGQVSVEIEWELQKENSKRWNPEIQYTSNYYKSNNVEFAVNTEGVYSEPRPIGTRYLTRNL

SEQ ID NO: 731 - protein, 736 aa, Artificial Sequence
  Description of Artificial Sequence: Synthetic polypeptide
MAADGYLPDWLEDNLSEGIREWWALKPGAPQPKANQQHQDNARGLVLPGYKYLGPGNGLDKGEPVNAADAAALEHDKAYDQQLKAGDNPYLKYNHADAGFQERLKEDTSFGGNLGRAVFQAKKRLLEPLGLVEEAAKTAPGKKRPVEQSPQEPDSSAGIGKSGAQPAKKRLNFGQTGDTESVPVPQPIGEPPAAPSGVGSLTMASGGGAPVADNNEGADGVGSSSGNWHCDSQWLGDRVITTSTRTWALPTYNNHLYKQISNSTSGGSSNDNAYFGYSTPWGYFDFNRFHCHFSPRDWQRLINNNWGFRPKRLNFKLFNIQVKEVTDNNGVKTIANNLTSTVQVFTDSDYQLPYVLGSAHEGCLPPFPADVFMIPQYGYLTLNDGSQAVGRSSFYCLEYFPSQMLRTGNNFQFSYEFENVPFHSSYAHSQSLDRLMNPLIDQYLYYLSKTINGSGQNQQTLKFSVAGPSNMAVQGRNYIPGPSYRQQRVSTTVTQNNNSEFAWPGASSWALNGRNSLMNPGPAMASHKEGEDRFFPLSGSLIFGKQGAGRDNVDADKVMITNEEEIKTTNPVATESYGQVATNHQSAQAQAQTGWVQNQGILPGMVWQDRDVYLQGPIWAKIPHTDGNFHPSPLMGGFGMKHPPPQILIKNTPVPADPPTAFNKDKLNSFITQYSTGQVSVEIEWELQKENSKRWNPEIQYTSNYYKSNNVEFAVNTEGVYSEPRPIGTRYLTRNL

SEQ ID NO: 732 - protein, 736 aa, Artificial Sequence
  Description of Artificial Sequence: Synthetic polypeptide
  MOD_RES (126)..(126): Xaa = any amino acid
MAADGYLPDWLEDNLSEGIRERWALKPGAPQPKANQQHQDNARGLVLPGYKYLGPGNGLDKGEPVNAADAAALEHDKAYDQQLKAGDNPYLKYNHADAEFQERLKEDTSFGGNLGRAVFQAKKRLXEPLGLVEEAAKTAPGKKRPVEQSPQEPDSSAGIGKSGAQPAKKRLNFGQTGDTESVPDPQPIGEPPAAPSGVGSLTMASGGGAPVADNNEGADGVGSSSGNWHCDSQWLGDRVITTSTRTWALPTYNNHLYKQISNSTSGGSSNDNAYFGYSTPWGYFDFNRFHCHFSPRDWQRLINNNWGFRPKRLNFKLFNIQVKEVTDNNGVKTIANNLTSTVQVFTDSDYQLPYVLGSAHEGCLPPFPADVFMIPQYGYLTLNDGSQAVGRSSFYCLEYFPSQMLRTGNNFQFSYEFENVPFHSSYAHSQSPDRLMNPLIDQYLYYLSKTINGSGQNQQTLKFSVAGPSNMAVQGRNYIPGPSYRQQRVSTTVTQNNNSEFAWPGASSWALNGRNSLMNPGPAMASHKEGEDRFFPLSGSLIFGKQGTGRDNVDADKVMITNEEEIKTTNPVATESYGQVATNHQSAQAQAQTGWVQNQGILPGMVWQDRDVYLQGPIWAKIPHTDGNFHPSPLMGGFGVKHPPPQILIKNTPVPADPPTAFNKDKLNSFITQYSTGQVSVEIEWELQKENSKRWNPEIQYTSNYYKSNNVEFAVNTEGVYSEPRPIGTRYLTRNL

SEQ ID NO: 733 - protein, 736 aa, Artificial Sequence
  Description of Artificial Sequence: Synthetic polypeptide
MAADGYLPDWLEDNLSEGIREWWALKPGAPQPKANQQHQDNARGLVLPGYKYLGPGNGLDKGEPVNAADAAALEHDKAYDQQLKAGDNPYLKYNHADAEFQERLKEDTSFGGNLGRAVFQAKKRLLEPLGLVEEAAKTAPGKKRPVEQSPQEPDSSAGIGKSGAQPAKKRLNFGQTGDTESVPDPQPIGEPPAAPSGVGSLTMASGGGAPVADNNEGADGVGSSSGNWHCDSQWLGDRVITTSTRTWALPTYNNHLYKQISNSTSGGSSNDNAYLGYSTPWGYFDFNRFHCHFSPRDWQRLINNNWGFRPKRLNFKLFNIQVKEVTDNNGVKTIANNLTSTVQVFTDSDYQLPYVLGSAHEGCLPPFPADVFMIPQYGYLTLNDGSQAVGRSSFYCLEYFPSQMLRTGNNFQFSYEFENVPFHSSYAHSQSLDRLMNPLIDQYLYYLSKTINGSGQNQQTLKFSVAGPSNMAVQGRNYIPGPSYRQQRVSTTVTQNNNSEFAWPGASSWALNGRNSLMNPGPAMASHKEGEDRFFPLSGSLIFGKQGTGRDNVDADKVMITNEEEIKTTNPVATESYGQVATNHQSAQAQAQTGWVQNQGILPGMVWQDRDVYLQGPIWAKIPHTDGNFHPSPLMGGFGMKHPPPQILIKNTPVPADPPTAFNKDKLNSFITQYSTGQVSVEIEWELQKENSKRWNPEIQYTSNYYKSNNVEFAVNTEGVYSEPRPIGTRYLTRNL

SEQ ID NO: 734 - protein, 736 aa, Artificial Sequence
  Description of Artificial Sequence: Synthetic polypeptide
MAADGYLPDWLEDNLSEGIREWWALKPGAPQPKANQQHQDNARGLVLPGYKYLGPGNGLDKGEPVNAADAAALEHDKAYDQQLKAGDNPYLKYNHADAEFQERLKEDTSFGGNLGRAVFQAKKRLLEPLGLVEEAAKTAPGKKRPVEQSPQEPDSSAGIGKSGAQPAKKRLNFGQTGDTESVPDPQPIGEPPAAPSGVGSLTMASGGGAPVADNNEGADGVGSSSGNWHCDSQWLGDRVITTSTRTWALPTYNNHLYKQISNSTSGGSSNDNAYFGYSTPWGYFDFNRFHCHFSPRDWQRLINNNWGFRPKRLNFKLFNIQVKEVTDNNGVKTIANNLTSTVQVFTDSDYQLPYVLGSAHEGCLPPFPADVFMIPQYGYLTLNDGSQAVGRSSFYCLEYFPSQMLRTGNNFQFSYEFENVPFHSSYAHSQSLDRLMNPLIDQYLYYLSKTINGSGQNQQTLKFSVAGPSNMAVQGRNYIPGPSYRQQRVSTTVTQNNNSEFAWPGASSWALNGRNSLMNPGPAMASHKEGEDRFFPLSGSLIFGKQGTGRDNVDADKVMITNEEEIKTTNPVATESYGQVATNHQSAQAQAQTGWVQNQGILPGMVWQDRDVYLQGPIWAKIPHTDGNFHPSPLMGGFGMKHPPPQILIKNTPVPADPPTAFNKDKLDSFITQYSTGQVSVEIEWELQKENSKRWNPVIQYTSNYYKSNNVEFAVNTEGVYSEPRPIGTRYLTRNL

SEQ ID NO: 735 - protein, 736 aa, Artificial Sequence
  Description of Artificial Sequence: Synthetic polypeptide
MAADGYLPDWLEDNLSEGIREWWDLKPGAPKPKANQQKQDDGRGLVLPGYKYLGPFNGLDKGEPVNAADAAALEHDKAYDQQLKAGDNPYLRYNHADAEFQERLQEDTSFGGNLGRAVFQAKKRVLEPLGLVEEGAKTAPGKKRPVEQSPQEPDSSSGIGKTGQQPAKKRLNFGQTGDSESVPDPQPLGEPPATPAAVGPTTMASGGGAPMADNNEGVDGVGNASGNWHCDSTWLGDRVITTSTRTWALPTYNNHLYKQISSASTGASNDNHYFGYSTPWGYFDFNRFHCHFSPRDWQRLINNNWGFRPKRLNFKLFNIQVKEVTTNDGVTTIANNLTSTVQVFSDSEYQLPYVLGSAHQGCLPPFPADVFMIPQYGYLTLNNGSQAVGRSSFYCLEYFPSQMLRTGNNFTFSYTFEEVPFHSSYAHSQSLDRLMNPLIDQYLYYLNRTQNQSGSAQNKDLLFSRGSPAGMSVQPKNWLPGPCYRQQRVSKTKTDNNNSNFTWTGASKYNLNGRESIINPGTAMASHKDDEDKFFPMSGVMIFGKESAGASNTALDNVMITDEEEIKATNPVATERFGTVAVNFQSSSTDPATGDVHAMGALPGMVWQDRDVYLQGPIWAKIPHTDGHFHPSPLMGGFGLKNPPPQILIKNTPVPANPPAEFSATKLASFITQYSTGQVSVEIEWELQKENSKRWNPEVQYTSNYAKSANVDFTVDNNGLYTEPRPIGTRYLTRPL

SEQ ID NO: 736 - protein, 736 aa, Artificial Sequence
  Description of Artificial Sequence: Synthetic polypeptide
MAADGYLPDWLEDNLSEGIREWWDLKPGAPKPKANQQKQDDGRGLVLPGYKYLGPFNGLDKGEPVNAADAAALEHDKAYDQQLKAGDNPYLRYNHADAEFQERLQEDTSFGGNLGRAVFQAKKRVLEPLGLVEEGAKTAPGKRRPVEQSPQEPDSSSGIGKTGQQPAKKRLNFGQTGDSESVPDPQPLGEPPATPAAVGPTTMASGGGAPMADNNEGADGVGNASGNWHCDSTWLGDRVITTSTRTWALPTYNNHLYKQISSASTGASNDNHYFGYSTPWGYFDFNRFHCHFSPRDWQRLINNNWGFRPKRLNFKLFNIQVKEVTTNDGVTTIANNLTSTVQVFSDSEYQLPYVLGSAHQGCLPPFPADVFMIPQYGYLTLNNGSQAVGRSSFYCLEYFPSQMLRTGNNFTFSYTFEEVPFHSSYAHSQSLDRLMNPLIDQYLYYLNRTQNQSGSAQNKDLLFSRGSPAGMSVQPKNWLPGPCYRQQRVSKTKTDNNNSNFTWTGASKYNLNGRESIINPGTAMASHKDDEDKFFPMSGVMIFGKESAGASNTALDNVMITDEEEIKATNPVATERFGTVAVNFQSSSTDPATGDVHAMGALPGMVWQDRDVYLQGPIWAKIPHTDGHFHPSPLMGGFGLKNPPPQILIKNTPVPANPPAEFSATKFASFITQYSTGQVSVEIEWELQKENSKRWNPEVQYTSNYAKSANVDFTVDNNGLYTEPRPIGTRYLTRPL

SEQ ID NO: 737 - protein, 736 aa, Artificial Sequence
  Description of Artificial Sequence: Synthetic polypeptide
MAADGYLPDWLEDNLSEGIREWWDLKPGAPKPKANQQKQDDGRGLVLPGYKYLGPFNGLDKGEPVNAADAAALEHDKAYDQQLKAGDNPYPRYNHADAEFQERLQEDTSFGGNLGRAVFQAKKRVLEPLGLVGEGAKTAPGKKRPVEQSPQEPDSSSGIGKTGQQPAKKRLNFGQTGDSESVPDPQPLGEPPATPAAVGPTTMASGGGAPMADNNEGADGVGNASGNWHCDSTWLGDRVITTSTRTWALPTYNNHLYKQISSASTGASNDNHYFGYSTPWGYFDFNRFHCHFSPRDWQRLINNNWGFRPKRLNFKLFNIQVKEVTTNDGVTTIANNLTSTVQVFSDSEYQLPYVLGSAHQGCLPPFPADVFMIPQYGYLTLNNGSQAVGRSSFYCLEYFPSQMLRTGNNFTFSYTFEEVPFHSSYAHSQSLDRLMNPPIDQYLYYLNRTQNQSGSAQNKDLLFSRGSPAGMSVQPKNWLPGPCYRQQRVSKTKTDNNNSNFTWTGASKYNLNGRESIINPGTAMASHKDDEDKFFPMSGVMIFGKESAGASNTALDNVMITDEEEIKATNPVATERFGTVAVNFQSSSTDPATGDVHAMGALPGMVWQDRDVYLQGPIWAKIPHTDGHFHPSPLMGGFGLKNPPPQILIKNTPVPANPPAEFSATKFASFITQYSTGQVSVEIEWELQKENSKRWNPEVQYTSNYAKSANVDFTVDNNGLYTEPRPIGTRYLTRPL

SEQ ID NO: 738 - protein, 736 aa, Artificial Sequence
  Description of Artificial Sequence: Synthetic polypeptide
MAADGYLPDWLEDNLSEGIREWWDLKPGAPKPKANQQKQDDGRGLVLPGYKYLGPFNGLDKGEPVNAADAAALEHDKAYDQQLKAGDNPYLRYNHADAEFQERLQEDTSFGGNLGRAVFQAKKRVLEPLGLVEEGAKTAPGKKRPVEQSPQEPDSSSGIGKTGQQPAKKRLNFGQTGDSESVPDPRPLGEPPATPAAVGPTTMASGGGAPMADNNEGADGVGNASGNWHCDSTWLGDRVITTSTRTWALPTYNNHLYKQISSASTGASNDNHYFGYSTPWGYFDFNRFHCHFSPRDWQRLINNNWGFRPKRLNFKLFNIQVKEVTTNDGVTTIANNLTSTVQVFSDSEYQLPYVLGSAHQGCLPPFPADVFMIPQYGYLTLNNGSQAVGRSSFYCLEYFPSQMLRTGNNFTFSYTFEEVPFHSSYAHSQSLDRLMNPLIDQYLYYLNRTQNQSGSAQNKDLLFSRGPPAGMSVQPKNWLPGPCYRQQRVSKTKTDNNNSNFTWTGASKYNLNGRESIINPGTAMASHKDDEDKFFPMSGVMIFGKESAGASNTALDNVMITDEEEIKATNPVATERFGTVAVNFQSSSTDPATGDVHAMGALPGMVWQDRDVYLQGPIWAKIPHTDGHFHPSPLMGGFGLKNPPPQILIKNTPVPANPPAEFSATKFASFITQYSTGQVSVEIEWELQKENSKRWNPEVQYTSNYAKSANVDFTVDNNGLYTEPRPIGTRYLTRPL

SEQ ID NO: 739 - protein, 736 aa, Artificial Sequence
  Description of Artificial Sequence: Synthetic polypeptide
MAADGYLPDWLEDNLSEGIREWWDLKPGAPKPKANQQKQDDGRGLVLPGYKYLGPFNGLDKGEPVNAADAAALEHDKAYDQQLKAGDNPYLRYNHADAEFQERLQEDTSFGGNLGRAVFQAKKRVLEPLGLVEEGAKTAPGKKRPVEQSPQEPDSSSGIGKTGQQPAKKRLNFGQTGGSESVPDPQPLGEPPATPAAVGPTTMASGGGAPMADNNEGADGVGNASGNWHCDSTWLGDRVITTSTRTWALPTYNNHLYKQISSASTGASNDNHYFGYSTPWGYFDFNRFHCHFSPRDWQRLINNNWGFRPKRLNFKLFNIQVKEVTTNDGVTTIANNLTSTVQVFSDSEYQLPYVLGSAHQGCLPPFPADVFMIPQYGYLTLNNGSQAVGRSSFYCLEYFPSQMLRTGNNFTFSYTFEEVPFHSSYAHSQSLDRLMNPPIDQYLYYLNRTQNQSGSAQNKDLLFSRGSPAGMSVQPKNWLPGPCYRQQRVSKTKTDNNNSNFTWTGASKYNLNGRESIINPGTAMASHKDDEDKFFPMSGVMIFGKESAGASNTALDNVMITDEEEIKATNPVATERFGTVAVNFQSSSTDPATGDVHAMGALPGMVWQDRDVYLQGPIWAKIPHTDGHFHPSPLMGGFGLKNPPPQILIKNTPVPANPPAEFSATKFASFITQYSTGQVSVEIEWELQKENSKRWNPEVQYTSNYAKSANVDFTVDNNGLYTEPRPIGTRYLTRPL

SEQ ID NO: 740 - protein, 736 aa, Artificial Sequence
  Description of Artificial Sequence: Synthetic polypeptide
MAADGYLPDWLEDNLSEGIREWWDLKPGAPKPKANQQKQDDGRGLVLPGYKYLGPFNGLDKGEPVNAADAAALEHDKAYDQQLKAGDNPYLRYNHADAEFQERLQEDTSFGGNLGRAVFQAKKRVLEPLGLVEEGAKTAPGKKRPVEQSPQEPDSSSGIGKTGQQPAKKRLNFGQTGDSESVPDPQPLGEPPATPAAVGPTTMASGGGAPMADNNEGADGVGNASGNWHCDSTWLGDRVITTSTRTWALPTYNNHLYKQISSASTGASNDNHYFGYSTPWGYFDFNRFHCHFSPRDWQRLINNNWGFRPKRLNFKLFNIQVKEVTTNDGVTTIANNLTSTVQVFSDSEYQLPYVLGSAHQGCLPPFPADVFMIPQYGYLTLNNGSQAVGRSSFYCLEYFPSQMLRTGNNFTFSYTFEEVPFHSSYAHSQSLDRLMNPLIDQYLYYLNRTQNQSGSAQNKDLLFSRGSPAGMSVQPKNWLPGPCYRQQRVSKTKTDNNNSNFTWTGASKYNLNGRESIINPGTAVASHKDDEDKFFPMSGVMIFGKESAGASNTALDNVMITDEEEIKATNPVATERFGTVAVNFQSSSTDPATGDVHAMGALPGMVWQDRDVYLQGPIWAKIPHTDGHFHPSPLMGGFGLKNPPPQILIKNTPVPANPPAEFSATKFASFITQYSTGQVSVEIEWELQKENSKRWNPEVQYTSNYAKSANVDFTVDNNGLYTEPRPIGTRYLTRPL

SEQ ID NO: 741 - protein, 736 aa, Artificial Sequence
  Description of Artificial Sequence: Synthetic polypeptide
MAADGYLPDWLEDNLSEGIREWWDLKPGAPKPKANQQKQDDGRGLVLPGYKYLGPFNGLDKGEPVNAADAAALEHDKAYDQQLKAGDNPYLRYNHADAEFQERLQEDTSFGGNLGRAVFQAKKRVLEPLGLVEEGAKTAPGKKRPVEQSPQEPDSSSGIGKTGQQPAKKRLNFGQTGDSESVPDPQPLGEPPATPAAVGPTTMASGGGAPMADNNEGADGVGNASGNWHCDSTWLGDRVITTSTRTWALPTYNNHLYKQISSASTGASNDNHYFGYSTPWGYFDFNRFHCHFSPRDWQQLINNNWGFRPKRLNFKLFNIQVKEVTTNDGVTTIANNLTSTVQVFSDSEYQLPYVLGSAHQGCLPPFPADVFMIPQYGYLTLNNGSQAVGRSSFYCLEYFPSQMLRTGNNFTFSYTFEEVPFHSSYAHSQSLDRLMNPLIDQYLYYLNRTQNQSGSAQNKDLLFSRGSPAGMSVQPKNWLPGPCYRQQRVSKTKTDNNNSNFTWTGASKYNLNGRESIINPGTAMASHKDDEDKFFPMSGVMIFGKESAGASNTALDNVMITDEEEIKATNPVATERFGTVAVNFQSTSTDPATGDVHAMGALPGMVWQDRDVYLQGPIWAKIPHTDGHFHPSPLMGGFGLKNPPPQILIKNTPVPANPPAEFSATKFASFITQYSTGQVSVEIEWELQKENSKRWNPEVQYTSNYAKSADVDFTVDNNGLYTEPRPIGTRYLTRPL

SEQ ID NO: 742 - protein, 736 aa, Artificial Sequence
  Description of Artificial Sequence: Synthetic polypeptide
MAADGYLPDWLEDNLSEGIREWWDLKPGAPKPKANQQKQDDGRGLVLPGYKYLGPFNGLDKGEPVNAADAAALEHDKAYDQQLKAGDNPYLRYNHADAEFQERLQEDTSFGGNLGRAVFQAKKRVLEPLGLVEEGAKTAPGKKRPVEQSPQEPDSSSGIGKTGQQPAKKRLNFGQTGDSESVPDPQPLGEPPATPAAVGPTTMASGGGAPMADNNEGADGVGNASGNWHCDSTWLGDRVITTSTRTWALPTYNNHLYKQISSASTGASNDNHYFGYSTPWGYFDFNRFHCHFSPRDWQRLINNNWGFRPKRLNFKLFNIQVKEVTTNDGVTTIANNLTSTVQVFSDSEYQPPYVLGSAHQGCLPPFPADVFMIPQYGHLTLNNGSQAVGRSSFYCLEYFPSQMLRTGNNFTFSYTFEEVPFHSSYAHSQSLDRLTNPLIDQYLYYLNRTQNQSGSAQNKDLLFSRGSPAGMSVQPKNWLPGPCYRQQRVSKTKTDNNNSNFTWTGASKYNLNGRESIINPGTAMASHKDDEDKFFPMSGVMIFGKESAGASNTALDNVMITDEEEIKATNPVATERFGTVAVNFQSSSTDPATGDVHAMGALPGMVWQDRDVYLQGPIWAKIPHTDGHFHPSPLMGGFGLKNPPPQILIKNTPVPANPPAEFSATKFASFITQYSTGQVSVEIEWELQKENSKRWNPEVQYTSNYAKSANVDFTVDNNGLYTEPRPIGTRYLTRPL

SEQ ID NO: 743 - protein, 736 aa, Artificial Sequence
  Description of Artificial Sequence: Synthetic polypeptide
MAADGYLPDWLEDNLSEGIREWWDLKPGAPKPKANQQEQDDGRGLVLPGYKYLGPFNGLDKGEPVNAADAAALEHDKAYDQQLKAGDNPYLRYNHADAEFQERLQEDTSFGGNLGRAVFQAKKRVLEPLGLVEEGAKTAPGKKRPVEQSPQEPDSSSGIGKTGQQPAKKRLNFGQTGDSESVPDPQPLGEPPATPAAVGPTTMASGGGAPMADNNEGADGVGNASGNWHCDSTWLGDRVITTSTRTWALPTYNNHLYKQISSASTGASNDNHYFGYSTPWGYFDFNRFHCHFSPRDWQRLINNNWGFRPKRLNFKLFNIQVKEVTTNDGVTTIANNLTSTVQVFSDSEYQLPYVLGSAHQGCLPPFPADVFMIPQYGYLTLNNGSQAVGRSSFYCLEYFPSQMLRTGNNFTFSYTFEEVPFHSSYAHSQSLDRLMNPLIDQYLYYLNRTQNQSGSAQNKDLLFSRGSPAGMSVQPKNWLPGPCYRQQRVSKTKTDNNNSNFTWTGASKYNLNGRESIINPGTAMASHKDDEDKFFPMSGVMIFGKESAGASNTALDNVMITDEEEIKATNPVATERFGTVAVNFQSSSTDPATGDVHATGTLPGMVWQDRDVYLQGPIWAKIPHTDGHFHPSPLMGGFGLKNPPPQILIKTTPVPANPPAEFSATKFASFITQYSTGQVSVEIEWELQKENSKRWNPEVQYTSNYAKSANVDFTVDDNGLYTEPRPIGTRYLTRPL

SEQ ID NO: 744 - protein, 736 aa, Artificial Sequence
  Description of Artificial Sequence: Synthetic polypeptide
MAADGYLPDWLEDNLSEGIREWWDLKPGAPKPKANQQKQDDGRGLVLPGYKYLGPFNGLDKGEPVNAADAAALEHDKAYDQQLKAGDNPYLRYNHADAEFQERLQEDTSFGGNLGRAVFQAKKRVLEPLGLVEEGAKTAPGKKRPVEQSLQEPDSSSGIGKTGQQPAKKRLNFGQTGDSESVPDPQPLGEPPATPAAVGPTTMASGGGAPMADNNEGADGVGNASGNWHCDSTWLGDRVITTSTRTWALPTYNNHLYKQISSASTGASNDNHYFGYSTPWGYFDFNRFHCHFSPRDWQRLINNNWGFRPKRLNFKLFNIQVKEVTTNDGVTTIANNLTSTVQVFSDSEYQLPYVLGSAHQGCLPPFPADVFMIPQYGYLTLNNGSQAVGRSSFYCLEYFPSQMLRTGNNFTFSYTFEEVPFHSSYAHSQSLDRLMNPLIDQYLYYLNRTQNQSGSAQNKDLLFSRGSPAGMSVQPKNWLPGPCYRQQRVSKTKTDNDNSNFTWTGASKYNLNGRESIINPGTAMASHKDDEDKFFPMSGVMIFGKESAGASNTALDNVMITDEEEIKATNPVATERFGTVAVNFQSSSTDPATGDVHAMGALPGMVWQDRDVYLQGPIWAKIPHTDGHFHPSPLMGGFGLKNPPPQILIKNTPVPANPPAEFSATKFASFITQYSTGQVSVEIEWELQKENSKRWNPEVQYTSNYAKSANVDFTVDNNGLYTEPRPIGTRYLTRPL

SEQ ID NO: 745 - protein, 736 aa, Artificial Sequence
  Description of Artificial Sequence: Synthetic polypeptide
MAADGYLPDWLEDNLSEGIREWWDLKPGAPKPKANQQKQDDGRGLVLPGYKYLGPFNGLDKGEPVNAADAAALEHDKAYDQQLKAGDNPYLRYNHADAEFQERLQEDTSFGGNLGRAVFQAKKRVLEPLGLVEEGAKTAPGKKRPVEQSPQEPDSSSGIGKTGQQPAKKRLNFGQTGDSESVPDPQPLGEPPATPAAVGPTTMASGGGAPMADNNEGADGVGNASGNWHCDSTWLGDRVITTSTRTWALPTYNNHLYKQISSASTGASNDNHYFGYSTPWGYFDFNRFHCHFSPRDWQRLINNNWGFRPKRLNFKLFNIQVKEVTTNDGVTTIANNLTSTVQVFSDSEYQLPYVLGSAHQGCLPPFPADVFMIPQYGYLTLNNGSQAVGRSSFYCLEYFPSQMLRTGNNFTFSYTFEEAPFHSSYAHSQSLDRLMNPLIDQYLYYLNRTQNQSGSAQNKDLLFSRGSPAGMSVQPKNWLPGPCYRQQRVSKTKTDNNNSNFTWTGASKYNLNGRESIINPGTAMASHKDDEDKFFPMSGVMIFGKESAGASNTALDNVMITDEEEIKATNPVATERFGTVAVNFQSSSTDPATGDVHAMGALPGMVWQDRDVYLQGPIWAKIPHTDGHFHPSPLMGGFGLKNPPPQILIKNTPVPANPPAEFSATKFASFITQYSTGQVSVEIEWELQKENSKRWNPEVQYTSNYAKSANVDFTVDNNGLYTEPRPVGTRYLTRPL

SEQ ID NO: 746 - protein, 736 aa, Artificial Sequence
  Description of Artificial Sequence: Synthetic polypeptide
MAADGYLPDWLEDNLSEGIREWWDLKPGAPKPKANQQKQDDGRGLVLPGYKYLGPFNGLDKGEPVNAADAAALEHDKAYDQQLKAGDNPYLRYNHADAEFQERLQENTSFGGNLGRAVFQAKKRVLEPLGLVEEGAKTAPGKKRPVEQSPQEPDSSSGIGKTGQQPAKKRLNFGQTGDSESVPDPQPLGEPPATPAAVGPTTMASGGGAPMADNNEGADGVGNASGNWHCDSTWLGDRVITTSTRTWALPTYNNHLYKQISSASTGASNDNHYFGYSTPWGYFDFNRFHCHFPPRDWQRLINNNWGFRPKRLNFKLFNIQVKEVTSNDGVTTIANNLTSTVQVFSDSEYQLPYVLGSAHQGCLPPFPADVFMIPQYGYLTLNNGSQAVGRSSFYCLEYFPSQMLRTGNNFTFSYTFEEVPFHSSYAHSQSLDRLMNPLIDQYLYYLNRTQNQSGSAQNKDLLFSRGSPAGMSVQPKNWLPGPCYRQQRVSKTKTDNNNSNFTWTGASKYNLNGRESIINPGTAMASHKDDEDKFFPMSGVMIFGKESAGASNTALDNVMITDEEEIKATNPVATERFGTVAVNFQSSSTDPATGDVHAMGALPGMVWQDRDVYLQGPIWAKIPHTDGHFHPSPLMGGFGLKNPPPQILIKNTPVPANPPAEFSATKFASFITQYSTGQVSVEIEWELQKENSKRWNPEVQYTSNYAKSANVDFTVDNNGLYTEPRPIGTRYLTRPL

SEQ ID NO: 747 - protein, 736 aa, Artificial Sequence
  Description of Artificial Sequence: Synthetic polypeptide
MAADGYLPDWLEDNLSEGIREWWDLKPGAPKPKANQQKQDDGRGLVLPGYKYLGPFNGLDKGEPVNAADAAALEHDKAYDQQLKAGDNPYLRYNHADAEFQERLQEDTSFGGNLGRAVFQAKKRVLEPLGLVEEGAKTAPGKKRPVEQSPQEPDSSSGIGKTGQQPAKKRLNFGQTGDSESVPDPQPLGEPPATPAAVGPTTMASGGGAPMADNNEGADGVGNASGNWHCDSTWLGDRVITTSTRTWALPTYNNHLYKQISSASTGASNDNHYFGYSTPWGYFDFNRFHCHFSPRDWQRLINNNWGFRPKRLNFKLFNIQVKEVTTNDGVTTIANNLTSTVQVFSDSEYQLPYVLGSAHQGCLPPFPADVFMIPQYGYLTLNNGSQAVGRSSFYCLEYFPSQMLRTGNNFTFSYTFEEVPFHSSYAHSQSLDRLMNPLIDQYLYYLNRTQNQSGSAQNKDLLFSRGSPAGTSVQPKNWLPGPCYRQQRVSKTKTDNNNSNFTWTGASKYNLNGRESIINPGTAMASHKDDEDKFFPMSGVMIFGKESAGASNTALDNVMITDEEEIKATNPVATERFGTVAVNFQSSSTDPATGDVHAMGALPGMVWQDRDVYLQGPIWAKIPHTDGHFHPSPLMGGFGLKNPPPQILIKNTPVPANPPAEFSATKFASFITQYSTGQVSVEIEWELQKENSKRWNPEVQYTSNYAKSANVDFTVDNNGLYTGPRPIGTRYLTRPL

SEQ ID NO: 748 - protein, 736 aa, Artificial Sequence
  Description of Artificial Sequence: Synthetic polypeptide
MAADGYLPDWLEDNLSEGIREWWDLKPGAPKPKANQQKQDDGRGLVLPGYKYLGPFNGLDKGEPVNAADAAALEHDKAYDQQLKAGDNPYLRYNHADAEFQERLQEDTSFGGNLGRAVFQAKKRVLEPLGLVEEGAKTAPGKKRPVEQSPQEPDSSSGIGKTGQQPAKKRLNFGQTGDSESVPDPQPLGEPPATPAAVGPTTMASGGGAPMADNNEGADGVGNAPGNWHCDSTWLGDRVITTSTRTWALPTYNNHLYKQISSASTGASNDNHYFGYSTPWGYFDFNRFHCHFSPRDWQRLINNNWGFRPKRLNFKLFNIQVKEVTTNDGVTTIANNLTSTVQVFSDSEYQLPYVLGSAHQGCLPPFPADVFMIPQYGYLTLNNGSQAVGRSSFYCLEYFPSQMLRTGNNFTFSYTFEEVPFHSSYAHSQSLDRLMNPLIDQYLYYLNRTQNQSGSAQNKDLLFSRGSPAGMSVQPKNWLPGPCYRQQRVSKTKTDNNNSNFTWTGASKYNLNGRESIINPGTAMASHKDDEDKFFPMSGVMIFGKESAGASNTALDNVMITGEEEIKATNPVATERFGTVAVNFQSSSTDPATGDVHAMGALPGMVWQDRDVYLQGPIWAKIPHTDGHFHPSPLMGGFGLKNPPPQILIKNTPVPANPPAEFSATKFASFITQYSTGQVSVEIEWELQKENSKRWNPEVQYTSNYAKSANVDFTVDNNGLYTEPRPIGTRYLTRPL

SEQ ID NO: 749 - protein, 736 aa, Artificial Sequence
  Description of Artificial Sequence: Synthetic polypeptide
MAADGYLPDWLEDNLSEGIREWWDLKPGAPKPKANQQKQDDGRGLVLPGYKYLGPFNRLDKGEPVNAADAAALEHDKAYDQQLKAGDNPYLRYNHADAEFQERLQEDTSFGGNLGRAVFQAKKRVLEPLGLVEEGAKTAPGRKRPVEQSPQEPDSSSGIGKTGQQPAKKRLNFGQTGDSESVPDPQPLGEPPATPAAVGPTTMASGGGAPMADNNEGADGVGNASGNWHCDSTWLGDRVITTSTRTWALPTYNNHLYKQISSASTGASNDNHYFGYSTPWGYFDFNRFHCHFSPRDWQRLINNNWGFRPKRLNFKLFNIQVKEVTTNDGVTTIANNLTSTVQVFSDSEYQLPYVLGSAHQGCLPPFPADVFMIPQYGYLTLNNGGQAVGRSSFYCLEYFPSQMLRTGNNFTFSYTFEEVPFHSSYAHSQSLDRLMNPLIDQYLYYLNRTQNQSGSAQNKDLLFSRGSPAGMSVQPKNWLPGPCYRQQRVSKTKTDNNNSNFTWTGASKYSLNGRESIINPGTAMASHKDDEDKFFPMGGVMIFGKESAGASNTALDNAMITDEEEIKATNPVATERFGTVAVNFQSSSTDPATGDVHAMGALPGMVWQDRDVYLQGPIWAKIPHTDGHFHPSPLMGGFGLKNPPPQILIKNTPVPANPPAEFSATKFASFITQYSTGQVSVEIEWELQKENSKRWNPEVQYTSNYAKSANVDFTVDNNGLYTEPRPIGTRYLTRPL

SEQ ID NO: 750 - protein, 736 aa, Artificial Sequence
  Description of Artificial Sequence: Synthetic polypeptide
MAADGYLPDWLEDNLSEGIREWWDLKPGAPKPKANQQKQDDGRGLVLPGYKYLGPFNGLDKGEPVNAADAAALEHDKAYDQQLKAGDNPYLRYNHADAEFQERLQEDTSFGGNLGRAVFQAKKRVLEPLGLVEEGAKTAPGKKRPVEQSPQEPDSSSGIGKTGQQPAKKRLNFGQTGDSESVPDPQPLGEPPATPAAVGPTTMASGGGAPMADNNEGADGVGNASGNWHCDSTWLGGRVITTSTRTWALPTYNNHLYKQISSASTGASNDNHYFGYSTPWGYFDFNRFHCHFSPRDWQRLINNNWGFRPKRLNFKLFNIQVKEVTTNDGVTTIANNLTSTVQVFSDSEYQLPYVLGSAHQGCLPPFPADVFMIPQYGYLTLNNGSQAVGRSSFYCLEYFPSQMLRTGNNSTFSYTFEEVPFHSSYAHSQSLDRLMNPLIDQYLYYLNRTQNQSGSAQNKDLLFSRGSPAGMSVQPKNWLPGPCYRQQRVSKTKTDNNNSNFTWTGASKYNLNGRESIINPGTAMASHKDDEDKFFPMSGVMIFGKESAGASNTALDNVMITDEEEIKATNPVATERFGTVAVNFQSSSTDPATGDVHAMGTLPGMVWQDRDVYLQGPIWAKIPHTDGHFHPSPLMGGFGLKNPPPQILIKNTPVPANPPAEFSATKFASFITQYSTGQVSVEIEWELQKENSKRWNPEVQYTSNYAKSANVDFTVDNNGLYTEPRPIGTRYLTRPL

SEQ ID NO: 751 - protein, 736 aa, Artificial Sequence
  Description of Artificial Sequence: Synthetic polypeptide
MAADGYLPDWLEDNLSEGIREWWDLKPGAPKPKANQQKQDDGRGLVLPGYKYLGPFNGLDKGEPVSAADAAALEHDKAYDQQLKAGDNPYLRYNHADAEFQERLQEDTSFGGNLGRAVFQAKKRVLEPLGLVEEGAKTAPGKKRPVEQSPQEPDSSSGIGKTGQQPAKERLNFGQTGDSESVPDPQPLGEPPATPAAVGPTTMASGGGAPMADNNEGADGVGNASGNWHCDSTWLGDRVITTSTRTWALPTYNNHLYKQISSASTGASNDNHYFGYSTPWGYFDFNRFHCHFSPRDWQRLINNNWGFRPKRLNFKLFNIQVKEVTTNDGVTTIANNLTSTVQVFSDSEYQLPYVLGSAHQGCLPPFPADVFMIPQYGYLTLNNGSQAVGRSSFYCLEYFPSQMLRTGNNFTFSYTFEEVPFHSSYAHSQSLDRLMNPLIDQYLYYLNRTQNQSGSAQNKDLLFSRGSPAGMSVQPKNWLPGPCYRQQRVSKTKTDNNNSNFTWTGASKYNLNGRESIINPGTAMASHKDDEDKFFPMSGVMIFGKESAGASNTALDNVMITDEEEIKATNPVATERFGTVAVNFQSSSTDPATGDVHAMGALPGMVWQDRDVYLQGPIWAKIPHTDGHFHPSPLMGGFGLKNPPPQILIKNTPVPANPPAEFSATKFASFITQYSTGQVSVEIEWELQKENSKRWNPEVQYTSNYAKSANVDFTVDNNGLYTEPRPIGTRYLTRPL

SEQ ID NO: 752 - protein, 736 aa, Artificial Sequence
  Description of Artificial Sequence: Synthetic polypeptide
MAADGYLPDWLEDNLSEGIREWWDLKPGAPKPKANQQKQDDGRGLVLPGYKYLGPFNGLDKGEPVNAADAAALEHDKAYDQQLKAGDNPYLRYNHADAEFQERLQEDTSFGGNLGRAVFQAKKRVLEPLGLVEEGAKTAPGKKRPVEQSPQEPDSSSGIGKTGQQPAKKRLNFGQTGDSESVPDPQPLGEPPATPAAVGPTTMASGGGAPMADNNEGADGVGNASGNWHCDSTWLGDRVITTSTRTWALPTYNNHLYKQISSASTGASNDNHYFGYSTPWGYFDFNRFHCHFSPRDWQRLINNNWGFRPKRLNFKLFNIQVKEVTTNDGVTTIANNLTSTVQVFSDSEYQLPYVLGSAHQGCLPPFPADVFMIPQYGYLTLNNGSQAVGRSSFYCLEYFPSQMLRTGNNFTFSYTFEEVPFHSSYAHSQSLDRLMNPLIDQYLYYLNRTQNQSGSAQNKDLLFSRGSPAGMSVQPKNWLPGPCYRQQRVSKTKTDNNNSNFTWTGASKYNLNGRESIINPGTAMASHKDDEDKFFPMSGVMIFGKESAGASNTALDNVMITDEGEIKATNPVATERFGTVAVNFQSSSTDPATGDVHAMGALPGMVWQDRDVYLQGPIWAKIPHTDGHFHPSPLMGGFGLKNPPPQILIKNTPVPANPPAEFSATKFASFITQYSTGQVSVEIEWELQKENSKRWNPEVQYTSNYAKSANVDFTVDNNGLYTEPRPIGTRYLTRPL

SEQ ID NO: 753 - protein, 736 aa, Artificial Sequence
  Description of Artificial Sequence: Synthetic polypeptide
MAADGYLPDWLEDNLSEGIREWWDLKPGAPKPKANQQKQDDGRGLVLPGYKYLGPFNGLDKGEPVNAADAAALEHDKAYDQQLKAGDNPYLRYNHADAEFQERLQEDTSFGGNLGRAVFQAKKRVLEPFGLVEEGAKTAPGKKRPVEQSPQEPDSSSGIGKTGQQPAKKRLNFGQTGDSESVPDPQPLGEPPATPAAVGPTTMASGGGAPMADNNEGADGVGNASGNWHCDSTWLGDRVITTSTRTWALPTYNNHLYKQISSASTGASNDNHYFGYSTPWGYFDFNRFHCHFSPRDWQRLINNNWGFRPKRLNFKLFNIQVKEVTTNDGVTTIANNLTSTVQVFSDSEYQLPYVLGSAHQGCLPPFPADVFMIPQYGYLTLNNGSQAVGRSSFYCPEYFPSQMLRTGNNFTFSYTFEEVPFHSSYAHSQSLDRLMNPLIDQYLYYLNRTQNQSGSAQNKDLLFSRGSPAGMSVQPKNWLPGPCYRQQRVSKTKTDNNNSNFTWTGASKYNLNGRESIINPGTAMASHKDDKDKFFPMSGVMIFGKESAGASNTALDNVMITDEEEIKATNPVATERFGTVAVNFQSSNTDPATGDVHVMGALPGMVWQDRDVYLQGPIWAKIPHTDGHFHPSPLMGGFGLKHPPPQILIKNTPVPANPPAEFSATKFASFITQYSTGQVSVEIEWELQKENSKRWNPEVQYTSNYAKSANVDFTVDNNGLYTEPRPIGTRYLTRPL

SEQ ID NO: 754 - protein, 736 aa, Artificial Sequence
  Description of Artificial Sequence: Synthetic polypeptide
MAADGYLPDWLEDNLSEGIREWWDLKPGAPKPKANQQKQDDGRGLVLPGYKYLGPFNGLDKGEPVNAADAAALEHDKAYDQQLKAGDNPYLRYNHADAEFQERLQEDTSFGGNLGRAVFQAKKRVLEPFGLVEEGAKTAPGKKRPVEQSPQEPDSSSGIGKTGQQPAKKRLNFGQTGDSESVPDPQPLGEPPATPAAVGPTTMASGGGAPMADNNEGADGVGNASGNWHCDSTWLGDRVITTSTRTWALPTYNNHLYKQISSASTGASNDNHYFGYSTPWGYFDFNRFHCHFSPRDWQRLINNNWGFRPKRLNFKLFNIQVKEVTTNDGVTTIANNLTSTVQVFSDSEYQLPYVLGSAHQGCLPPFPADVFMIPQYGYLTLNNGSQAVGRSSFYCLEYFPSQMLRTGNNFTFSYTFEEVPFHSSYAHSQSLDRLMNPLIDQYLYYLNRTQNQSGSAQNKDLLFSRGSPAGMSVQPKNWLPGPCYRQQRVSKTKTDNNNSNFTWTGASKYNLNGRESIINPGTAMASHKDDKDKFFPMSGVMIFGKESAGASNTALDNVMITDEEEIKATNPVATERFGTVAVNFQSSDTDPATGDVHVMGALPGMVWQDRDVYLQGPIWAKIPHTDGHFHPSPLMGGFGLKHPPPQILIKNTPVPANPPAEFSATKFASFITQYSTGQVSVEIEWELQKENSKRWNPEVQYTSNYAKSANVDFTVDNNGLYTEPRPIGTRYLTRPL

SEQ ID NO: 755 - protein, 736 aa, Artificial Sequence
  Description of Artificial Sequence: Synthetic polypeptide
MAADGYLPDWLEDNLSEGIREWWDLKPGAPKPKANQQKQGDGRGLVLPGYKYLGPFNGLDKGEPVNAADAAALEHDKAYDQQLKAGDNPYLRYNHADAEFQERLQEDTSFGGNLGRAVFQAKKRVLEPFGLVEEGAKTAPGKKRPVEQSPQEPDSSSGIGKTGQQPAKKRLNFGQTGDSESVPDPQPLGEPPATPAAVGPTTMASGGGAPMADNNEGADGVGNASGNWHCDSTWLGDRVITTNTRTWALPTYNNHLYKQISSASTGASNDNHYFGYSTPWGYFDFNRFHCHFSPRDWQRLINNNWGFRPKRLNFKLFNIQVKEVTTNDGVTTIANNLTSTVQVFSDSEYQLPYVLGSAHQGCLPPFPADVFMIPQYGYLTLNNGSQAVGRSSFYCLEYFPSQMLRTGNNFTFSYTFEEVPFHSSYGHSQSLDRLMNLLIDQYLYYLNRTQNQSGSAQNKDLLFSRGSPAGMFVQPKNWLPGPCYRQQRVSKTKTDNNNSNFTWTGASKYNLNGRESIINPGTAMASHKDDEDKFFPMSGVMIFGKESAGASNTALDNVMITDEEEIKATNPVATERFGTVAVNFQSSSTDPATGDVHVMGALPGMVWQDRDVYLQGPIWAKIPHTDGHFHPSPLMGGFGLKHPPPQILIKNTPVPANPPAEFSATKFASFITQYSTGQVSVEIEWELQKENSKRWNPEVQYTSNYAKSANVDFTVDNNGLYTEPRPIGTRYLTRPL

SEQ ID NO: 756 - protein, 736 aa, Artificial Sequence
  Description of Artificial Sequence: Synthetic polypeptide
MAADGYLPDWLEDNLSEGIREWWDLKPGAPKPKANQQKQDDGRGLVLPGYKYLGPFNGLDKGEPVNAADAAALEHDKAYDQQLKAGDNPYLRYNHADAEFQERLQEDTSFGGNLGRAVFQAKKRVLEPFGLVEEGAKTAPGKKRPVEQSPQEPDSSSGIGKTGQQPAKKRLNFGQTGDSESVPDPQPLGEPPATPAAVGPTTMASGGGAPMADNNEGADGVGNASGNWHCDSTWLGDRVITTNTRTWALPTYNNHLYKQISSASTGASNDNHYFGYSTPWGYFDFNRFHCHFSPRDWQRLINNNWGFRPKRLNFKLFNIQVKEVTTNDGVTTIANNLTSTVQVFSDSEYQLPYVLGSAHQGCLPPFPADVFMIPQYGYLMLNNGSQAVGRSSFYCLEYFPSQMLRTGNNFTFSYTFEEVPFHSSYAHSQSLDRLMNPLIDQYLYYLNRTQNQSGSAQNKDLLFSRGSPAGMSVQPKNWLPGPCYRQQRVSKTKTDNNNSNFTWTGASKYNLNGRESIINPGTAMASHKDDEDKFFPMSGVMIFGKESAGASNTALDNVMITDEEEIKATNPAATERFGTVAVNFQSSSTDPATGDVHVMGALPGMVWQDRDVYLQGPIWAKIPHTDGHFHPSPLMGGFGLKHPPPQILIKNTPVPANPPAEFSATKFASFITQYSTGQVSVEIEWELQKENSKRWNPEVQYTSNYAKSANVDFTVDNNGLYTEPRPIGTRYLTRPL

SEQ ID NO: 757 - protein, 736 aa, Artificial Sequence
  Description of Artificial Sequence: Synthetic polypeptide
MAADGYLPDWLEDNLSEGIREWWDLKPGAPKPKANQQKQDDGRGLVLPGYKYLGPFNGLDKGEPVNAADAAALEHDKAYDQQLKAGDNPYLRYNHADAEFQERLQEDTSFGGNLGRAVFQAKKRVLEPFGLVEEGAKTAPGKKRPVEQSPQEPDSSSGIGKTGQQPAKKRLNFGQTGDSESVPDPQPLGEPPATPAAVGPTTMASGGGAPMADNNEGADGVGNASGNWHCDSTWLGDRVITTSTRTWALPTYNNHLYKQISSASTGASNDNHYFGYSTPWGYFDFNRFHCHFSPRDWQRLINNNWGFRPKRLNFKLFNIQVKEVTTNDGVTTIANNLTSTVQVFSDSEYQLPYVLGSAHQGCLPPFPADVFMIPQYGYLTLNNGSQAVGRSSFYCLEYFPSQMLRTGNNFTFSYTFEEVPFHSSYAHSQSLDRLMNPLIDQYLYYLNRTQNQSGSAQNKDLLFSRGSPAGMSVQPKNWLPGPCYRQQRVSKTKTDNNNSNFTWTGASKYNLNGRESIINPGTAMASHKDDEDKFFPMSGVMIFGKESAGASNTALDNVMITDEEEIKATNPVATERFGTVAVNFQSSSTDPATGDVHVMGALPGMVWQDRDVYLQGPIWAKIPHTDGHFHPSPLMGGFGLKHPPPQILIKNTPVPANPPAEFSATKFASFITQYSTGQVSVEIEWELQKENSKRWNPEVQYTSNYAKSANVDFTVDNNGLYTEPRPIGTRYLTRPL

SEQ ID NO: 758 - protein, 736 aa, Artificial Sequence
  Description of Artificial Sequence: Synthetic polypeptide
  MOD_RES (102)..(102): Xaa = any amino acid
MAADGYLPDWLEDNLSEGIREWWDLKPGAPKPKANQQKQDDGRGLVLPGYKYLGPFNGLDKGEPVNAADAAALEHDKAYDQQLKAGDNPYLRYNHADAEFQXRLQEDTSFGGNLGRAVFQAKKRVLEPFGLVEEGAKTAPGKKRPVEQSPQEPDSSSGIGKTGQQPAKKRLNFGQTGDSESVPDPQPLGEPPATPAAVGPTTMASGGGAPMADNNEGADGVGNASGNWHCDSTWLGGRVITTSTRTWALPTYNNHLYKQISSASTGASNDNHYFGHSTPWGYFDFNRFHCHFSPRDWQRLINNNWGFRPKRLNFKLFNIQVKEVTTNDGVTTIANNLTSTVQVFSDSEYQLPYVLGSAHQGCLPPSPADVFMIPQYGYLTLNNGSQAVGRSSFYCLEYFPSQMLRTGNNFTFSYTFEEVPFHSSYAHSQSLDRLMNPLIDQYLYYLNRTQNQSGSAQNKDLLFSRGSPAGMSVQPKNWLPGPCYRQQRVSKTKTDNNNSNFTWTGASKYNLNGRESIINPGTAMASHKDDKDKFFPMSGVMIFGKESAGASNTALDNVMITDEEEIKATNPVATERFGTVAVNFQSSNTDPATGDVHVMGALPGMVWQDRDVYLQGPIWAKIPHTDGHFHPSPLMGGFGLKHPPPQILIKNTPVPANPPAEFSATKFASFITQYSTGQVSVEIEWELQKENSKRWNPEVQYTSNYAKSANVDFTVDNNGLYTEPRPIGTRYLTRPL

SEQ ID NO: 759 - protein, 736 aa, Artificial Sequence
  Description of Artificial Sequence: Synthetic polypeptide
MAADGYFPDWLEDNLSEGIREWWDLKPGAPKPKANQQKQDDGRGLVLPGYKYLGPFNGLDKGEPVNAADAAALEHDKAYDQQLKAGDNPYLRYNHADAEFQERLQEDTSFGGNLGRAVFQAKKRVLEPFGLVEEGAKTAPGKKRPVEQSPQEPDSSSGIGRTGQQPAKKRLNFGQTGDSESVPDPQPLGEPPATPAAVGPTTMASGGGAPMADNNEGADGVGNASGNWHCDSTWLGDRVITTSTRTWALPTYNNHLYKQISSASTGASNDNHYFGYSTPWGYFDFNRFHCHFSPRDWQRLINNNWGFRPKRLNFKLFNIQVKEVTTNDGVTTIANNLTSTVQVFSDSEYQLPYVLGSAHQGCLPPFPADVFMIPQYGYLTLNNGSQAVGRSSFYCLEYFPSQMLRTGNNFTFSYTFEEVPFHSSYAHSQSLDRLMNPLIDQYLYYLNRTQNQSGSAQNKDLLFSRGSPAGMSVQPKNWLPGPCYRQQRVSKTKTDNNNSNFTWTGASKYNLNGRESIINPGTAMASHKDDEDKFFPMSGVMIFGKESAGASNTALDNVMITDEEEIKATNPVATERFGTVAVNFQSSSPDPATGDVHVMGALPGMVWQDRDVYLQGPIWAKIPHTDGHFHPSPLMGGFGLKHPPPQILIKNTPVPANPPAEFSATKFASFITQYSTGQVSVEIEWELQKENSKRWNPEVQYTSNYAKSANVDFTVDNNGLYSEPRPIGTRYLTRPL

SEQ ID NO: 760 - protein, 736 aa, Artificial Sequence
  Description of Artificial Sequence: Synthetic polypeptide
MAADGYLPDWLEDNLSEGIREWWDLKPGAPKPKANQQKQDDGRGLVLPGYKYLGPFNGLDKGEPVNAADAAALEHDKAYDQQLKAGDNPYLRYNHADAEFQERLQEDTSFGGNLGRAVFQAKKRVLEPFGLVEEGAKTAPGKKRPVEQSPQEPDSSSGIGKTGQQPAKKRLNFGQTGDSESVPDPQPLGEPPATPAAVGPTTMASGGGAPMADNNEGADGVGNASGNWHCDSTWLGDRVITTSTRTWALPTYNNHLYKQTSSASTGASNDNHYFGYSTPWGYFDFNRFHCHFSPRDWQRLINNNWGFRPKRLNFKLFNIQVKEVTTNDGVTTIANNLTSTVQVFSDSEYQLPYVLGSAHQGCLPPFPADVFMIPQYGYLTLNNGSQAVGRSSFYCLEYFPSQMLRTGNNFTFSYTFEEVPFHSSYAHSQSLDRLMNPLIDQYLYYLNRTQNQSGSAQNKDLLFSRGSPAGMSVQPKNWLPGPCYRQQRVSKTKTDYNNSNFTWTGASKYNLNGRESIINPGTAMASHKDDEDKFFPMSGVMIFGKESAGASNTALDNVMITDEEEIKATNPVATERFGTVAVNFQSSSTDPATGDVHVMGALPGMVWQDRDVYLQGPIWAKIPHTDGHFHPSPLMGGFGLKHPPPQILIKNTPVPANPPAEFSATKFASFITQYSTGQVSVEIEWELQKENSKRWNPEVQYTSNYAKSANVDFTVDNNGLYTEPRPIGTRYLTRPL

SEQ ID NO: 761 - protein, 736 aa, Artificial Sequence
  Description of Artificial Sequence: Synthetic polypeptide
MAADGYPPDWLEDNLSEGIREWWDLKPGVPKPKANQQKQDDGRGLVLPGYKYLGPFNGLDKGEPVNAADAAALEHDKAYDQQLKAGDNPYLRYNHADAEFQERLQEDTSFGGNLGRAVFQAKKRVLEPFGLVEEGAKTAPGKKRPVEQSPQEPDSSSGIGKTGQQPAKKRLNFGQTGDSESVPDPQPLGEPPATPAAVGPTTMASGGGAPMADNNEGADGVGNASGNWHCDSTWLGDRVITTSTRTWALPTYNNHLYKQISSASTGASNDNHYFGYSTPWGYFDFNRFHCHFSPRDWQRLINNNWGFRPKRLNFKLFNIQVKEVTTNDGVTTIANNLTSTVQVFSDSEYQLPYVLGSAHQGCLPPFPADVFMIPQYGYLTLNNGSQAVGRSSFYCLEYFPSQMLRTGNNFTFSYTFEEVPFHSSYAHSQSLDRLMNPLIDQYLYYLNRTQNQSGSAQNKDLLFSRGSPAGMSVQPKNWLPGPCYRQQRVSKTKTDNNNSNFTWTGASKYNLNGRESIINPGTAMASHKDDEDKFFPMSGVMIFGKESAGASNTALDNVMITDEEEIKATNPVATERFGTVAVNFQSSSTDPATGDVHVMGALPGMVWQDRDVYLQGPIWAKIPHTDGHFHPSPLMGGFGLKHPPPQILIKNTPVPANPPAEFSATKFASFITQYSTGQVSVEIEWELQKENSKRWNPEVQYTSNYAKSANVDFTVDNNGLYTEPRPIGTRYLTRPL

SEQ ID NO: 762 - protein, 732 aa, Artificial Sequence
  Description of Artificial Sequence: Synthetic polypeptide
MAADGYLPDWLEDNLSEGIREWWDLKPGAPKPKANQQKQDDGRGLVLPGYKYLGPFNGLDKGEPVNAADAAALEHDKAYDQQLKAGDNPYLRYNHADAEFQERLQEDTSFGGNLGRAVFQAKKRVLEPFGLVEEGAKTAPGKKRPVEQSPQEPDSSSGIGKTGQQPAKKRLNFGQTGDSESVPDPQPLGEPPATPAAVGPTTMASGGGAPMADNNEGADGVGNASGNWHCDSTWLGDRVITTSTRTWALPTYNNHLYKQISSASTGASNDNHYFGYSTPWGYFDFNRFHCHFSPRDWQRLINNNWGFRPKRLNFKLFNIQVKEVTTNDGVTTIANNLTSTVQAFSDSEYQLPYVLGSAHQGCLPPFPADVFMIPQYGYLTLNNGSQAVGRSSFYCLEYFPSQMLRTGNNFTFSYTFEEVPFHSSYAHSQSLDRLMNPLIDPYLYYLNRTQNQSGSAQNKDLLFSRGSPAGMSVQPKNWLPGPCYRQQRVSKTKTDNNNSNFTWTGASKYNLNGRESIINPGTAMASHKDDEDKFFPMSGVMIFGKESAGASNTALDNVMITDEEEIKATNPVATERFGTVAVNFQSSSTDPATGDVHVMGALPGMVWQDRDVYLQGPIWAKIPHTDGHFHPSPLMGGFGLKHPPPQILIKNTPVPANPPAEFSATKFASFITQYSTGQVSVEIEWELQKENSKRWNPEVQYTSNYAKSANVDFTVDNNGLYTEPRPIGTRYL

SEQ ID NO: 763 - protein, 736 aa, Artificial Sequence
  Description of Artificial Sequence: Synthetic polypeptide
MAADGYLPDWLEDNLSEGIREWWDLKPGAPKPKANQQKQDDGRGLVLPGYKYLGPFNGLDKGEPVNAADAAALEHDKAYDQQLKAGDNPYLRYNHADAEFQERLQEDTSFGGNLGRAVFQAKKRVLEPFGLVEEGAKTAPGKKRPVEQSPQEPDSSSGIGKTGQQPAKKRLNFGQTGDSESVPDPQPLGEPPATPAAVGPTTMASGGGAPMADNNEGADGVGNASGNWHCDSTWLGDRVITTSTRTWALPTYNNHLYKQISSASTGASNDNHYFGYSTPWGYFDFNRFHCHFSPRDWQRLINNNWGFRPKRLNFKLFNIQVKEVTTNDGVTTIANNLTSTVQVFSDSEYQLPYVLGSAHQGCLPPFPADVFMIPQYGYLTLNNGSQAVGRSSFYCLEYFPSQMLRTGNNFTFSYTFEEVPFHSSYAHSQSLDRLMNPLIDQYLYYLNRTQNQSGSAQNKDLLFSRGSPAGMSVQPKNWLPGPCYRQQRVSKTKTDNNNSNFTWTGASKYNLNGRESIINPGTAMASHKDDEDKFFPMSGVMIFGKESAGASNTALDNVMITDEEEIKATNPVATERFGTVAVNFQSSSTDPATGDVHVMGALPGMVWQDRDVYLQGPIWAKIPHTDGHSHPSPLMGGFGLKHPPPQILIKNTPVPANPPAEFSATKFASFITQYSTGQVSVEIEWELQKENSKRWNPEVQYTSNYAKSANVDFTVDNNGLYTEPRPIGTRYLTRPL

SEQ ID NO: 764 - protein, 736 aa, Artificial Sequence
  Description of Artificial Sequence: Synthetic polypeptide
MAADGYLPDWLEDNLSEGIREWWDLKPGAPKPKANQQKQDDGRGLVLPGYKYLGPFNGLDKGEPVNAADAAALEHDKAYDQQLKAGDNPYLRYNHADAEFQERLQEDTSFGGNLGRAVFQAKKRVLEPFGLVEEGAKTAPGKKRPVEQSPQEPDSSSGIGKTGQQPAKKRLNFGQTGDSESVPDPQPLGEPPATPAAVGPTTMASGGGAPMADNNEGADGVGNASGNWHCDSTWLGDRVITTSTRTWALPTYNNHLYKQISSASTGASNDNHYFGYSTPWGYFDFNRFHCHFSPRDWQRLINNNWGFRPKRLNFKLFNIQVKEVTTNDGVTTIANNLTSTVQVFSDSEYQLPYVLGSAHQGCLPPFPADVFMIPQYGYLTLNNGSQAVGRSSFYCLEYFPSQMLRTGNNFTFSYTFEEVPFHSSYAHSQSLDRLMNPLIDLYLYYLNRTQNQSGSAQNKDLLFSRGSPAGMSVQPKNWLPGPCYRQQRVSKTKTDNNNSNFTWTGASKYNLNGRESIINPGTAMASHKDDEDKFFPMSGVMIFGKESAGTSNTALDNVMITDEEEIKATNPVATERFGTVAVNFQSSSTDPATGDVHVMGALPGMVWQDRDVYLQGPIWAKIPHTDGHFHPSPLMGGFGLKHPPPQILIKNTPVPANPPAEFSATKFASFITQYSTGQVSVEIEWELQKENSKRWNPEVQYTSNYAKSANVDFTVDNNGLYTEPRPIGTRYLTRPL

SEQ ID NO: 765 - protein, 736 aa, Artificial Sequence
  Description of Artificial Sequence: Synthetic polypeptide
MAADGYLPDWLEDSLSEGIREWWDLKPGAPKPKANQQKQDDGRGLVLPGYKYLGPFNGLDKGEPVNAADAAALEHDKAYDQQLKAGDNPYLRYNHADAEFQERLQEDTSFGGNLGRAVFQAKKRVLEPFGLVEEGAKTAPGKKRPVEQSPQEPDSSSGIGKTGQQPAKKRLNFGQTGDSESVPDPQPLGEPPATPAAVGPTTMASGGGAPMADNNEGADGVGNASGNWHCDSTWLGDRVITTSTRTWALPTYNNHLYKQISSASTGASNDNHYFGYSTPWGYFDFNRFHCHFSPRDWQRLINNNWGFRPKRLNFKLFNIQVKEVTTNDGVTTIANNLTSTVQVFSDSEYQLPYVLGSAHQGCLPPFPADVFMIPQYGYLTPNNGSQAVGRSSFYCLEYFPSQMLRTGNNFTFSYTFEEVPFHSSYAHSQSLDRLMNPLIDQYQYYLNRTQNQSGSAQNKDLLFSRGSPAGMSVQPKNWLPGPCYRQQRVSKTKTDNNNSNFTWTGASKYNLNGRESIINPGTAMASHKDDEDKFFPMSGVMIFGKESAGASNTALDNVMITDEEEIKATNPVATERFGTVAVNFQSSSTDPATGDVHVMGALPGMVWQDRDVYLQGPIWAKIPHTDGHFHPSPLMGGFGLKHPPPQILIKNTPVPANPPAEFSATKFASFITQYSTGQVSVEIEWELQKENSKRWNPEVQYTSNYAKSANVDFTVDNNGLYTEPRPIGTRYLTRPL

SEQ ID NO: 766 - protein, 736 aa, Artificial Sequence; identical to SEQ ID NO: 757
  Description of Artificial Sequence: Synthetic polypeptide

SEQ ID NO: 767 - protein, 735 aa, Artificial Sequence
  Description of Artificial Sequence: Synthetic polypeptide
MAADGYLPDWLEDTLSEGIRQWWKLKPGPPPPKPAERHKDDSRGLVLPGYKYLGPFNGLDKGEPVNEADAAALEHDKAYDRQLDSGDNPYLKYNHADAEFQERLKEDTSFGGNLGRAVFQAKKRVLEPLGLVEEPVKTAPGKKRPVEHSPVEPDSSSGTGKAGQQPARKRLNFGQTGDADSVPDPQPLGQPPAAPSGLGTNTMATGSGAPMADNNEGADGVGNSSGNWHCDSTWMGDRVITTSTRTWALPTYNNHLYKQISSQSGASNDNHYFGYSTPWGYFDFNRFHCHFSPRDWQRLINNNWGFRPKRLNFKLFNIQVKEVTQNDGTTTIANNLTSTVQVFTDSEYQLPYVLGSAHQGCLPPFPADVFMVPQYGYLTLNNGSQAVGRSSFYCLEYFPSQMLRTGNNFTFSYTFEDVPFHSSYAHSQSLDRLMNPLIDQYLYYLSRTNTPSGTTTQSRLQFSRAGASDIRDQSRNWLPGPCYRQQRVSKTSADNNNSEYSWTGATKYHLNGRDSLVNPGPAMASHKDDEEKFFPQSGVLIFGKQGSEKTNVDIEKVMITDEEEIRTTNPVATEQYGSVSTNLQRGNRQAATADVNTQGVLPGMVWQDRDVYLQGPIWAKIPHTDGHFHPSPLMGGFGLKHPPPQILIKNTPVPANPSTTFSAAKFASFITQYSTGQVSVEIEWELQKENSKRWNPEIQYTSNYNKSVNVDFTVDTNGVYSEPRPIGTRYLTRNL

SEQ ID NO: 768 - DNA, 2211 bp, Artificial Sequence
  Description of Artificial Sequence: Synthetic polynucleotide
atggctgctgacggttatcttccagattggctcgaggacaacctttctgaaggcattcgtgagtggtgggctctgaaacctggagtccctcaacccaaagcgaaccaacaacaccaggacaaccgtcggggtcttgtgcttccgggttacaaatacctcggacccggtaacggactcgacaaaggagagccggtcaacgaggcggacgcggcagccctcgaacacgacaaagcttacgaccagcagctcaaggccggtgacaacccgtacctcaagtacaaccacgccgacgccgagtttcaggagcgtcttcaagaagatacgtcttttgggggcaaccttggcagagcagtcttccaggccaaaaagaggatccttgagcctcttggtctggttgaggaagcagctaaaacggctcctggaaagaagaggcctgtagatcagtctcctcaggaaccggactcatcatctggtgttggcaaatcgggcaaacagcctgccagaaaaagactaaatttcggtcagactggcgactcagagtcagtcccagaccctcaacctctcggagaaccaccagcagcccccacaagtttgggatctaatacaatggcttcaggcggtggcgcaccaatggcagacaataacgagggtgccgatggagtgggtaattcctcaggaaattggcattgcgattcccaatggctgggcgacagagtcatcaccaccagcaccagaacctgggccctgcccacttacaacaaccatctctacaagcaaatctccagccaatcaggagcttcaaacgacaaccactactttggctacagcaccccttgggggtattttgactttaacagattccactgccacttctcaccacgtgactggcagcgactcattaacaacaactggggattccggcccaagaaactcagcttcaagctcttcaacatccaagttaaagaggtcacgcagaacgatggcacgacgactattgccaataaccttaccagcacggttcaagtgtttacggactcggagtatcagctcccgtacgtgctcgggtcggcgcaccaaggctgcctcccgccgtttccagcggacgtcttcatggtccctcagtatggatacctcaccctgaacaacggaagtcaagcggtgggacgctcatccttttactgcccggagtacttcccttcgcagatgctaaggactggaaataacttccaattcagctataccttcgaggatgtaccttttcacagcagctacgctcacagccagagtttggatcgcttgatgaatcctcttattgatcagtatctgtactacctgaacagaacgcaaggaacaacctctggaacaaccaaccaatcacggctgctttttagccaggctgggcctcagtctatgtctttgcaggccagaaattggctacctgggccctgctaccggcaacagagactttcaaagactgctaacgacaacaacaacagtaactttccttggacagcggccagcaaatatcatctcaatggccgcgactcgctggtgaatccaggaccagctatggccagtcacaaggacgatgaagaaaaatttttccctatgcacggcaatctaatatttggcaaagaagggacaacggcaagtaacgcagaattagataatgtaatgattacggatgaagaagagattcgtaccaccaatcctgtggcaacagagcagtatggaactgtggcaaataacttgcagagctcaaatacagctcccacgactagaactgtcaatgatcagggggccttacctggcatggtgtggcaagatcgtgacgtgtaccttcaaggacctatctgggcaaagattcctcacacggatggacactttcatccttctcctctgatgggaggctttggactgaaacatccgcctcctcaaatcatgatcaaaaatactccggtaccggcaaatcctccgacgactttcagcccggccaagtttgcttcatttatcactcagtactccactggacaggtcagcgtggaaattgagtgggagctacagaaagaaaacagcaaacgttggaatccagagattcagtacacttccaactacaacaagtctgttaatgtggactttactgtagacactaatggtgtttatagtgaacctcaccctattggaacccggtatctcacacgaaacttgtaa

SEQ ID NO: 769 - DNA, 2211 bp, Artificial Sequence
  Description of Artificial Sequence: Synthetic polynucleotide
atggctgctgatggttatcttccagattggctcgaggacaacctttctgaaggcattcgtgagtggtgggctctgaaacctggagtccctcaacccaaagcgaaccaacaacaccaggacaaccgtcggggtcttgtgcttccgggttacaaatacctcggacccggtaacggactcgacaaaggagagccggtcaacgaggcggacgcggcagccctcgaacacgacaaagcttacgaccagcagctcaaggccggtgacaacccgtacctcaagtacaaccacgccgacgccgagtttcaggagcgtcttcaagaagatacgtcttttgggggcaaccttggcagagcagtcttccaggccaaaaagaggatccttgagcctcttggtctggttgaggaagcagctaaaacggctcctggaaagaagaggcctgtagatcagtctcctcaggaaccggactcatcatctggtgttggcaaatcgggcaaacagcctgccagaaaaagactaaatttcggtcagactggcgactcagagtcagtcccagaccctcaacctctcggagaaccaccagcagcccccacaagtttgggatctaatacaatggcttcaggcggtggcgcaccaatggcagacaataacgagggtgccgatggagtgggtaattcctcaggaaattggcattgcgattcccaatggctgggcgacagagtcatcaccaccagcaccagaacctgggccctgcccacttacaacaaccatctctacaagcaaatctccagccaatcaggagcttcaaacgacaaccactactttggctacagcaccccttgggggtattttgactttaacagattccactgccacttctcaccacgtgactggcagcgactcattaacaacaactggggattccggcccaagaaactcagcttcaagctcttcaacatccaagttaaagaggtcacgcagaacgatggcacgacgactgttgccaataaccttaccagcacggttcaagtgtttacggactcggagtatcaactcccgtacgtgctcgggtcggcgcaccaaggctgtctcccgccgtttccagcggacgtcttcatggtccctcagtatggatacctcaccctgaacaacggaagtcaagcggtgggacgctcatccttttactgcctggagtacttcccttcgcagatgctaaggactggaaataacttccaattcagctataccttcgaggatgtaccttttcacagcagctacgctcacagccagagtttggatcgcttgatgaatcctcttattgatcagtatctgtactacctgaacagaacgcaaggaacaacctctggaacaaccaaccaatcacggctgctttttagccaggctgggcctcagtctatgtctttgcaggccagaaattggctacctgggccctgctaccggcaacagagactttcaaagactgctaacgacaacaacaacagtaactttccttggacagcggccagcaaatatcatctcaatggccgcgactcgctggtgaatccaggaccagctatggccagtcacaaggacgatgaagaaaaatttttccctatgcacggcaatctaatatttggcaaagaagggacaacggcaagtaacgcagaattagataatgtaatgattacggatgaagaagagattcgtaccaccaatcctgtggcaacagagcagtatggaactgtggcaaataacttgcagagctcaaatacagctcccacgactagaactgtcaatgatcagggggccttacctggcatggtgtggcaagatcgtgacgtgtaccttcaaggacctatctgggcaaagattcctcacacggatggacactttcatccttctcctctgatgggaggctttggactgaaacatccgcctcctcaaatcatgatcaaaaatactccggtaccggcaaatcctccgacgactttcagcccggccaagtttgcttcatttatcactcagtactccactggacaggtcagcgtggaaattgagtgggagctacagaaagaaaacagcaaacgttggaatccagagattcagtacacttccaactacaacaagtctgttaatgtggactttactgtagacactaatggtgtttatagtgaacctcgccctattggaacccggtatctcacacgaaacttgtaa

SEQ ID NO: 770 - DNA, 2211 bp, Artificial Sequence
  Description of Artificial Sequence: Synthetic polynucleotide
atggctgctgacggttatcttccagattggctcgaggacaacctttctgaaggcattcgtgagtggtgggctctgaaacctggagtccctcaacccaaagcgaaccaacaacaccaggacaaccgtcggggtcttgtgcttccgggttacaaatacctcggacccggtaacggactcgacaaaggagagccggtcaacgaggcggacgcggcagccctcgaacacgacaaagcttacgaccagcagctcaaggccggtgacaacccgtacctcaagtacaaccacgccgacgccgagtttcaggagcgtcttcaagaagatacgtcttttgggggcaaccttggcagagcagtcttccaggccaaaaagaggatccttgagcctcttggtctggttgaggaagcagctaaaacggctcctggaaagaagaggcctgtagatcagtctcctcaggaaccggactcatcatctggtgttggcaaatcgggcaaacagcctgccagaaaaagactaaatttcggtcagactggcgactcagagtcagtcccagaccctcaacctctcggagaaccaccagcagcccccacaagtttgggatctaatacaatggcttcaggcggtggcgcaccaatggcagacaataacgagggtgccgatggagtgggtaattcctcaggaaattggcattgcgattcccaatggctgggcgacagagtcatcaccaccagcaccagaacctgggccctgcccacttacaacaaccatctctacaagcaaatctccggccaatcaggagcttcaaacgacaaccactactttggctacagcaccccttgggggtattttgactttaacagattccactgccacttctcaccacgtgactggcagcgactcattaacaacaactggggattccggcccaagaaactcagcttcaagctcttcaacatccaagttaaagaggtcacgcagaacgatggcacgacgactattgccaataaccttaccagcacggttcaagtgtttacggactcggagtatcagctcccgtacgtgctcgggtcggcgcaccaaggctgtctcccgccgtttccagcggacgtcttcatggtccctcagtatggatacctcaccctgaacaacggaagtcaagcggtgggacgctcatccttttactgcctggagtacttcccttcgcagatgctaaggactggaaataacttccaattcagctataccttcgaggatgtaccttttcacagcagctacgctcacagccagagtttggatcgcttgatgaatcctcttattgatcagtatctgtactacctgaacagaacgcaaggaacaacctctggaacaaccaaccaatcacggctgctttttagccaggctgggcctcagtctatgtctttgcaggccagaaattggctacctgggccctgctaccggcaacagagactttcaaagactgctaacggcaacaacaacagtaactttccttggacagcggccagcaaatatcatctcaatggccgcgactcgctggtgaatccaggaccagctatggccagtcacaaggacgatgaagaaaaatttttccctatgcacggcaatctaatatttggcaaagaagggacaacggcaagtaacgcagaattagataatgtaatgattacggatgaagaagagattcgtaccaccaatcctgtggcaacagagcagtgtggaactgtggcaaataacttgcagagctcaaatacagctcccacgactagaactgtcaatgatcagggggccttacctggcatggtgtggcaagatcgtgacgtgtaccttcaaggacctatctgggcaaagattcctcacacggatggacactttcatccttctcctctgatgggaggctttggactgaaacatccgcctcctcaaatcatgatcaaaaatactccggtaccggcaaatcctccgacgactttcagcccggccaagtttgcttcatttatcactcagtactccactggacaggtcagcgtggaaattgagtgggagctacagaaagaaaacagcaaacgttggaatccagagattcagtacacttccaactacaacaagtctgttaatgtggactttactgtagacactaatggtgtttatagtgaacctcgccctattggaacccggtatctcacacgaaacttgtaa

SEQ ID NO: 771 - DNA, 2212 bp, Artificial Sequence
  Description of Artificial Sequence: Synthetic polynucleotide
  misc_feature (1283)..(1283): n is a, c, t, or g
atggctgctgacggttatcttccagattggctcgaggacaacctttctgaaggcattcgtgagtggtgggctctgaaacctggagtccctcaacccaaagcgaaccaacaacaccaggacaaccgtcggggtcttgtgcttccgggttacaaatacctcggaccgggtaacggactcgacaaaggagagccggtcaacgaggcggacgcggcagccctcgaacacgacaaagcttacgaccagcagctcaaggccggtgacaacccgtacctcaagtacaaccacgccgacgccgagtttcaggagcgtcttcaagaagatacgtcttttgggggcaaccttggcagagcagtcttccaggccaaaaagaggatccttgagcctcttggtctggttgagggagcagctaaaacggctcctggaaagaagaggcctgtagatcagtctcctcaggaaccggactcatcatctggtgttggcaaatcgggcaaacagcctgccagaaaaagactaaatttcggtcagactggcgactcagagtcagtcccagaccctcaacctctcggagaaccaccagcagcccccacaagtttgggatctaatacaatggcttcaggcggtggcgcaccaatggcagacaataacgagggtgccgatggagtgggtaattcctcaggaaattggcattgcgattcccaatggctgggcgacagagtcatcaccaccagcaccagaacctgggccctgcccacttacaacagccatctctacaagcaaatctccagccaatcaggagcttcaaacgacaaccactactttggctacagcaccccttgggggtattttgactttaacagattccactgccacttctcaccacgtgactggcagcgactcattaacaacaactggggattccggcccaagaaactcagcttcaagctcttcaacatccaagttaaagaggtcacgcagaacgatggcacgacgactattgccaataaccttaccagcacggtccaagtgtttacggactcggagtatcagctcccgtacgtgctcgggtcggcgcaccaaggctgtctcccgccgtttccagcggacgccttcatggtccctcagtatggatacctcaccctgaacaacggaagtcaagcggtgggacgctcatccttttactgcctggagtacttcccttcgcagatgctaaggactggaaataacttccaattcagctataccttcgaggatgtaccttttcacggcagctacgctcacagccngagtttggatcgcttgatgaatcctcttattgatcagtatctgtactacctgaacagaacgcaaggaacaacctctggaacaaccaaccaatcacggctgctttttagccaggctgggcctcagtctatgtctttgcaggccagaaattggctacctgggccctgctaccggcaacagagacttttcaaagactgctaacgacaacaacaacagtaactttccttggacagcggccagcaaatatcatctcaatggccgcgactcgctggtgaatccaggaccagctatggccagtcacaaggacgatgaagaaaaatttttccctatgcacggcaatctaatatttggcaaagaagggacaacggcaagtaacgcagaattagataatgtaatgattacggatgaagaagagattcgtaccaccaatcctgtggcaacagagcagtatggaactgtggcaaataacttgcagagctcaaatacagctcccacgactagaactgtcaatgatcagggggccttacctggcatggtgtggcaagatcgtgacgtgtaccttcaaggacctatctgggcaaagattcctcacacggatggacactttcatccttctcctctgatgggaggctttggactgaaacatccgcctcctcaaatcatgatcaaaaatactccggtaccggcaaatcctccgacgactttcagcccggccaagtttgcttcatttatcactcagtactccactggacaggtcagcgtggaaattgagtgggagctacagaaagaaaacagcaaacgttggaatccagagattcagtacacttccaactacaacaagtctgttaatgtggactttactgtagacactaatggtgtttatagtgaacctcgccctattggaacccggtatctcacacgaaactcgtaa

SEQ ID NO: 772 - DNA, 2212 bp, Artificial Sequence
  Description of Artificial Sequence: Synthetic polynucleotide
atggctgctgacggttatcttccagattggctcgaggacaacctttctgaaggcattcgtgagtggtgggctctgaaacctggagtccctcaacccaaagcgaaccaacaacaccaggacaaccgtcggggtcttgtgcttccgggttacaaatacctcggacccggtaacggactcgacaaaggagagccggtcaacgaggcggacgcggcagccctcgaacacgacaaagcttacgaccagcagctcaaggccggtgacaacccgtacctcaagtacaaccacgccgacgccgagtttcaggagcgtcttcaagaagatacgtcttttgggggcaaccttggcagagcagtcttccaggccaaaaagaggatccttgagcctcttggtctggttgagggagcagctaaaacggctcctggaaagaagaggcctgtagatcagtctcctcaggaaccggactcatcatctggtgttggcaaatcgggcaaacagcttgccagaaaaagactaaatttcggtcagactggcgactcagagtcagtcccagaccctcaacctctcggagaaccaccagcagcccccacaagtttgggatctaatacaatggcttcaggcggtggcgcaccaatggcagacaataacgagggtgccgatggagtgggtaattcctcaggaaattggcattgcgattcccaatggctgggcgacagagtcatcaccaccagcaccagaacctgggccctgcccacttacaacagccatctctacaagcaaatctccggccaatcaggagcttcaaacgacaaccactactttggctacagcaccccctgggggtattttgactttaacagattccactgccacttctcaccacgtgactggcagcgactcattaacaacaactggggattccggcccaagaaactcagcttcaagctcttcaacatccaagttaaagaggtcacgcagaacgatggcacgacgactattgccaataaccttaccagcacggttcaagtgtttacggactcggagtatcagctcccgtacgtgctcgggtcggcgcaccaaggctgtctcccgccgtttccagcggacgtcttcatggtccctcagtatggatacctcaccctgaacaacggaagtcaagcggtgggacgctcatccttttactgcctggagtacttcccttcgcagatgctaaggactggaaataacttccaattcagctataccttcgaggatgtaccttttcacagcagctacgctcacagccagagtttggatcgcttgatgaatcctcttattgatcagtatctgtactacctgaacagaacgcaaggaacaacctctggaacaaccaaccaatcacggctgctttttagccaggctgggcctcagtctatgtctttgcaggccagaaattggctacctgggccctgctaccggcaacagagactttcaaagactgctaacgacaacaacaacagtaactttccttggacagcggccagcaaatatcatctcaatggccgcgactcgctggtgaatcccaggaccagctatggccagtcacaaggacgatgaagaaaaatttttccctatgcacggcaatctaatatttggcaaagaagggacaacggcaagtaacgcagaattagataatgtaatgattacggatgaagaagagattcgtaccaccaatcctgtggcaacagagcagtatggaactgtggcaaataacttgcagagctcaaatacagctcccacgactagaactgtcaatgatcagggggccttacctggcatggtgtggcaagatcgtgacgtgtaccttcaaggacctatctgggcaaagattcctcacacggatggacactttcatccttctcctctgatgggaggctttggactgaaacatccgcctcctcaaatcatgatcaaaaatactccggtaccggcaaatcctccgacgactttcagcccggccaagtttgcttcatttatcactcagtactccactggacaggtcagcgtggaaattgagtgggagctacagaaagaaaacagcaaacgttggaatccagagattcagtacacttccaactacaacaagtctgttaatgtggactttactgtagacactaatggtgtttatagtgaacctcgccctattggaacccggtatctcacacgaaacttgtaa

SEQ ID NO: 773 - DNA, 2212 bp, Artificial Sequence
  Description of Artificial Sequence: Synthetic polynucleotide
atggctgctgacggttatcttccagattggctcgaggacaacctttctgaaggcattcgtgagtggtgggctctgaaacctggagtccctcaacccaaagcgaaccaacaacaccaggacgaccgtcggggtcttgtgcttccgggttacaaatacctcggacccggtaacggactcgacaaaggagagccggtcaacgaggcggacgcggcagccctcgaacacgacaaagcttacgaccagcagctcaaggccggtgacaacccgtgcctcaagtacaaccacgccgacgccgagtttcaggagcgtcttcaagaagatacgtcttttgggggcaaccttggcagagcagtcttccaggccaaaaagaggatccttgagcctcttggtctggttgaggaagcagctaaaacggctcctggaaagaagaggcctgtagatcagtctcctcaggaaccggactcatcatctggtgttggcaaatcgggcaaacagcctgccagaaaaagactaaatttcggtcagactggcgactcagagtcagtcccagaccctcaacctctcggagaaccaccagcagcccccacaagtttgggatctaatacaatggcttcaggcggtagcgcaccaatggcagacaataacgagggtgccgatggagtgggtaattcctcaggaaattggcattgcgattcccaatggctgggcgacagagtcatcaccaccagcaccagaacctgggccctgcccacttacaacaaccatctctacaagcaaatctccagccaatcaggagcttcaaacgacaaccactactttggctacagcaccccttgggggtattttgactttaacagattccactgccacttctcaccacgtgactggcagcgactcattaacaacaactggggattccggcccaagaaactcagcttcaagctcttcaacatccaagttaaagaggtcacgcagaacgatggcacgacgactattgccaataaccttaccagcacggttcaagtgtttacggactcggagtatcagctcccgtacgtgctcgggtcggcgcaccaaggctgtctcccgccgtttccagcggacgtcttcatggtccctcagtatggatacctcaccctgaacaacggaagtcaagcggtgggacgctcatccttttactgcctggagtacttcccttcgcagatgctaaggactggaaataacttccaattcagctataccttcgaggatgtaccttttcacagcagctacgctcacagccagagtttggatcgcttgatggatcctcttattgatcagtatctgtactacctgaacagaacgcaaggaacaacctctggaacaaccaaccaatcacggctgctttttagccaggctgggcctcagtctatgtctttgcaggccagaaattggctacctgggccctgctaccggcaacagagactttcaaagactgctaacgacaacaacaacagtaactttccttggacagcggccagcaaatatcatctcaatggccgcgactcgctggtgaatccaggaccagctatggccagtcacaaaggacgatgaagaaaaatttttccctatgcacggcaatctaatatttggcaaagaagggacaacggcaagtaacgcagaattagataatgtaatgattacggatgaagaagagattcgtaccaccaatcctgtggcaacagagcagtatggaactgtggcaaataacttgcagagctcaaatacagctcccacgactagaactgtcaatgatcagggggccttacctggcatggtgtggcaagatcgtgacgtgtaccttcaaggacctatctgggcaaagattcctcacacggatggacactttcatccttctcctctgatgggaggctttggactgaaacatccgcctcctcaaatcatgatcaaaaatactccggtaccggcaaatcctccgacgactttcagcccggccaagtttgcttcatttatcactcagtactccactggacaggtcagcgtggaaattgagtgggagctacagaaagaaaacagcaaacgttggaatccagagattcagtacacttccaactacaacaagtctgttaatgtggactttactgtagacactaatggtgtttatagtgaacctcgccctattggaacccggtatctcacacgaaacctgtaa

SEQ ID NO: 774 - DNA, 2211 bp, Artificial Sequence
  Description of Artificial Sequence: Synthetic polynucleotide
atggctgctgacggttatcttccagattggctcgaggacaacctttctgaaggcattcgtgagtggtgggctctgaaacctggagtccctcaacccaaagcgaaccaacaacaccaggacgaccgtcggggtcttgtgcttccgggttacaaatacctcggacccggtaacggactcgacaaaggagagccggtcaacgaggcggacgcggcagccctcgaacacgacaaagcttacgaccagcagctcaaggccggtgacaacccgtacctcaagtacaaccacgccgacgccgagtttcaggagcgtcttcaagaagatacgtcttttgggggcaaccttggcagagcagtcttccaggccaaaaagaggatccttgagcctcttggtctggttgaggaagcagctaaaacggctcctggaaagaagaggcctgtagatcagtctcctcaggaaccggactcatcatctggtgttggcaaatcgggcaaacagcctgccagaaaaagactaaatttcggtcagactggcgactcagagtcagtcccagaccctcaacctctcggagaaccaccagcagcccccacaagtttgggatctaatacaatggcttcaggcggtggcgcaccaatggcagacaataacgagggtgccgatggagtgggtaattcctcaggaaattggcattgcgattcccaatggctgggcaacagagtcatcaccaccagcaccagaacctgggccctgcccacttacaacaaccatctctacaagcaaatctccagccaatcaggagcttcaaacgacaaccactactttggctacagcaccccttgggggtattttgactttaacagattccactgccacttctcaccacgtgactggcagcgactcattaacaacaactggggattccggcccaagaaactcagcttcaagctcttcaacatccaagttaaagaggtcacgcagaacgatggcacgacgactattgccaataaccttaccagcacggttcaagtgtttacggactcggagtatcagctcccgtacgtgctcgggtcggcgcaccaaggctgtctcccgccgtttccagcggacgtcttcatggtccctcagtatggatacctcaccctgaacaacggaagtcaagcggtgggacgctcatccttttactgcctggagtacttcccttcgcagatgctaaggactggaaataacttccaattcagctataccttcgaggatgtaccttttcacagcagctacgctcacagccagagtttggatcgcttgatgaatcctcttattgatcagtatctgtactacctgaacagaacgcaaggaacaacctctggaacaaccaaccaatcacggctgctttttagccaggctgggcctcagtctatgtctttgcaggccagaaattggctacctgggccctgctaccggcaacagagactttcaaagactgctaacgacaacaacaacagtaactttccttggacagcggccagcaaatatcatctcaatggccgcgactcgctggtgaatccaggaccagctatggccagtcacaaggacgatgaagaaaaatttttccctatgcacggcaatctaatatttggcaaagaagggacaacggcaagtaacgcagaattagataatgtaatgattacggatgaagaagagattcgtaccaccaatcctgtggcaacagagcagtatggaactgtggcaaataacttgcagagctcaaatacagctcccacgactagaactgtcaatgatcagggggccttacctggcatggtgtggcaagatcgtgacgtgtaccttcaaggacctatctgggcaaagattcctcacacggatggacactttcatccttctcctctgatgggaggctttggactgaaacatccgcctcctcaaatcatgatcaaaaatactccggtaccggcaaatcctccgacgactttcagcccggccaagtttgcttcatttatcactcagtactccactggacaggtcagcgtggaaattgagtgggagctacagaaagaaaacagcaaacgttggaatccagagattcagtacacttccaactacaacaagtctgttaatgtggactttactgtagacactaatggtgtttatagtgaacctcgccctattggaacccggtatctcacacgaaacttgtaa

SEQ ID NO: 775 - DNA, 2211 bp, Artificial Sequence
  Description of Artificial Sequence: Synthetic polynucleotide
atggctgctgacggttatcttccagattggctcgaggacaacctttctgaaggcattcgtgagtggtgggctctgaaacctggagtccctcaacccaaagcgaaccaacaacaccaggacgaccgtcggggtcttgtgcttccgggttacaaatacctcggacccggtaacggactcgacaaaggagagccggtcaacgaggcggacgcggcagccctcgaacacgacaaagcttacgaccagcagctcaaggccggtgacaacccgtacctcaagtacaaccacgccgacgccgagtttcaggagcgtcttcaagaagatacgtcttttgggggcaaccttggcagagcagtcttccaggccaaaaagaggatccttgagcctcttggtctggttgaggaagcagctaaaacggctcctggaaagaagaggcctgtagatcagtctcctcaggaaccggactcatcatctggtgttggcaaatcgggcaaacagcctgccagaaaaagactaaatttcggtcagactggcgactcagagtcagtcccagaccctcaacctctcggagaaccaccagcagcccccacaagtttgggatctaatacaatggcttcaggcggtggcgcaccaatggcggacaataacgagggtgccgatggagtgggtaattcctcaggaaattggcattgcgattcccaatggctgggcgacagagtcatcaccaccagcaccagaacctgggccctgcccacttacaacaaccatctctacaagcaaatctccagccaatcaggagcttcaaacgacaaccactactttggctacagcaccccttgggggtattttgactttaacagattccactgccacttctcaccacgtgactggcagcgactcattaacaacaactggggattccggcccaagaaactcagcttcaagctcttcaacatccaagttaaagaggtcacgcagaacgatggcacgacgactattgccaataaccttaccagcacggttcaagtgtttacggactcggagtatcagctcccgtacgtgctcgggtcggcgcaccaaggctgtctcccgccgtttccagcggacgtcttcatggtccctcagtatggatacctcaccctgaacaacggaagtcaagcggtgggacgctcatccttttactgcctggagtacttcccttcgcagatgctaaggactggaaataacttccaattcagctataccttcgaggatgtaccttttcacagcagctacgctcacagccagagtttggatcgcttgatgaatcctcttattgatcagtatctgtactacctgaacagaacgcaaggaacaacctctggaacaaccaaccaatcacggctgctttttagccaggctgggcctcagtctatgtctttgcaggccagaaattggctacctgggccctgctaccggcaacagagactttcaaagactgctaacgacaacaacaacagtaactttccttggacagcggccagcaaatatcatctcaatggccgcgactcgctggtgaatccaggaccagctatggccagtcacaaggacgatgaagaaaaatttttccctatgcacggcaatctaatatttggcaaagaagggacaacggcaagtaacgcagaattagataatgtaatgattacggatgaagaagagattcgtaccaccaatcctgtggcaacagtgcagtatggaactgtggcaaataacttgcagagctcaaatacagctcccacgactagaactgtcaatgatcagggggccttacctggcatggtgtggcaagatcgtgacgtgtaccttcaaggacctatctgggcaaagattcctcacacggatggacactttcatccttctcctctgatgggaggctttggactgaaacatccgcctcctcaaatcatgatcaaaaatactccggtaccggcaaatcctccgacgactttcagcccggccaagtttgcttcatttatcactcagtactccactggacaggtcagcgtggaaattgagtgggagctacagaaagaaaacagcaaacgttggaatccagagattcagtacacttccaactacaacaagtctgttaatgtggactttactgtagacactaatggtgtttatagtgaacctcgccctattggaacccggtatctcacacgaaacttgtaa

SEQ ID NO: 776 - DNA, 2211 bp, Artificial Sequence
  Description of Artificial Sequence: Synthetic polynucleotide
atggctgctgacggttatcttccagattggctcgaggacaacctttctgaaggcattcgtgagtggtgggctctgaaacctggagtccctcaacccaaagcgaaccaacaacaccaggacaaccgtcggggtcttgtgcttccgggttacaaatacctcggacccggtaacggactcgacaaaggagagccggtcaacgaggcggacgcggcagccctcgaacacgacaaagcttacgaccagcagctcaaggccggtgacaacccgtacctcaagtacaaccacgccgacgccgagtttcaggagcgtcttcaagaagatacgtcttttgggggcaaccttggcagagcagtcttccaggccaaaaaggggatccttgagcctcttggtctggttgaggaagcagctaaaacggctcctggaaagaagaggcctgtagatcagtctcctcaggaaccggactcatcatctggtgttggcaaatcgggcaaacagcctgccagaaaaagactaaatttcggtcagactggcgactcagagtcagtcccagaccctcaacctctcggagaaccaccagcagcccccacaagtttgggatctaatacaatggcttcaggcggtggcgcaccaatggcagacaataacgagggtgccgatggagtgggtaattcctcaggaaattggcattgcgattcccaatggctgggcgacagagtcatcaccaccagcaccagaacctgggccctgcccacttacaacaaccatctctacaagcaaatctccagccaatcaggagcttcaaacgacaaccactactttggctacagcaccccttgggggtattttgactttaacagattccactgccacttctcaccacgtgactggcagcgactcattaacaacaactggggattccggcccaagaaactcagcttcaagctcttcaacatccaagttaaagaggtcacgcagaacgatggcacgacgactattgccaataaccttaccagcacggttcaagtgtttacggactcggagtatcagctcccgtacgtgttcgggtcggcgcaccaaggctgtctcccgccgtttccagcggacgtcttcatggtccctcagtatggatacctcaccctgaacaacggaagtcaagcggtgggacgctcatccttttactgcctggagtacttcccttcgcagatgctaaggactggaaataacttccaattcagctataccttcgaggatgtaccttttcacagcagctacgctcacagccagagttcggatcgcttgatgaatcctcttattgatcagtatctgtactacctgaacagaacgcaaggaacaacctctggaacaaccaaccaatcacggctgctttttagccaggctgggcctcagtctatgtctttgcaggccagaaattggctacctgggccctgctaccggcaacagagactttcaaagactgctaacgacaacaacaacagtaactttccttgaacagcggccagcaaatatcatctcaatggccgcgactcgctggtgaatccaggaccagctatggccagtcacaaggacgatgaagaaaaatttttccctatgcacggcaatctaatatttggcaaagaagggacaacggcaagtaacgcagaattagataatgtaatgattacggatgaagaagagattcgtaccaccaatcctgtggcaacagagcagtatggaactgtggcaaataacttgcagagctcaaatacagctcccacgactagaactgtcaatgatcagggggccttacctggcatggtgtggcaagatcgtgacgtgtaccttcaaggacctatctgggcaaagattcctcacacggatggacactttcatccttctcctctgatgggaggctttggactgaaacatccgcctcctcaaatcatgatcaaaaatactccggtaccggcaaatcctccgacgactttcagcccggccaagtttgcttcatttatcactcagtactccactggacaggtcagcgtggaaattgagtgggagctacagaaagaaaacagcaaacgttggaatccagagattcagtacacttccaactacaacaagtctgttaatgtggactttactgtagacactaatggtgtttatagtgaacctcgccctattggaacccggtatctcacacgaaacttgtaa

SEQ ID NO: 777 - DNA, 2211 bp, Artificial Sequence
  Description of Artificial Sequence: Synthetic polynucleotide
atggctgctgacggttatcttccagattggctcgaggacaacctttctgaaggcattcgtgagtggtgggctctgaaacctggagtccctcaacccaaagcgaaccaacaacaccaggacaaccgtcggggtcttgtgcttccgggttacaaatacctcggacccggtaacggactcgacgaaggagagccggtcaacgaggcggacgcggcagccctcgaacacgacaaagcttacgaccagcagctcaaggccggtgacaacccgtacctcaagtacaaccacgccgacgccgagtttcaggagcgtcttcaagaagatacgtcttttgggggcaaccttggcagagcagtcttccaggccaaaaagaggatccttgagcctcttggtctggttgagggagcagctaaaacggctcctggaaagaagaggcctgtagatcagtctcctcaggaaccggactcatcatctggtgttggcaaatcgggcaaacagcctgccagaaaaagactaaatttcggtcagactggcgactcagagtcagtcccagaccctcaacctctcggagaaccaccagcagcccccacaagtttgggatctaatacaatggcttcaggcggtggcgcaccaatggcagacaataacgagggtgccgatggagtgggtaattcctcaggaaattggcattgcgattcccaatggctgggcgacagagtcatcaccaccagcaccagaacctgggccctgcccacttacaacagccacctctacaagcaaatctccagccaatcaggagcttcaaacgacaaccactactttggctacagcaccccttgggggtattttgactttaacagattccactgccacttctcaccacgtgactggcagcgactcattaacaacaactggggattccggcccaagaaactcagcttcaagctcttcaacatccaagttaaagaggtcacgcagaacgatggcacgacgactattgccaataaccttaccagcacggttcaagtgtttacggactcggagtatcagctcccgtacgtgctcgggtcggcgcaccaaggctgtctcccgccgtttccagcggacgtcttcatggtccctcagtatggatacctcaccctgaacaacggaagtcaagcggtgggacgctcatccttttactgcctggagtacttcccttcgcagatgctaaggactggaaataacttccaattcagctataccttcgaggatgtaccttttcacagcagctacgctcacagccagagtttggatcgcttgatgaatcctcttattgatcagtatctgtactacctgaacagaacgcaaggaacaacctctggaacaaccaaccaatcacggctgctttttagccaggctgggcctcagtctatgtctttgcaggccagaaattggctacctgggccctgctaccggcaacagagactttcaaagactgctaacgacaacaacaacagtaactttccttggacagcggccagcaaatatcatctcaatggccgcgactcgctggtgaatccaggaccagctatggccagtcacaaggacgatgaagaaaaatttttccctatgcacggcaatctaatatttggcaaagaagggacaacggcaagtaacgcagaattagataatgtaatgattacggatgaagaagagattcgtaccaccaatcctgtggcaacagagcagtatggaactgtggcaaataacttgcagagctcaaatacagctcccacgactagaactgtcaatgatcagggggccttacctggcatggtgtggcaagatcgtgacgtgtaccttcaaggacctatctgggcaaagattcctcacacggatggacactttcatccttctcctctgatgggaggctttggactgaaacatccgcctcctcaaatcatgatcaaaaatactccggtaccggcaaatcctccgacgactttcagcccggccaagtttgcttcatttatcactcagtactccactggacaggtcagcgtggaaattgagtgggagctacagaaagaaaacagcaaacgttggaatccagagattcagtacacttccaactacaacaagtctgttaatgtggactttactgtagacactaatggtgtttatagtgaacctcgccctattggaacccggtatctcacacgaaacttgtaa

SEQ ID NO: 778 - DNA, 2211 bp, Artificial Sequence
  Description of Artificial Sequence: Synthetic polynucleotide
atggctgctgacggttatcttccagattggctcgaggacaacctttctgaaggcattcgtgagtggtgggctctgaaacctggagtccctcaacccaaagcgaaccaacaacaccaggacaaccgtcggggtcttgtgcttccgggttacaaatacctcggacccggtaacggactcgacaaaggagagccggtcaacgaggcggacgcggcagccctcgaacacgacaaagcttacgaccagcagctcaaggccggtgacaacccgtacctcaagtacaaccacgccgacgccgagtttcaggagcgtcttcaagaagatacgtcttttgggggcaaccttggcagagcagtcttccaggccaaaaagaggatccttgagcctcttggtctggttgagggagcagctaaaacggctcctggaaagaagaggcctgtagatcagtctcctcaggaaccggactcatcatctggtgttggcaaatcgggcaaacagcctgccagaaaaagactaaatttcggtcagactggcgactcagagtcagtcccagaccctcaacctctcggagaaccaccagcagcccccacaagtttgggatctaatacaatggcttcaggcggtggcgcaccaatggcagacaataacgagggtgccgatggagtgggtaattcctcaggaaattggcattgcgattcccaatggctgggcgacagagtcatcaccaccagcaccagaacctgggccctgcccacttacaacagccatctctacaagcaaatctccagccaatcaggagcttcaaacgacaaccactactttggctacagcaccccttggggtattttgactttaacagattccactgccacttctcaccacgtgactggcagcgactcattaacaacaactggggattccggcccaagaaactcagcttcaagctcttcaacatccaagttaaagaggtcacgcagaacgatggcacgacgactattgccaataaccttaccagcacggttcaagtgtttacggactcggagtatcagctcccgtacgtgctcgggtcggcgcaccaaggctgtctcccgccgtttccagcggacgccttcatggtccctcagtatggatacctcaccctgaacaacggaagtcaagcggtgggacgctcatccttttactgcctggagtacttcccttcgcagatgctaaggactggaaataacttccaattcagctataccctcgaggatgtaccttttcacagcagctacgctcacagccagagtttggatcgcttgatgaatcctcttattgatcagtatctgtactacctgaacagaacgcaaggaacaacctctggaacaaccaaccaatcacggctgctttttagccaggctgggcctcagtctatgtctttgcaggccagaaattggctacctgggccctgctaccggcaacagagactttcaaagactgctaacgacaacaacaacagtaactttccttggacagcggccagcaaatatcatctcaatggccgcgactcgctggtgaatccaggaccagctatggccagtcacaaaggacgatgaagaaaaatttttccctatgcacggcaatctaatatttggcaaagaagggacaacggcaagtaacgcagaattagatagtgtaatgattacggatgaagaagagattcgtaccaccaatcctgtggcaacagagcagtatggaactgtggcaaataacttgcagagctcaaatacagctcccacgactagaactgtcaatgatcagggggccttacctggcatggtgtggcaagatcgtgacgtgtaccttcaaggacctatctgggcaaagattcctcacacggatggacactttcatccttctcctctgatgggaggctttggactgaaacatccgcctcctcaaatcatgatcaaaaatactccggtaccggcaaatcctccgacgactttcagcccggccaagtttgcttcatttatcactcagtactccactggacaggtcagcgtggaaattgagtgggagctacagaaagaaaacagcaaacgttggaatccagagattcagtacacttccaactacaacaagtctgttaatgtggactttactgtagacactaatggtgtttatagtgaacctcgccctattggaacccggtatctcacacgaaacttgtaa

SEQ ID NO: 779 - DNA, 2205 bp, Artificial Sequence
  Description of Artificial Sequence: Synthetic polynucleotide
atgactgacggttaccttccagattggctagaggacaacctctctgagggcgttcgagagtggtgggcgctgcaacctggagcccctaaacccaaggcaaatcaacaacatcaggacaacgctcggggtcttgtgcttccgggttacaaatacctcggacccggcaacggactcgacaagggggaacccgtcaacgcagcggacgcggcagccctcgagcacgacaaggcctacgaccagcagctcaaggccggtgacaacccctacctcaagtacaaccacgccgacgcggagttccagcagcggcttcagggcgacacatcgtttgggggcaacctcggcagagcagtcttccaggccaaaaagagggttcttgaacctcttggtctggttgagcaagcgggtgagacggctcctggaaagaagagaccgttgattgaatccccccagcagcccgactcctccacgggtatcggcaaaaaaggcaagcagccggctaaaaagaagctcgttttcgaagacgaaactggagcaggcgacggaccccctgagggatcaacttccggagccatgtctgatgacagtgagatgcgtgcagcaactggcggagctgcagtcgagggcggacaaggtgccgatggagtgggtaatgcctcgggtgattggcattgcgattccacctggtctgagggccacgtcacgaccaccagcaccagaacctgggtcttgcccacctacaacaaccacctctacaagcgactcggagagagcctgcagtccaacacctacaacggattctccaccccctggggatactttgacttcaaccgcttccactgccacttctcaccacgtgactggcagcgactcatcaacaacaactggggcatgcgacccaaagccatgcgggtcaaaatcttcaacatccaggtcaaggaggtcacgacgtcgaacggcgagacaacggtggctaataaccttaccagcacggttcagatctttgcggactcgtcgtacgaactgccgtacgtgatggatgcgggtcaagagggcagcctgcctccttttcccaacgacgtctttatggtgccccagtacggctactgtggactggtgaccggcaacacttcgcagcaacagactgacagaaatgccttctactgcctggagtactttccttcgcagatgctgcggactggcaacaactttgaaattacgtacagttttgagaaggtgcctttccactcgatgtacgcgcacagccagagcctggaccggctgatgaaccctctcatcgaccagtacctgtggggactgcaatcgaccaccaccggaaccaccctgaatgccgggactgccaccaccaactttaccaagctgcggcctaccaacctttccaactttaaaaagaactggctgcccgggccttcaatcaagcagcagggcttctcaaagactgccaatcaaaactacaagatccctgccaccgggtcagacagtctcatcaaatacgagacgcacagcactctggacggaagatggagtgccctgacccccggacctccaatggccacggctggacctgcggacagcaagttcagcaacagccagctcatctttgcggggcctaaacagaacggcaacacggccaccgtacccgggactctgatcttcacctctgaggaggagctggcagccaccaacgctaccgatacggacatgtggggcaacctacctggcggtgaccagagcaacagcaacctgccgaccgtggacagactgacagccttgggagccgtgcctggaatggtctggcaaaacagagacatttactaccagggtcccatttgggccaagattcctcataccgatggacactttcacccctcaccgctgattggtgggtttgggctgaaacacccgcctcctcaaatttttatcaagaacaccccggtacctgcgaatcctgcgacgaccttcagctctactccggtaaactccttcattactcagtacagcactggccaggtgtcggtgcagattgactgggagatccagaaggagcggtccaaacgctggaaccccgaggtccagtttacctccaactacggacagcaaaactctctgttgtgggctcccgatgcggctgggaaatacactgagcctagggctatcggtacccgctacctcacccaccacctgtaa

SEQ ID NO: 780 - DNA, 2205 bp, Artificial Sequence
  Description of Artificial Sequence: Synthetic polynucleotide
atgactgacggttaccttccagattggctagaggacaacctctctgaaggcgttcgagagtggtgggcgctgcaacctggagcccctaaacccaaggcaaatcaacaacatcaggacaacgctcggggtcttgtgcttccgggttacaaatacctcggacccggcaacggactcgacaagggggaacccgtcaacgcagcggacgcggcagccctcgagcacgacaaggcctacgaccagcagctcaaggccggtgacaacccctacctcaagtacaaccacgccgacgcggagttccagcagcggcttcagggcgacacatcgtttgggggcaacctcggcagagcagtcttccaggccaaaaagagggttcttgaacctcttggtctggttgagcaagcgggtgagacggctcctggaaagaagagaccgttgattgaatccccccagcagcccgactcctccacgggtatcggcaaaaaaggcaagcagccggctaaaaagaagctcgttttcgaagacgaaactggagcaggcgacggaccccctgagggatcaacttccggagccatgtctgatgacagtgagatgcgtgcagcagctggcggagctgcagtcgagggcggacaaggtgccgatggagtgggtaatgcctcgggtgattggcattgcgattccacctggtctgagggccacgtcacgaccaccagcaccagaacctgggtcttgcccacctacaacaaccacctctacaagcgactcggagagagcctgcagtccaacacctacaacggattctccaccccctggggatactttgacttcaaccgcttccactgccacttcttaccacgtgactggcagcgactcatcaacaacaactggggcgtgcgacccaaagccatgcgggtcaaaatcttcaacatccaggtcaaggaggtcacgacgtcgaacggcgagacaacggtggctaataaccttaccagcacggttcagatctttgcggactcgtcgtacgaactgccgtacgtgatggatgcgggtcaagagggcagcctgcctccttttcccaacgacgtctttatggtgccccagtacggctactgtggactggtgaccggcgacacttcgcagcaacagactgacagaaatgccttctactgcctggagtactttccttcgcagatgctgcggactggcaacaactttgaaattacgtacagttttgagaaggtgcctttccactcgatgtacgcgcacagccagagcctggaccggctgatgaaccctctcatcgaccagtacctgtggggactgcaatcgaccaccaccggaaccaccctgaatgccgggactgccaccaccaactttaccaagctgcggcctaccaacttttccaactttaaaaagaactggctgcccgggccttcaatcaagcagcagggcttctcaaagactgccaatcaaaactacaagatccctgccaccgggtcagacagtctcatcaaatacgagacgcacagcactctggacggaagatggagtgccctgacccccggacctccaatggccacggctggacctgcggacagcaagttcagcaacagccagctcatctttgcggggcctaaacagaacggcaacacggccaccgtacccgggactctgatcttcacctctgaggaggagctggcagccaccaacgccaccgatacggacatgtggggcaacctacctggcggtgaccagagcaacagcaacctgccgaccgtggacagactgacagccttgggagccgtgcctggaatggtctggcaaaacagagacatttactaccagggtcccatttgggccaagattcctcataccgatggacactttcacccctcaccgctgattggtgggtttgggctgaaacacccgcctcctcaaatttttatcaagaacaccccggtacctgcgaatcctgcgacgaccttcagctctactccggtaaactccttcattactcagtacagcactggccaggtgtcggtgcagattgactgggagatccagaaggagcggtccaaacgctggaaccccgaggtccagtttacctccaactacggacagcaaaactctctgttgtgggctcccgatgcggctgggaaatacactgagcctagggctatcggtacccgctacctcacccaccacctgtaa

SEQ ID NO: 781 - DNA, 2205 bp, Artificial Sequence
  Description of Artificial Sequence: Synthetic polynucleotide
atgactgacggttaccttccagattggctagaggacaacctctctgaaggcgttcgagagtggtgggcgctgcaacctggagcccctaaacccaaggcaaatcaacaacatcaggacaacgctcggggtcttgtgcttccgggttacaaatacctcggacccggcaacggactcgacgagggggaacccgtcaacgcagcggacgcggcagccctcgagcacgacaaggcctacgaccagcagctcaaggccggtgacaacccctacctcaagtacaaccacgccgacgcggagttccagcagcggcttcagggcgacacatcgtttgggggcaacctcggcagagcagtcttccaggccaaaaagagggttcttgaacctcttggtctggttgagcaagcgggtgagacggctcctggaaagaagagaccgttgattgaatccccccagcagcccgactcctccacgggtatcggcaaaaaaggcaagcagccggctaaaaagaagctcgttttcgaagacgaaactggagcaggcgacggaccccctgagggatcaacttccggagccatgtctgatgacagtgagatgcgtgcagcagctggcggagctgcagtcgagggcggacaaggtgccgatggagtgggtaatgcctcgggtgattggcattgcgattccacctggtctgagggccacgtcacgaccaccagcaccagaacctgggtcttgcccacctacaacaaccacctctacaagcgactcggagagagcctgcagtccaacacctacaacggattctccaccccctggggatactttgacttcaaccgcttccactgccacttctcaccacgtgactggcagcgactcatcaacaacaactggggcatgcgacccaaagccatgcgggtcaaaatcttcaacatccaggtcaaggaggtcacgacgtcgaacggcgagacaacggtggctaataaccttaccagcacggttcagatctttgcggactcgtcgtacgaactgccgtacgtgatggatgcgggtcaagagggcagcctgcctccttttcccaacgacgtctttatggtgccccagtacggctactgtggactggtgaccggcaacacttcgcagcaacagactgacagaaatgccttctactgcctggagtactttccttcgcagatgctgcggactggcaacaactttgaaattacgtacagttttgagaaggtgcctttccactcgatgtacgcgcacagccagagcctggaccggctgatgaaccctctcatcgaccagtacctgtggggactgcaatcgaccaccaccggaaccaccctgaatgccgggactgccaccaccaactttaccaagctgcggcctaccaacttttccaactttaaaaagaactggctgcccgggccttcaatcaagcagcagggcttctcaaagactgccaatcaaaactacaagatccctgccaccgggtcagacagtctcatcaaatacgagacgcacagcactctggacggaagatggagtgccctgacccccggacctccaatggccacggctggacctgcggacagcaagttcagcaacagccagctcatctttgcggggcctaaacagaacggcaacacggccaccgtacccgggactctgatcttcacctctgaggaggagctggcagccaccaacgctaccgatacggacatgtggggcaacctacctggcggtgaccagagcaacagcaacctgccgaccgtggacagactgacagccttgggagccgtgcctggaatggtctggcaaaacagagacatttactaccagggtcccatttgggccaagattcctcataccgatggacactttcacccctcaccgctgattggtgggtttgggctgaaacacccgcctcctcaaatttttatcaagaacaccccggtacctgcgaatcctgcgacgaccttcagctctactccggtaaactccttcattactcagtacagcactggccaggtgtcggtgcagattgactgggagatccagaaggagcggtccaaacgctggaaccccgaggtccagtttacctccaactacggacagcaaaactctctgttgtgggctcccgatgcggctgggaaatacactgagcctagggctatcggtacccgctacctcacccaccacctgtaa

SEQ ID NO: 782 - DNA, 2205 bp, Artificial Sequence
  Description of Artificial Sequence: Synthetic polynucleotide
atgactgacggttaccttccagattggctagaggacaacctctctgaaggcgttcgagagtggtgggcgctgcaacctggagcccctaaacccaaggcaaatcaacaacatcaggacaacgctcggggtcttgtgcttccgggttacaaatacctcggacccggcaacggactcgacaagggggaacccgtcaacgcagcggacgcggcagccctcgagcacgacaaggcctacgaccagcagctcaaggccggtgacaacccctacctcaagtacaaccacgccgacgcggagttccagcagcggcttcagggcgacacatcgtttgggggcaacctcggcagagcagtcttccaggccaaaaagagggttcttgaacctcttggtctggttgagcaagcgggtgagacggctcctggaaagaagagaccgttgattgaatccccccagcagcccgactcctccacgggtatcggcaaaaaaggcaagcagccggctaaaaagaagctcgttttcgaagacggaactggagcaggcgacggaccccctgagggatcaacttccggagccatgtctgatgacagtgagatgcgtgcagcagctggcggagctgcagtcgagggcggacaaggtgccgatggagtgggtaatgcctcgggtgattggcattgcgattccacctggtctgagggccacgtcacgaccaccagcaccagaacctgggtcttgcccacctacaacaaccacctctacaagcgactcggagagagcctgcagtccaacacctacaacggattccccaccccctggggatactttgacttcaaccgcttccactgccacttctcaccacgtgactggcagcgactcatcaacaacaactggggcatgcgacccaaagccatgcgggtcaaaatcttcaacatccaggtcaaggaggtcacgacgtcgaacggcgagacaacggcggctaataaccttaccagcacggttcagatctttgcggactcgtcgtacgaactgccgtacgtgatggatgcgggtcaagagggcagcctgcctccttttcccaacgacgtctttatggtgccccagtacggctactgtggactggtgaccggcaacacttcgcagcaacagactgacagaaatgccttctactgcctggagtactttccttcgcagatgctgcggactggcaacaactttgaaattacgtacagttttgagaaggtgcctttccactcgatgtacgcgcacagccagagcctggaccggctgatgaaccctctcatcgaccagtacctgtggggactgcaatcgaccaccaccggaaccaccctgaatgccgggactgccaccaccaactttaccaagctgcggcctaccaacttttccaactttaaaaagaactggctgcccgggccttcaatcaagcagcagggcttctcaaagactgccaatcaaaactacaagatccctgccaccgggtcagacagtctcatcaaatacgagacgcacagcactctggacggaagatggagtgccctgacccccggacctccaatggccacggctggacctgcggacagcaagttcagcaacagccagctcatctttgcggggcctaaacagaacggcaacacggccaccgtacccgggactctgatcttcacctctgaggaggagctggcagccaccaacgccaccgatacggacatgtggggcaacctacctggcggtgaccagagcaacagcaacctgccgaccgtggacagactgacagccttgggagccgtgcctggaatggtctggcaaaacagagacatttactaccagggtcccatttgggccaagattcctcataccgatggacactttcacccctcaccgctgattggtgggtttgggctgaaacacccgcctcctcaaatttttatcaagaacaccccggtacctgcgaatcctgcgacgaccttcagctctactccggtaaactccttcattactcagtacagcactggccaggtgtcggtgcagattgactgggagatccagaaggagcggtccaaacgctggaaccccgaggtccagtttacctccaactacggacagcaaaactctctgttgtgggctcccgatgcggctgggaaatacactgagcctagggctatcggtacccgctacctcacccaccacctgtaa

SEQ ID NO: 783 - DNA, 2205 bp, Artificial Sequence
  Description of Artificial Sequence: Synthetic polynucleotide
atgactgacggttaccttccagattggctagaggacaacctctctgaaggcgttcgagagtggtgggcgctgcaacctggagcccctaaacccaaggcaaatcaacaacatcaggacaacgctcggggtcttgtgcttccgggttacaaatacctcggacccggcaacggactcgacaagggggaacccgtcaacgcagcggacgcggcagccctcgagcacgacaaggcctacgaccagcagctcaaggccggtgacaacccctacctcaagtacaaccacgccgacgcggagttccagcagcggcttcagggcgacacatcgtttgggggcaacctcggcagagcagtcttccaggccaaaaagagggttcttgaacctcttggtctggttgagcaagcgggtgagacggctcctggaaagaagagaccgttgattgaatccccccagcagcccgactcctccacgggtatcggcaaaaaaggcaagcagccggctaaaaagaagctcgttttcgaagacgaaactggagcaggcgacggaccccctgagggatcaacttccggagccatgtctgatgacagtgagatgcgtgcagcagctggcggagctgcagtcgagggcggacaaggtgccgatggagtgggtaatgcctcgggtgattggcattgcgattccacctggtctgagggccacgtcacgaccaccagcaccagaacctgggtcttgcccacctacaacaaccacctctacaagcgactcggagagagcctgcagtccaacacctacaacggattctccaccccctggggatactttgacttcaaccgcttccactgccacttctcaccacgtgactggcagcgactcatcaacaacaactggggcatgcgacccaaagccatgcgggtcaaaatcttcaacatccaggtcaaggaggtcacgacgtcgaacggcgagacaacggtggctaataaccttaccagcacggttcagatctttgcggactcgtcgtacgaactgccgtacgtgatggatgcgggtcaagagggcagcctgcctccttttcccaacgacgtctttatggtgccccagtacggctaccgtggactggtgaccggcaacacttcgcagcaacagactgacagaaatgccttctactgcctggagtactttccttcgcagatgctgcggactggcaacaactttgaaattacgtacagttttgagaaggtgcctttccactcgatgtacgcgcacagccagagcctggaccggctgatgaaccctctcatcgaccagtacctgtggggactgcaatcgaccaccaccggaaccaccctgaatgccgggactgccaccaccaactttaccaagctgcggcctaccaacttttccaactttaaaaagaactggctgcccgggccttcaatcaagcagcagggcttctcaaagactgccaatcaaaactacaagatccctgccaccgggtcagacagtctcatcaaatacgagacgcacagcactctggacggaagatggagtgccctgacccccggacctccaatggccacggctggacctgcggacagcaagttcagcaacagccagctcatctttgcggggcctaaacagaacggcaacacggccaccgtacccgggactctgatcttcacctctgaggaggagctggcagccaccaacgccaccgatacggacatgtggggcaacctacctggcggtgaccagagcaacagcaacctgccgaccgtggacagactgacagccttgggagccgtgcctggaatggtctggcaaaacagagacatttactaccagggtcccatttgggccaagattcctcataccgatggacactttcacccctcaccgctgattggtgggtttgggctgaaacacccgcctcctcaaatttttatcaagaacaccccggtacctgcgaatcctgcgacgaccttcagctctactccggtaaactccttcattactcagtacagcactggccaggtgtcggtgcagattgactgggagatccagaaggagcggtccaaacgctggaaccccgaggtccagtttacctccaactacggacagcaaaactctctgttgtgggctcccgatgcggctgggaaatacactgagcctagggctatcggtacccgctacctcacccaccacctgtaa

SEQ ID NO: 784 - DNA, 2205 bp, Artificial Sequence
  Description of Artificial Sequence: Synthetic polynucleotide
atgactgacggttaccttccagattggctagaggacaacctctctgaaggcgttcgagagtggtgggcgctgcaacctggagcccctaaacccaaggcaaatcaacaacatcaggacaacgctcggggtcttgtgcttcagggttacaaatacctcggacccggcaacggactcgacaagggggaacccgtcaacgcagcggacgcggcagccctcgagcacgacaaggcctacgaccagcagctcaaggccggtgacaacccctacctcaagtacaaccacgccgacgcggagttccagcagcggcttcagggcgacacatcgtttgggggcaacctcggcagagcagtcttccaggccaaaaagagggttcttgaaccccttggtctggttgagcaagcgggtgagacggctcctggaaagaagagaccgttgattgaatccccccagcagcccgactcctccacgggtatcggcaaaaaaggcaagcagccggctaaaaagaagctcgttttcgaagacgaaactggagcaggcgacggaccccctgagggatcaacttccggagccatgtctgatgacagtgagatgcgtgcagcagctggcggagctgcagtcgagggcggacaaggtgccgatggagtgggtaatgcctcgggtgattggcattgcgattccacccggtctgagggccacgtcacgaccaccagcaccagaacctgggtcttgcccacctacaacaaccacctctacaagcgactcggagagagcctgcagtccaacacctacaacggattctccaccccctggggatactttgacttcaaccgcttccactgccacttctcaccacgtgactggcagcgactcatcaacaataactggggcatgcgacccaaagccatgcgggtcaaaatcttcaacatccaggtcaaggaggtcacgacgtcgaacggcgagacaacggtggctaataaccttaccagcacggttcagatctttgcggactcgtcgtacgaactgccgtacgtgatggatgcgggtcaagagggcagcctgcctccttttcccaacgacgtctttatggtgccccagtacggctactgtggactggtgaccggcaacacttcgcagcaacagactgacagaaatgccttctactgcctggagtactttccttcgcagatgctgcggactggcaacaactttgaaattacgtacagttttgagaaggtgcctttccactcgatgtacgcgcacagccagagcctggaccggctgatgaaccctctcatcgaccagtacctgtggggactgcaatcgaccaccaccggaaccaccctgaatgccgggactgccaccaccaactttaccaagctgcggcctaccaacttttccaactttaaaaagaactggctgcccgggccttcaatcaagcagcagggcttctcaaagactgccaatcaaaactacaagatccctgccaccgggtcagacagtctcatcaaatacgagacgcacagcactctggacggaagatggagtgcccggacccccggacctccaatggccacggctggacctgcggacagcaagttcagcaacagccagctcatctttgcggggcctaaacagaacggcaacacggccaccgtacccgggactctgatcttcacctctgaggaggagctggcagccaccaacgccaccgatacggacatgtggggcaacctacctggcggtgaccagagcaacagcaacctgccgaccgtggacagactgacagccttgggagccgtgcctggaatggtctggcaaaacagagacatttactaccagggtcccatttgggccaagattcctcataccgatggacactttcacccctcaccgctgattggtgggtttgggctgaaacacccgcctcctcaaatttttatcaagaacaccccggtacctgcgaatcctgcgacgaccttcagctctactccggtaaactccttcattactcagtacagcactggccaggtgtcggtgcagattgactgggagatccagaaggagcggtccaaacgctggaaccccgaggtccagtttacctccaactacggacagcaaaactctctgttgtgggctcccgatgcggctgggaaatacactgagcctagggctatcggtacccgctacctcacccaccacctgtaa

SEQ ID NO: 785 - DNA, 2175 bp, Artificial Sequence
  Description of Artificial Sequence: Synthetic polynucleotide
atgtcttttgttgatcaccctccagattggttggaagaagttggtgaaggtcttcgcgagtttttgggccttgaagcgggcccaccgaaaccaaaacccaatcagcagcatcaagatcaagcccgtggtcttgtgctgcctggttataactatctcggacccggaaacggtctcgatcgaggagagcctgtcaacagggcagacgaggtcgcgcgagagcacgacatctcgtacaacgagcagcttgaggcgggagacaacccctacctcaagtacaaccacgcggacgccgagtttcaggagaggctcgccgacgacacatccttcgggggaaacctcggaaaggcagtctttcaggccaagaaaagggttctcgaaccttttggcctggttgaagagggtgctaagacggcccctaccggaaagcggatagacgaccactttccaaaaagaaagaaggcccggaccgaagaggactccaagccttccacctcgtcagacgccgaagctggacccagcggatcccagcagctgcaaatcccagcccaaccagcctcaagtttgggagctgatacaatgtctgcgggaggtggcggcccattgggcgacaataaccaaggtgccgatggagtgggcaatgcctcgggagattggcattgcgattccacgtggatgggggacagagtcgtcaccaagtccacccgaacctgggtgctgcccagctacaacaaccaccagtaccgagagatcaaaagcggctccgtcgacggaagcaacgccaacgcctactttggatacagcaccccctgggggtactttgactttaaccgcttccacagccactggagcccccgagactggcaaagactcatcaacaactactggggcttcagaccccggtccctcagagtcaaaatcttcaacattcaagtcaaagaggtcacggtgcaggactccaccaccaccatcgccaacaacctcacctccaccgtccaagtgtttacggacgacgactaccagctgccctacgtcgtcggcaacgggaccgagggatgcctgccggccttccctccgcaggtctttacgctgccgcagtacggttacgcgacgctgaaccgcgacaacacagaaaatcccaccgagaggagcagcttcttctgcctagagtactttcccagcaagatgctgagaacgggcaacaactttgagtttacctacaactttgaggaggtgcccttccactccagcttcgctcccagtcagaacctcttcaagctggccaacccgctggtggaccagtacttgtaccgcttcgtgagcacaaataacactggcggagtccagttcaacaagaacctggccgggagatacgccaacacctacaaaaactggttcccggggcccatgggccgaacccagggctggaacctgggctccggggtcaaccgcgccagtgtcagcgccttcgccacgaccaataggatggagctcgagggcgcgagttaccaggtgcccccgcagccgaacggcatgaccaacaacctccagggcagcaacacctatgccctggagaacactatgatcttcaacagccagccggcgaacccgggcaccaccgccacgtacctcgagggcaacatgctcatcaccagcgagagcgagacgcagccggtgaaccgcgtggcgtacaacgtcggcgggcagatggccaccaacaaccagagctccaccactgcccccgcgaccggcacgtacaacctccaggaaatcgtgcccggcagcgtgtggatggagagggacgtgtacctccaaggacccatctgggccaagatcccagagacggaggcgcactttcacccctctccggccatgggcggattcggactcaaacacccaccgcccatgatgctcatcaagaacacgcctgtgcccggaaatatcaccagcttctcggacgtgcccgtcagcagcttcatcacccagtacagcaccgggcaggtcaccgtggagatggagtgggagctcaagaaggaaaactccaagaggtggaacccagagatccagtacacaaacaactacaacgacccccagtttgtggactttgccccggacagcaccggggaatacagaaccaccagacctatcggaacccgataccttacccgacccctttaa

SEQ ID NO: 786 - DNA, 2175 bp, Artificial Sequence
  Description of Artificial Sequence: Synthetic polynucleotide
atgtcttttgttgatcaccctccagattggttggaagaagttggtgaaggtcttcgcgagtttttgggccttgaagcgggcccaccgaaaccaaaacccaatcagcagcatcaagatcaagcccgtggtcttgtgctgcctggttataactatctcggacccggaaacggtctcgatcgaggagagcctgtcaacagggcagacgaggtcgcgcgagagcacgacatctcgtacaacgagcagcttgaggcgggagacaacccctacctcaagtacaaccacgcggacgccgagtttcaggagaagctcgccgacgacacatcctccgggggaaacctcggaaaggcagtctttcaggccaagaaaagggttctcgaaccttttggcctggttgaagagggtgctaagacggcccctaccggaaagcggatagacgaccactttccaaaaagaaagaaggcccggaccgaagaggactccaagccttccacctcgtcagacgccgaagctggacccagcggatcccagcagctgcaaatcccagcccaaccagcctcaagtttgggagctgatacaatgtctgcgggaggtggcggcccattgggcgacaataaccaaggtgccgatggagtgggcaatgcctcgggagattggcattgcgattccacgtggatgggggacagagtcgtcaccaagtccacccgaacctgggtgctgcccagctacaacaaccaccagtaccgagagatcaaaagcggctccgtcgacggaagcaacgccaacgcctactttggatacagcaccccctgggggtactttgactttaaccgcttccacagccactggagcccccgagactggcaaagactcatcaacaactactggggcttcagaccccggtccctcagagtcaaaatcttcaacattcaagtcaaagaggtcacggtgcaggactccaccaccaccatcgccaacaacctcacctccaccgtccaagtgtttacggacgacgactaccagctgccctacgtcgtcggcaacgggaccgagggatgcctgccggccttccctccgcaggtctttacgctgccgcagtacggttacgcgacgctgaaccgcgacaacacagaaaatcccaccgagaggagcagcttcttctgcctagagtactttcccagcaagatgctgagaacgggcaacaactttgagtttacctacaactttgaggaggtgcccttccactccagcttcgctcccagtcagaacctcttcaagctggccaacccgctagtggaccagtacttgtaccgcttcgtgagcacaaataacactggcggagtccagttcaacaagaacctggccgggagatacgccaacacctacaaaaactggttcccggggcccatgggccgaacccagggctggaacctgggctccggggtcaaccgcgccagtgtcagcgccttcgccacgaccaataggatggagctcgagggcgcgagttaccaggtgcccccgcagccgaacggcatgaccaacaacctccagggcagcaacacctatgccctggagaacactatgatcttcaacagccagccggcgaacccgggcaccaccgccacgtacctcgagggcaacatgctcatcaccagcgagagcgagacgcagccggtgaaccgcgtggcgtacaacgtcggcgggcagatggccaccaacaaccagagctccaccactgcccccgcgaccggcacgtacaacctccaggaaatcgtgcccggcagcgtgtggatggagagggacgtgtacctccaaggacccatctgggccaagatcccagagacgggggcgcactttcacccctctccggccatgggcggattcggactcaaacacccaccgcccatgatgctcatcaagaacacgcctgtgcccggaaatatcaccagcttctcggacgtgcccgtcagcagcttcatcacccagtacagcaccgggcaggtcaccgtggagatggagtgggagctcaagaaggaaaactccaagaggtggaacccagagatccagtacacaaacaactacaacgacccccagtttgtggactttgccccggacagcaccggggaatacagaaccaccagacctatcggaacccgataccttacccgacccctttaa

SEQ ID NO: 787 - DNA, 2175 bp, Artificial Sequence
  Description of Artificial Sequence: Synthetic polynucleotide
atgtcttttgttgatcaccctccagattggttggaagaagttggtgaaggtcttcgcgagtttttgggccttgaagcgggcccaccgaaaccaaaacccaatcagcagcatcaagatcaagcccgtggtcttgtgctgcctggttataactatctcggacccggaaacggtctcgatcgaggagagcctgtcaacagggcagacgaggtcgcgcgagagcacgacatctcgtacaacgagcagcttgaggcgggagacaacccctacctcaagtacaaccacgcggacgccgagtttcaggagaagctcgccgacgacacatccttcgggggaaacctcggaaaggcagtctttcaggccaagaaaagggttctcgaaccttttggcctggttgaagagggtgctaagacggcccctaccggaaagcggatagacgaccactttccaaaaagaaagaaggcccggaccgaagaggactccaagccttccacctcgtcagacgccgaagctggacccagcggatcccagcagctgcaaatcccagcccaaccagcctcaagtttgggagctgatacaatgtctgcgggaggtggcggcccattgggcgacaataaccaaggtgccgatggagtgggcaatgcctcgggagattggcattgcgattccacgtggatgggggacagagtcgtcaccaagtccacccgaacctgggtgctgcccagctacaacaaccaccagtaccgagagatcaaaagcggctccgtcgacggaagcaacgccaacgcctactttggatacagcaccccctgggggtactttgactttaaccgcttccacagccactggagcccccgagactggcaaagactcatcaacaactactggggcttcagaccccggtccctcagagtcaaaatcttcaacattcaagtcaaagaggtcacggtgcaggactccaccaccaccatcgccaacaacctcacctccaccgtccaagtgtttacggacgacgactaccagctgccctacgtcgtcggcaacgggaccgagggatgcctgccggccttccctccgcaggtctttacgctgccgcagtacggttacgcgacactgaaccgcgacaacacagaaaatcccaccgagaggagcagcttcttctgcctagagtactttcccagcaagatgctgagaacgggcaacaactttgagtttacctacaactttgaggaggtgcccttccactccagcttcgctcccagtcagaacctcttcaagctggccaacccgctggtggaccagtacttgtaccgcttcgtgagcacaaataacactggcggagtccagttcaacaagaacctggccgggagatacgccaacacctacaaaaactggttcccggggcccatgggccgaacccagggctggaacctgggctccggggtcaaccgcgccagtgtcagcgccttcgccacgaccaataggatggagctcgagggcgcgagttaccaggtgcccccgcagccgaacggcatgaccaacaacctccagggcagcaacacctatgccctggagaacactatgatcttcaacagccagccggcgaacccgggcaccaccgccacgtacctcgagggcaacatgctcatcaccagcgagagcgagacgcagccggtgaaccgcgtggcgtacaacgtcggcgggcagatggccaccaacaaccagagctccaccactgcccccgcgaccggcacgtacaacctccaggaaatcgtgcccggcagcgtgtggatggagagggacgtgtacctccaaggacccatctgggccaagatcccagagacgggggcgcactttcacccctctccggccatgggcggattcggactcaaacacccaccgcccatgatgctcatcaagagcacgcctgtgcccggaaatatcaccagcttctcggacgtgcccgtcagcagcttcatcacccagtacagcaccgggcaggtcaccgtggagatggagtgggagctcaagaaggaaaactccaagaggtggaacccagagatccagtacacaaacaactacaacgacccccagtttgtggactttgccccggacagcaccggggaatacagaaccaccagacctatcggaacccgataccttacccgacccctttaa

SEQ ID NO: 788 - DNA, 2175 bp, Artificial Sequence
  Description of Artificial Sequence: Synthetic polynucleotide
atgtcttttgttgatcaccctccagattggttggaagaagttggtgaaggtcttcgcgagtttttgggccctgaagcgggcccaccgaaaccaaaacccaatcagcagcatcaagatcaagcccgtggtcttgtgctgcctggttataactatctcggacccggaaacggtctcgatcgaggagagcctgtcaacagggcagacgaggtcgcgcgagagcacgacatctcgtacaacgagcagcttgaggcgggagacaacccctacctcaagtacaaccacgcggacgccgagtttcaggagaagctcgccgacgacacatccttcgggggaaacctcggaaaggcagtctttcaggccaagaaaagggttctcgaaccttttggcctggttgaagagggtgctaagacggcccctaccggaaagcggatagacgaccactttccaaaaagaaagaaggtccggaccgaagaggactccaagccttccacctcgtcagacgccgaagctggacccagcggatcccagcagctgcaaatcccagcccaaccagcctcaagtttgggagctgatacaatgtctgcgggaggtggcggcccattgggcgacaataaccaaggtgccgatggagtgggcaatgcctcgggagattggcattgcgattccacgtggatgggggacagagtcgtcaccaagtccacccgaacctgggtgccgcccagctacaacaaccaccagtaccgagagatcaaaagcggctccgtcgacggaagcaacgccaacgcctactttggatacagcaccccctgggggtactttgactttaaccgcttccacagccactggagcccccgagactggcaaagactcatcaacaactactggggcttcagaccccggtccctcagagtcaaaatcttcaacattcaagtcaaagaggtcacggtgcaggactccaccaccaccatcgccaacaacctcacctccaccgtccaagtgtttacggacgacgactaccagctgccctacgtcgtcggcaacgggaccgagggatgcctgccggccttccctccgcaggtctttacgctgccgcagtacggttacgcgacgctgaaccgcgacaacacagaaaatcccaccgagaggagcagcttcttctgcctagagtactttcccagcaagatgctgagaacgggcaacaactttgagtttacctacaactttgaggaggtgcccttccactccagcttcgctcccagtcagaacctcttcaagctggccaacccgctggtggaccagtacttgtaccgcttcgtgagcacaaataacactggcggagtccagttcaacaagaacctggccgggagatacgccaacacctacaaaaactggttcccggggcccatgggccgaacccagggctggaacctgggctccggggtcaaccgcgccagtgtcagcgccttcgccacgaccaataggatggagctcgagggcgcgagttaccaggtgcccccgcagccgaacggcatgaccaacaacctccagggcagcaacacctatgccctggagaacactatgatcttcaacagccagccggcgaacccgggcaccaccgccacgtacctcgagggcaacatgctcatcaccagcgagagcgagacgcagccggtgaaccgcgtggcgtgcaacgtcggcgggcagatggccaccaacaaccagagctccaccactgcccccgcgaccggcacgtacaacctccaggaaatcgtgcccggcagcgtgtggatggagagggacgtgtacctccaaggacccatctgggccaagatcccagagacgggggcgcactttcacccctctccggccatgggcggattcggactcaaacacccaccgcccatgatgctcatcaagaacacgcctgtgcccggaaatatcaccagcttctcggacgtgcccgtcagcagcttcatcacccagtacagcaccgggcaggtcaccgtggagatggagtgggagctcaagaaggaaaactccaagaggtggaacccagagatccagtacacaaacaactacaacgacccccagtttgtggactttgccccggacagcaccggggaatacagaaccaccagacctattggaacccgataccttacccgacccctttaa

SEQ ID NO: 789 - DNA, 2175 bp, Artificial Sequence
  Description of Artificial Sequence: Synthetic polynucleotide
atgtcttttgttgatcaccctccagattggttggaagaagttggtgaaggtcttcgcgagtttttgggccttgaagcgggcccaccgaaaccaaaacccaatcagcagcatcaagatcaagcccgtggtcttgtgctgcctggttataactatctcggacccggaaacggtctcgatcgaggagagcctgtcaacagggcagacgaggtcgcgcgagagcacgacatctcgtacaacgagcagcttgaggcgggagacaacccctacctcaagtacaaccacgcggacgccgagtttcaggagaagctcgccgacgacacatccttcgggggaaacctcggaaaggcagtctttcaggccaagaaaagggttctcgaaccttttggcctggttgaagagggtgctaagacggcccctaccggaaagcggatagacgaccactttccaaaaagaaagaaggcccggaccgaagaggactccaagccttccacctcgtcagacgccgaagctggacccagcggatcccagcagctgcaaatcccagcccaaccagcctcaagtttgggagctgatacaatgtctgcgggaggtggcggcccattgggcgacaataaccaaggtgccgatggagtgggcaatgcctcgggagattggcattgcgattccacgtggatgggggacagagtcgtcaccaagtccacccgaacctgggtgctgcccagctacaacaaccaccagtaccgagagatcaaaagcggctccgtcgacggaagcaacgccaacgcctactttggatacagcaccccctgggggtactttgactttaaccgcttccacagccactggagcccccgagactggcaaagactcatcaacaactactggggcttcagaccccggtccctcagagtcaaaatcttcaacattcaagtcaaagaggtcacggtgcaggactccaccaccaccatcgccaacaacctcacctccaccgtccaagtgtttacggacgacgactaccagctgccctacgtcgtcggcaacgggaccgagggatgcctgccggccttccctccgcaggtctttacgctgccgcagtacggttacgcgacgctgaaccgcgacaacaccgaaaatcccaccgagaggagcagcttcttctgcctagagtactttcccagcaagatgctgagaacgggcaacaactttgagtttacctacaactttgaggaggtgcccttccactccagcttcgctcccagtcagaacctcttcaagctggccaacccgctggtggaccagtacttgtaccgcttcgtgagcacaaataacactggcggagtccagttcaacaagaacctggccgggagatacgccaacacctacaaaaactggttcccggggcccatgggccgaacccagggctggaacctgggctccggggtcaaccgcgccagtgtcagcgccttcgccacgaccaataggatggagctcgagggcgcgagttaccaggtgcccccgcagccgaacggcatgaccaacaacctccagggcagcaacacctatgccctggagaacactatgatcttcaacagccagccggcgaacccgggcaccaccgccacgtacctcgagggcaacatgctcatcaccagcgagagcgagacgcagccggtgaaccgcgtggcgtacaacgtcggcgggcagatggccaccaacaaccagagctccaccactgcccccgcgaccggcgcgtacaacctccaggaaatcgtgcccggcagcgtgtggatggagagggacgtgtacctccaaggacccatctgggccaagatcccagagacgggggcgcactttcacccctctccggccatgggcggattcggactcaaacacccaccgcccatgatgctcatcaagaacacgcctgtgcccggaaatatcaccagcttctcggacgtgcccgtcagcagcttcatcacccagtacagcaccgggcaggtcaccgtggagatggagtgggagctcaagaaggaaaactccaagaggtggaacccagagatccagtacacaaacaactacaacgacccccagtttgtggactttgccccggacagcaccggggaatacagaaccaccagacctatcggaacccgataccttacccgacccctttaa

SEQ ID NO: 790 - DNA, 2175 bp, Artificial Sequence
  Description of Artificial Sequence: Synthetic polynucleotide
atgtcttttgttgatcaccctccagattggttggaagaagttggtgaaggtcttcgcgagtttttgggccttgaagcgggcccaccgaaaccaaaacccaatcagcagcatcaagatcaagcccgtggtcttgtgctgcctggttataactatctcggacccggaaacggtctcgatcgaggagagcctgtcaacagggcagacggggtcgcgcgagagcacgacatctcgtacaacgagcagcttgaggcgggagacaacccctacctcaagtacaaccacgcggacgccgagtttcaggagaagctcgccgacgacacatccttcgggggaaacctcggaaaggcagtctttcaggccaagaaaagggttctcgaaccttttggcctggttgaagagggtgctaagacggcccctaccggaaagcggatagacgaccactttccaaaaagaaagaaggcccggaccgaagaggactccaagccttccacctcgtcagacgccgaagctggacccagcggatcccagcagctgcaaatcccagcccaaccagcctcaagtttgggagctgatacaatgtctgcgggaggtggcggcccattgggcgacaataaccaaggtgccgatggagtgggcaatgcctcgggagattggcattgcgattccacgtggatgggggacagagtcgtcaccaagtccacccgaacctgggtgctgcccagctacaacaaccaccagtaccgagagatcaaaagcggctccgtcgacggaagcaacgccaacgcctactttggatacagcaccccctgggggtactttgactttaaccgcttccacagccactggagcccccgagactggcaaagactcatcaacaactactggggcttcagaccccggtccctcagagtcaaaatcttcaacattcaagtcaaagaggtcacggtgcaggactccaccaccaccatcgccaacaacctcacctccaccgtccaagcgtttacggacgacgactaccagctgccctacgtcgtcggcaacgggaccgagggatgcctgccggccttccctccgcaggtctttacgctgccgcagtacggttacgcgacgctgaaccgcgacaacacagaaaatcccaccgagaggagcagcttcttctgcctagagtactttcccagcaagatgctgagaacgggcaacaactttgagtttacctacaactttgaggaggtgcccttccactccagcttcgctcccagtcagaacctcttcaagctggccaacccgctggtggaccagtacttgtaccgcttcgtgagcacaaataacactggcggagtccagttcaacaagaacctggccgggagatacgccaacacctacaaaaactggttcccggggcccatgggccgaacccagggctggaacctgggctccggggtcaaccgcgccagtgtcagcgccttcgccacgaccaataggatggagctcgagggcgcgagttaccaggtgcccccgcagccgaacggcatgaccaacaacctccagggcagcaacacctatgccctggagaacactatgatcttcaacagccagccggcgaacccgggcaccaccgccacgtacctcgagggcaacatgctcatcaccagcgagagcgagacgcagccggtgaaccgcgtggcgtacaacgtcggcgggcagatggccaccaacaaccagagctccaccactgcccccgcgaccggcacgtacaacctccaggaaatcgtgcccggcagcgtgtggatggagagggacgtgtacctccaaggacccatctgggccaagatcccagagacgggggcgcactttcacccctctccggccatgggcggattcggactcaaacacccaccgcccatgatgctcatcaagaacacgcctgtgcccggaaatatcaccagcttctcggacgtgcccgtcagcagcttcatcacccagtacagcaccgggcaggtcaccgtggagatggagtgggagctcaagaaggaaaactccaagaggtggaacccagagatccagtacacaaacaactacaacgacccccagtttgtggactttgccccggacagcaccggggaatacagaaccaccagacctatcggaacccgataccttacccgacccctttaa

SEQ ID NO: 791 - DNA, 2175 bp, Artificial Sequence
  Description of Artificial Sequence: Synthetic polynucleotide
atgtcttttgttgatcaccctccagattggttggaagaagttggtgaaggtcttcgcgagtttttgggccttgaagcgggcccaccgaaaccaaaacccaatcagcagcatcaagatcaagcccgtggtcttgtgctgcctggttataactatctcggacccggaaacggtctcgatcgaggagagcctgtcaacagggcagacgaggtcgcgcgagagcacgacatctcgtacaacgagcagcttgaggcgggagacaacccctacctcaagtacaaccacgcggacgccgagtttcaggagaagctcgccgacgacacatccttcgggggaaacctcggaaaggcagtctttcaggccaagaaaagggttctcgaaccttttggcctggttgaagagggtgctaagacggcccctaccggaaagcggatagacgaccactttccaaaaagaaagaaggcccggaccgaagaggactccaagccttccacctcgtcagacgccgaagctggacccagcggatcccagcagctgcaaatcccagcccaaccagcctcaagtttgggagctgatacaatgtctgcgggaggtggcggcccattgggcgacaataaccaaggtgccgatggagtgggcaatgcctcgggagattggcattgcgattccacgtggatgggggacagagtcgtcaccaagtccacccgaacctgggtgctgcccagctacaacaaccaccagtaccgagagatcaaaagcggctccgtcgacggaagcaacgccaacgcctactttggatacagcaccccctgggggtactttgactttaaccgcttccacagccactggagcccccgagactggcaaagactcatcaacaactactggggcttcagaccccggtccctcagagtcaaaatcttcaacattcaagtcaaagaggtcacggtgcaggactccaccaccaccatcgccaacaacctcacctccaccgtccaagtgtttacggacgacgactaccagctgccctacgtcgtcggcaacgggaccgagggatgcctgccggccttccctccgcaggtctttacgctgccgcagtacggttacgcgacgctgaaccgcgacaacacagaaaatcccaccgagaggagcagcttcttctgcctagagtactttcccagcaagatgctgagaacgggcaacaactttgagtttacctacaactttgaggaggtgcccttccactccagcttcgctcccagtcagaacctcttcaagctggccaacccgctggtggaccagtacttgtaccgcttcgtgagcacaaataacactggcggagtccagttcaacaagaacctggccgggagatacgccaacacctacaaaaactggttcccggggcccatgggccgaacccagggctggaacctgggctccggggtcaaccgcgccagtgtcagcgccttcgccacgaccaataggatggagctcgagggcgcgagttactaggtgcccccgcagccgaacggcatgaccaacaacctccagggcagcaacacctatgccctggagaacactatgatcttcaacagccagccggcgaacccgggcaccaccgccacgtacctcgagggcaacatgctcatcaccagcgagagcgagacgcagccggtgaaccgcgtggcgtacaacgtcggcgggcagatggccaccaacaaccagagctccaccactgcccccgcgaccggcacgtacaacctccaggaaatcgtgcccggcagcgtgtggatggagggggacgtgtacctccaaggacccatctgggccaagatcccagagacgggggcgcactttcacccctctccggccatgggcggattcggactcaagcacccaccgcccatgatgctcatcaagaacacgcctgtgcccggaaatatcaccagcttctcggacgtgcccgtcagcagcttcatcacccagtacagcaccgggcaggtcaccgtggagatggagtgggagctcaagaaggaaaactccaagaggtggaacccagagatccagtacacaaacaactacaacgacccccagtttgtggactttgccccggacagcaccggggaatacagaaccaccagacctatcggaacccgataccttacccgacccctttaa

SEQ ID NO: 792 - DNA, 2175 bp, Artificial Sequence
  Description of Artificial Sequence: Synthetic polynucleotide
atgtcttttgttgatcaccctccagattggttggaagaagttggtgaaggtcttcgcgagtttttgggccttgaagcgggcccaccgaaaccaaaacccaatcagcagcatcaagatcaagcccgtggtcttgtgctgcctggttataactatctcggacccggaaacggtctcgatcgaggagagcctgtcaacagggcagacgaggtcgcgcgagagcacgacatctcgtacaacgagcagcttgaggcgggagacaacccctacctcaagtacaaccacgcggacgccgagtttcaggagaagctcgccgacgacacatccttcgggggaaacctcggaaaggcagtctttcaggccaagaaaagggttctcgaaccttttggcctggttgaagagggtgctaagacggcccctaccggaaagcggatagacgaccactttccaaaaagaaagaaggtccggaccgaagaggactccaagccttccacctcgtcagacgccgaagctggacccagcggatcccagcagctgcaaatcccagcccaaccagcctcaagtttgggagctgatacaatgtctgcgggaggtggcggcccattgggcgacaataaccaaggtgccgatggagtgggcaatgcctcgggagattggcattgcgattccacgtggatgggggacagagtcgtcaccaagtccacccgaacctgggtgctgcccagctacaacaaccaccagtaccgagagatcaaaagcggctccgtcgacggaagcaacgccaacgcctactttggatacagcaccccctgggggtactttgactttaaccgcttccacagccactggagcccccgagactggcaaagactcatcaacaactactggggcttcagaccccggtccctcagagtcaaaatcttcaacattcaagtcaaagaggtcacggtgcaggactccaccaccaccatcgccaacaacctcacctccaccgtccaagtgtttacggacgacgactaccagctgccctacgtcgtcggcaacgggaccgagggatgcctgccggccttccctccgcaggtctttacgctgccgcagtacggttacgcgacgctgaaccgcgacaacacagaaaatcccaccgagaggagcagcttcttctgcctagagtactttcccagcaagatgctgagaacgggcaacaactttgagtttacctacaactttgaggaggtgcccttccactccagcttcgctcccagtcagaacctcttcaagctggccaacccgctggtggaccagtacttgtaccgcttcgtgagcacaaataacactggcggagtccagttcaacaagaacctggccgggagatacgccaacacctacaaaaactggttcccggggcccatgggccgaacccagggctggaacctgggctccggggtcaaccgcgccagtgtcagcgccttcgccacgaccaataggatggagctcgagggcgcgagttaccaggtgcccccgcagccgaacggcatgaccaacaacctccagggcagcaacacctatgccctggagaacactatgatcttcaacagccagccggcgaacccgggcaccaccgccacgtacctcgagggcaacatgctcatcaccagcgagagcgagacgcagccggtgaaccgcgtggcgtacaacgtcggcgggcagatggccaccaacaaccagagctccaccactgcccccgcgaccggcacgtacaacctccaggaaatcgtgcccggcagcgtgtggatggagagggacgtgtacctccaaggacccatctgggccaagatcccagagacgggggcgcactttcacccctctccggccatgggcggattcggactcaaacacccaccgcccatgatgctcatcaagaacacgcctgtgcccggaaatatcaccagcttctcggacgtgcccgtcagcagcttcatcacccagtacagcaccgggcaggtcaccgtggagatggagtgggagctcaagaaggaaaactccgagaggtggaacccagagatccagtacacaaacaactacaacgacccccagtttgtggactttgccccggacagcaccggggaatacagaaccaccagacctattggaacccgataccttacccgacccctttaa

SEQ ID NO: 793 - DNA, 2175 bp, Artificial Sequence
  Description of Artificial Sequence: Synthetic polynucleotide
atgtcttttgttgatcaccctccagattggttggaagaagttggtgaaggtcttcgcgagtttttgggccttgaagcgggcccaccgaaaccaaaacccaatcagcagcatcaagatcaagcccgtggtcttgtgctgcctggttataactatctcggacccggaaacggtctcgatcgaggagagcctgtcaacagggcagacgaggtcgcgcgagagcacgacatctcgtacagcgagcagcttgaggcgggagacaacccctacctcaagtacaaccacgcggacgccgagtttcaggagaagctcgccgacgacacatccttcgggggaaacctcggaaaggcagtctttcaggccaagaaaagggttctcgaaccttttggcctggttgaagagggtgctaagacggcccctaccggaaagcggatagacgaccactttccaaaaagaaagaaggcccggaccgaagaggactccaagccttccacctcgtcagacgccgaagctggacccagcggatcccagcagctgcaaatcccagcccaaccagcctcaagtttgggagctgatacaatgtctgcgggaggtggcggcccattgggcgacaataaccaaggtgccgatggagtgggcaatgcctcgggagattggcattgcgattccacgtggatgggggacagagtcgtcaccaagtccacccgaacctgggtgctgcccagctacaacaaccaccagtaccgagagatcaaaagcggctccgtcgacggaagcaacgccaacgcctactttggatacagcaccccctgggggtactttgactttaaccgcttccacagccactggagcccccgagactggcaaagactcatcaacaactactggggcttcagaccccggtccctcagagtcaaaatcttcaacattcaagtcaaagaggtcacggtgcaggactccaccaccaccatcgccaacaacctcacctccaccgtccaagtgtttacggacgacgactaccagctgccctacgtcgtcggcaacgggaccgagggatgcctgccggccttccctccgcaggtctttacgctgccgcagtacggttacgcgacgctgaaccgcgacaacacagaaaatcccaccgagaggagcagcttcttctgcctagagtactttcccagcaagatgctgagaacgggcaacaactttgagtttacctacaactttgaggaggtgcccttccactccagcttcgctcccagtcagaacctcttcaagctggccaacccgctggtggaccagtacttgtaccgcttcgtgagcacaaataacactggcggagtccagttcaacaagaacctggccgggagatacgccaacacctacaaaaactggttcccggggcccatgggccgaacccagggctggaacctgggctccggggtcaaccgcgccagtgtcagcgccttcgccacgaccaataggatggagctcgagggcgcgagttaccaggtgcccccgcagccgaacggcatgaccaacaacctccagggcagcaacacctatgccctggagaacactatgatcttcaacagccagccggcgaacccgggcaccaccgccacgtacctcgagggcaacatgctcatcaccagcgagagcgagacgcagccggtgaaccgcgtggcgtacaacgtcggcgggcagatggccaccaacaaccagagctccaccactgcccccgcgaccggcacgtacaacctccaggaaatcgtgcccggcagcgtgtggatggagagggacgtgtacctccaaggacccatctgggccaagatcccagagacgggggcgcactttcacccctctccggccatgggcggattcggactcaaacacccaccgcccatgatgctcatcaagaacacgcctgtgcccggaaatatcaccagcttctcggacgtgcccgtcagcagcttcatcacccagtacagcaccgggcaggtcaccgtggagatggagtgggagctcaagaaggaaaactccaagaggtggaacccagagatccagtacacaaacaactacaacgacccccagtttgtggactttgccccggacagcaccggggaatacagaaccgccagacctatcggaacccgataccttacccgacccctttaa

SEQ ID NO: 794 - DNA, 2175 bp, Artificial Sequence
  Description of Artificial Sequence: Synthetic polynucleotide
atgtcttttgttgatcaccctccagattggttggaagaagttggtgaaggtcttcgcgagtttttgggccctgaagcgggcccaccgaaaccaaaacccaatcagcagcatcaagatcaagcccgtggtcttgtgctgcctggttataactatctcggacccggaaacggtctcgatcgaggagagcctgtcaacagggcagacgaggtcgcgcgagagcacgacatctcgtacaacgagcagcttgaggcgggagacaacccctacctcaagtacaaccacgcggacgccgagtttcaggagaagctcgccgacgacacatccttcgggggaaacctcggaaaggcagtctttcaggccaagaaaagggttctcgaaccttttggcctggttgaagagggtgctaagacggcccctaccggaaagcggatagacgaccactttccaaaaagaaagaaggcccggaccgaagaggactccaagccttccacctcgtcagacgccgaagctggacccagcggatcccagcagctgcaaatcccagcccaaccagcctcaagtttgggagctgatacaatgtctgcgggaggtggcggcccattgggcgacaataaccaaggtgccgatggagtgggcaatgcctcgggagattggcattgcgattccacgtggatgggggacagagtcgtcaccaagtccacccgaacctgggtgctgcccagctacaacaaccaccagtaccgagagatcaaaagcggctccgtcgacggaagcaacgccaacgcctactttggatacagcaccccctgggggtactttgactttaaccgcttccacagccactggagcccccgagactggcaaagactcatcaacaactactggggcttcagaccccggtccctcagagtcaaaatcttcaacattcaagtcaaagaggtcacggtgcaggactccaccaccaccatcgccaacaacctcacctccaccgtccaagtgtttacggacgacgactaccagctgccctacgtcgtcggcaacgggaccgagggatgcctgccggccttccctccgcaggtctttacgctgccgcagtacggttacgcgacgctgaaccgcgacaacacagaaaatcccaccgagaggagcagcttcttctgcctagagtactttcccagcaagatgctgagaacgggcaacaactttgagtttacctacaactttgaggaggtgcccttccactccagcttcgctcccagtcagaacctcttcaagctggccaacccgctggtggaccagtacttgtaccgcttcgtgagcacaaataacactggcggagtccagttcaacaagaacctggccgggagatacgccaacacctacaaaaactggttcccggggcccatgggccgaacccagggctggaacctgggctccggggtcaaccgcgccagtgtcagcgccttcgccacgaccaataggatggagctcgagggcgcgagttaccaggtgcccccgcagccgaacggcatgaccaacaacctccagggcagcaacacctatgccctggagaacactatgatcttcaacagccagccggcgaacccgggcaccaccgccacgtacctcgagggcaacatgctcatcaccagcgagagcgagacgcagccggtgaaccgcgtggcgtacaacgtcggcgggcagatgaccaccaacaaccagagctccaccactgcccccgcgaccggcacgtacaacctccaggaaatcgtgcccggcagcgtgtggatggagagggacgtgtacccccaaggacccatctgggccaagatcccagagacgggggcgcactttcacccctctccggccatgggcggattcggactcaaacacccaccgcccatgatgctcatcaagaacacgcctgtgcccggaaatatcaccagcttctcggacgtgcccgtcagcagcttcatcacccagtacagcaccgggcaggtcaccgtggagatggagtgggagctcaagaaggaaaactccaagaggtggaacccagagatccagtacacaaacaactacaacgacccccagtttgtggactttgccccggacagcaccggggaatacaggaccaccagacctatcggaacccgataccttacccgacccctttaa

SEQ ID NO: 795 - DNA, 2175 bp, Artificial Sequence
  Description of Artificial Sequence: Synthetic polynucleotide
atgtcttttgttgatcaccctccagattggttggaagaagttggtgaaggtcttcgcgagtttttgggccttgaagcgggcccaccgaaaccaaaacccaatcagcagcatcaagatcaagcccgtggtcttgtgctgcctggttataactatctcggacccggaaacggtctcgatcgaggagagcctgtcaacagggcagacgaggtcgcgcgagagcacgacatctcgtacaacgagcagcttgaggcgggagacaacccctacctcaagtacaaccacgcggacgccgagtttcaggagaagctcgccgacgacacatccttcgggggaaacctcggaaaggcagtctttcaggccaagaaaagggttctcgaaccttttggcctggttgaagagggtgctaagacggcccctaccggaaagcggatagacgaccactttccaaaaagaaagaaggcccggaccgaagaggactccaagccttccacctcgtcagacgccgaagctggacccagcggatcccagcagctgcaaatcccagcccaaccagcctcaagtttgggagctgatacaatgtctgcgggaggtggcggcccattgggcgacaataaccaaggtgccgatggagtgggcaatgcctcgggagattggcattgcgattccacgtggatgggggacagagtcgtcaccaagtccacccgaacctgggtgctgcccagctacaacaaccaccagtaccgagagatcaaaagcggctccgtcgacggaagcaacgccaacgcctactttggatacagcaccccctgggggtactttgactttaaccgcttccacagccactggagcccccgagactggcaaagactcatcaacaactactggggcttcagaccccggtccctcagagtcaaaatcttcaacattcaagtcaaagaggtcacggtgcaggactccaccaccaccatcgccaacaacctcacctccaccgtccaagtgtttacggacgacgactaccagctgccctacgtcgtcggcaacgggaccgagggatgcctgccggccttccctccgcaggtctttacgctgccgcagtacggttacgcgacgctgaaccgcgacaacacagaaaatcccaccgagaggagcagcttcctctgcctagagtactttcccagcaagatgctgagaacgggcaacaactttgagtttacctacaactttgaggaggtgcccttccactccagcttcgctcccagtcagaacctcttcaagctggccaacccgctggtggaccagtacttgtaccgcttcgtgagcacaaataacactggcggagtccagttcaacaagaacctggccgggagatacgccaacacctacaaaaactggttcccggggcccatgggccgaacccagggctggaacctgggctccggggtcaaccgcgccagtgtcagcgccttcgccacgaccaataggatggagctcgagggcgcgagttaccaggtgcccccgcagccgaacggcatgaccaacaacctccagggcagcaacacctatgccctggagaacactatgatcttcaacagccagccggcgaacccgggcaccaccgccacgtacctcgagggcaacatgctcatcaccagcgagagcgagacgcagccggtgaaccgcgtggcgtacaacgtcggcgggcagatggccaccaacaaccagagctccaccactgcccccgcgaccggcacgtacaacctccaggaaatcgtgcccggcagcgtgtggatgaagagggacgtgtacctccaaggacccatctgggccaagatcccagagacgggggcgcactttcacccctctccggccatgggcggattcggactcaaacacccaccgcccatgatgctcatcaagaacacgcctgtgcccggaaatatcaccagcttctcggacgtgcccgtcagcagcttcatcacccagtacagcaccgggcaggtcaccgtggagatggagtgggagctcaagaaggaaaactccaagaggtggaacccagagatccagtacacaaacaactacaacgacccccagtttgtggactttgccccggacagcaccggggaatacagaaccaccagacctatcggaacccgataccttacccgacccctttaa

SEQ ID NO: 796 - DNA, 2175 bp, Artificial Sequence
  Description of Artificial Sequence: Synthetic polynucleotide
atgtcttttgttgatcaccctccagattggttggaagaagttggtgaaggtcttcgcgagtttttgggccttgaggcgggcccaccgaaaccaaaacccaatcagcagcatcaagatcaagcccgtggtcttgtgctgcctggttataactatctcggacccggaaacggtctcgatcgaggagagcctgtcaacagggcagacgaggtcgcgcgagagcacgacatctcgtacaacgagcagcttgaggcgggagacaacccctacctcaagtacaaccacgcggacgccgagtttcaggagaagctcgccgacgacacatccttcgggggaaacctcggaaaggcagtctttcaggccaagaaaagggttctcgaaccttttggcctggttgaagagggtgctaagacggcccctaccggaaagcggatagacgaccactttccaaaaagaaagaaggcccggaccgaagaggactccaagccttccaccccgtcagacgccgaagctggacccagcggatcccagcagctgcaaatcccagcccaaccagcctcaagtttgggagctgatacaatgtctgcgggaggtggcggcccattgggcgacaataaccaaggtgccgatggagtgggcaatgcctcgggagattggcattgcgattccacgtggatgggggacagagtcgtcaccaagtccacccgaacctgggtgctgcccagctacaacaaccaccagtaccgagagatcaaaagcggctccgtcgacggaagcaacgccaacgcctactttggatacagcaccccctgggggtactttgactttaaccgcttccacagccactggagcccccgagactggcaaagactcatcaacaactactggggcttcagaccccggtccctcagagtcaaaatcttcaacattcaagtcaaagaggtcacggtgcaggactccaccaccaccatcgccaacaacctcacctccaccgtccaagtgtttacggacgacgactaccagctgccctacgtcgtcggcaacgggaccgagggatgcctgccggccttccctccgcaggtctttacgctgccgcagtacggttacgcgacgctgaaccgcgacaacacagaaaatcccaccgagaggagcagcttcttctgcctagagtactttcccagcaagatgctgagaacgggcaacaactttgagtttacctacaactttgaggaggtgcccttccactccagcttcgctcccagtcagaacctcttcaagctggccaacccgctggtggaccagtacttgtaccgcttcgtgagcacaaataacactggcggagtccagttcaacaagaacctggccgggagatacgccaacacctacaaaaactggttcccggggcccatgggccgaacccagggctggaacctgggctccggggtcaaccgcgccagtgtcagcgccttcgccacgaccaataggatggagctcgagggcgcgagttaccaggtgcccccgcagccgaacggcatgaccaacaacctccagggcagcaacacctatgccctggagaacactatgatcttcaacagccagccggcgaacccgggcaccaccgccacgtacctcgagggcaacatgctcatcaccagcgagagcgagacgcagccggtgaaccgcgtggcgtacaacgtcggcgggcagatggccaccaacaaccagagctccaccactgcccccgcgaccggcacgtacaacctccaggaaatcgtgcccggcagcgtgtggatggagagggacgtgtacctccaaggacccatctgggccaagatcccagagacgggggcgcactttcacccctctccggccatgggcggattcggactcaaacacccaccgcccatgatgctcatcaagaacacgcctgtgcccggaaatatcaccagcttctcggacgtgcccgtcagcagcttcatcacccagtacagcaccgggcaggtcaccgtggagatggagtgggagctcaagaaggaaaactccaagaggtggaacccagagatccagtacacaaacaactacaacgacccccagtttgtggactttgccccggacagcaccggggaatacagaaccaccagacctatcggaacccgataccttacccgacccctttaa

SEQ ID NO: 797 - DNA, 2175 bp, Artificial Sequence
  Description of Artificial Sequence: Synthetic polynucleotide
atgtcttttgttgatcaccctccagattggttggaagaagttggtgaaggtcttcgcgagtttttgggccttgaagcgggcccaccgaaaccaaaacccaatcagcagcatcaagatcaagcccgtggtcttgtgctgcctggttataactatctcggacccggaaacggtctcgatcgaggagagcctgtcaacagggcagacgaggtcgcgcgagagcacgacatctcgtacaacgagcagcttgaggcgggagacaacccctacctcaagtacaaccacgcggacgccgagtttcaggagaagctcgccgacgacacatccttcgggggaaacctcggaaaggcagtctttcaggccaagaaaagggttctcgaaccttttggcctggttgaagagggtgctaagacggcccctaccggaaagcggatagacgaccactttccaaaaagaaagaaggcccggaccgaagaggactccaagccttccacctcgtcagacgccgaagctggacccagcggatcccagcagctgcaaatcccagcccaaccagcctcaagtttgggagctgatacaatgtctgcgggaggtggcggcccattgggcgacaataaccaaggtgccgatggagtgggcaatgcctcgggagattggcattgcgattccacgtggatgggggacagagtcgtcaccaagtccacccgaacctgggtgctgcccagctacaacaaccaccagtaccgagagatcaaaagcggctccgtcgacggaagcaacgccaacgcctactttggatacagcaccccctgggggtactttgactttaaccgcttccacagccactggagcccccgagactggcaaagactcatcaacaactactggggcttcagaccccggtccctcagagtcaaaatcttcaacattcaagtcaaagaggtcacggtgcaggactccaccaccaccatcgccaacaacctcacctccaccgtccaagtgtttacggacgacgactaccagctgccctacgtcgtcggcaacgggaccgagggatgcctgccggccttccctccgcaggtctttacgctgccgcagtacggttacgcgacgctgaaccgcgacaacacagaaaatcccaccgagaggagcagcttcttctgcctagagtactttcccagcaagatgctgagaacgggcaacaactttgagtttacctacaactttgaggaggtgcccttccactccagcttcgctcccagtcagaacctcttcaagctggccaacccgctggtggaccagtacttgtaccgcttcgtgagcacaaataacactggcggagtccagttcaacaagaacctggccgggagatacgccaacacccacaaaaactggttcccggggcccatgggccgaacccagggctggaacctgggctccggggtcaaccgcgccagtgtcagcgccttcgccacgaccaataggatggagctcgagggcgcgagttaccaggtgcccccgcagtcgaacggcatgaccaacaacctccggggcagcaacacctatgccctggagaacactatgatcttcaacagccagccggcgaacccgggcaccaccgccacgtacctcgagggcaacatgctcatcaccagcgagagcgagacgcagccggtgaaccgcgtggcgtacaacgtcggcgggcagatggccaccaacaaccagagctccaccactgcccccgcgaccggcacgtacaacctccaggaaatcgtgcccggcagcgtgtggatggagagggacgtgtacctccaaggacccatctgggccaagatcccagagacgggggcgcactttcacccctctccggccatgggcggattcggactcaaacacccaccgcccatgatgctcatcaagaacacgcctgtgcccggaaatatcaccagcttctcggacgtgcccgtcagcagcttcatcacccagtacagcaccgggcaggtcaccgtggagatggagtgggagctcaagaaggaaaactccaagaggtggaacccagagatccagtacacaaacaactacaacgacccccagtttgtggactttgccccggacagcaccggggaatacagaaccaccagacctatcggaacccgataccttacccgacccctttaa

SEQ ID NO: 798 - DNA, 2175 bp, Artificial Sequence
  Description of Artificial Sequence: Synthetic polynucleotide
atgtcttttgttgatcaccctccagattggttggaagaagttggtgaaggtcttcgcgagtttttgggccttgaagcgggcccaccgaaaccaaaacccaatcagcagcatcaagatcaagcccgtggtcttgtgctgcctggttataactatctcggacccggaaacggtctcgatcgaggagagcctgtcaacagggcagacgaggtcgcgcgagagcacgacatctcgtacaacgagcagcttgaggcgggagacaacccctacctcaagtacaaccacgcggacgccgagtttcaggagaagctcgccgacgacacatccttcgggggaaacctcggaaaggcagtctttcaggccaagaaaagggttctcgaaccttttggcctggttgaagagggtgctaagacggcccctaccggaaagcggatagacgaccactttccaaaaagaaagaaggcccggaccgaagaggactccaagccttccacctcgtcagacgccgaagctggacccagcggatcccagcagctgcaaatcccagcccaaccagcctcaagtttgggagctgatacaatgtctgcgggaggtggcggcccattgggcgacaataaccaaggtgccgatggagtgggcaatgcctcgggagattggcattgcgattccacgtggatgggggacagagtcgtcaccaagtccacccgaacctgggtgctgcccagctacaacaaccaccagtaccgagagatcaaaagcggctccgtcgacggaagcaacgccaacgcctactttggatacagcaccccctgggggtactttgactttaaccgcttccacagccactggagcccccgagactggcaaagactcatcaacaactactggggcttcagaccccggtccctcagagtcaaaatcttcaacattcaagtcaaagaggtcacggtgcaggactccaccaccaccatcgccaacaacctcacctccaccgtccaagtgtttacggacgacgactaccagctgccctacgtcgtcggcaacgggaccgagggatgcctgccggccttccctccgcaggtctttacgctgccgcagtacggttacgcgacgctgaaccgcgacaacacagaaaatcccaccgagaggagcagcttcttctgcctagagtactttcccagcaagatgctgagaacgggcaacaactttgagtttacctacaactttgaggaggtgcccttccactccagcttcgctcccagtcagaacctcttcaagctggccaacccgctggtggaccagtacttgtaccgcttcgtgagcacaaataacactggcggagtccagttcaacaagaacctggccgggagatacgccaacacctacaaaaactggttcccggggcccatgggccgaacccagggctggaacctgggctccggggtcaaccgcgccagtgtcagcgccttcgccacgaccaataggatggagctcgagggcgcgagttaccaggtgcccccgcagccgaacggcatgaccaacaacctccagggcagcaacacctatgccctggagaacactatgatcttcaacagccagccggcgaacccgggcaccaccgccacgtacctcgagggcaacatgctcatcaccagcgagagcgagacgcagccggtgaaccgcgtggcgtacagcgtcggcgggcagatggccaccaacaaccagagctccaccactgcccccacgaccggcacgtacaacctccaggaaatcgtgcccggcagcgtgtggatggagagggacgtgtacctccaaggacccatctgggccaagatcccagagacgggggcgcactttcacccctctccggccatgggcggattcagactcaaacacccaccgcccatgatgctcatcaagaacacgcctgtgcccggaaatatcaccagcttctcggacgtgcccgtcagcagcttcatcacccagtacagcaccgggcaggtcaccgtggagatggagtgggagctcaagaaggaaaactccaagaggtggaacccagagatccagtacacaaacaactacaacgacccccagtttgtggactttgccccggacagcaccggggaatacagaaccaccagacctatcggaacccgataccttacccgacccctttaa

SEQ ID NO: 799 - DNA, 2175 bp, Artificial Sequence
  Description of Artificial Sequence: Synthetic polynucleotide
atgtcttttgttgatcaccctccagattggttggaagaagttggtgaaggtcttcgcgagtttttgggccttgaagcgggcccaccgaaaccaaaacccaatcagcagcatcaagatcaagcccgtggtcttgtgctgcctggttataactatctcggacccggaaacggtctcgatcgaggagagcctgtcaacagggcagacgaggtcgcgcgagagcacgacatctcgtacaacgagcagcttgaggcgggagacaacccctacctcaagtacaaccacgcggacgccgagtttcaggagaagctcgccgacgacacatccttcgggggaaacctcggaaaggcagtctttcaggccaagaaaagggttctcgaaccttttggcctggttgaagagggtgctaagacggcccctaccggaaagcggatagacgaccactttccaaaaagaaagaaggcccggaccgaagaggactccaagccttccacctcgtcagacgccgaagctggacccagcggatcccagcagctgcaaatcccagcccaaccagcctcaagtttgggagctgatacaatgtctgcgggaggtggcggcccattgggcgacaataaccaaggtgccgatggagtgggcaatgcctcgggagattggcattgcgattccacgtggatgggggacagagtcgtcaccaagtccacccgaacctgggtgctgcccagctacaacaaccaccagtaccgagagatcaaaagcggctccgtcgacggaagcaacgccaacgcctactttggatacagcaccccctgggggtactttgactttaaccgcttccacagccactggagcccccgagactggcaaagactcatcaacaactactggggcttcagaccccggtccctcagagtcaaaatcttcaacattcaagtcaaagaggtcacggtgcaggactccaccaccaccatcgccaacaacctcacctccaccgtccaagtgtttacggacgacgactaccagctgccctacgtcgtcggcaacgggaccgagggatgcctgccggccttccctccgcaggtctttacgctgccgcagtacggttacgcgacgctgaaccgcgacaacacagaaaatcccaccgagaggagcagcttcttctgcctagagtactttcccagcaagatgctgagaacgggcaacaactttgagtttacctacaactttgaggaggtgcccttccactccagcttcgctcccagtcagaacctcttcaagctggccaacccgctggtggaccagtacttgtaccgcttcgtgagcacaaataacactggcggagtccagttcaacaagaacctggccgggagatacgccaacacctacaaaaactggttcccggggcccatgggccgaacccagggctggaacctgggctccggggtcaaccgcgccagtgtcagcgccttcgccgcgaccaataggatggagctcgagggcgcgagttaccaggtgcccccgcagccgaacggcatgaccaacaacctccagggcagcaacacctatgccctggagaacactatgatcttcaacagccagccggcgaacccgggcaccaccgccacgtacctcgagggcaacatgctcatcaccagcgagagcgagacgcagccggtgaaccgcgtggcgtacaacgtcggcgggcagatggccaccaacaaccagagctccaccactgcccccgcgaccggcacgtacaacctccaggaaatcgtgcccggcggcgtgtggatggagagggacgtgtacctccaaggacccatctgggccaagatcccagagacgggggcgcactttcacccctctccggccatgggcggattcggactcaaacacccaccgcccatgatgctcatcaagaacacgcctgtgcccggaaataccaccagcttctcggacgtgcccgtcagcagcttcatcacccagtacagcaccgggcaggtcaccgtggagatggagtgggagctcaagaaggaaaactccaagaggtggaacccagagatccagtacacaaacaactacaacgacccccagtttgtggactttgccccggacagcaccggggaatacagaaccaccagacctatcggaacccgataccttacccgacccctttaa

SEQ ID NO: 800 - DNA, 2175 bp, Artificial Sequence
  Description of Artificial Sequence: Synthetic polynucleotide
atgtcttttgttgatcaccctccagattggttggaagaagttggtgaaggtcttcgcgagtttttgggccttgaagcgggcccaccgaaaccaaaacccaatcagcagcatcaagatcaagcccgtggtcttgtgctgcctggttataactatctcggacccggaaacggtctcgatcgaggagagcctgtcaacagggcagacgaggtcgcgcgagagcacgacatctcgtacaacgagcagcttgaggcgggagacaacccctacctcaagtacaaccacgcggacgccgagtttcaggagaagctcgccgacgacacatccttcgggggaaacctcggaaaggtagtctttcaggccaagaaaagggttctcgaaccttttggcctggttgaagagggtgctaagacggcccctaccggaaagcggatagacgaccactttccaaaaagaaagaaggcccggaccgaagaggactccaagccttccacctcgtcagacgccgaagctggacccagcggatcccagcagctgcaaatcccagcccaaccagcctcaagtttgggagctgatacaatgtctgcgggaggtggcggcccattgggcggcaataaccaaggtgccgatggagtgggcaatgcctcgggagattggcattgcgattccacgtggatgggggacagagtcgtcaccaagtccacccgaacctgggtgctgcccagctacaacaaccaccagtaccgagagatcaaaagcggctccgtcgacggaagcaacgccaacgcctactttggatacagcaccccctgggggtactttgactttaaccgcttccacagccactggggcccccgagactggcaaagactcatcaacaactactggggcttcagaccccggtccctcagagtcaaaatcttcaacattcaagtcaaagaggtcacggtgcaggactccaccaccaccatcgccaacaacctcacctccaccgtccaagtgtttacggacgacgactaccagctgccctacgtcgtcggcaacgggaccgagggatgcctgccggccttccctccgcaggtctttacgctgccgcagtacggttacgcgacgctgaaccgcgacaacacagaaaatcccaccgagaggagcagcttcttctgcctagagtactttcccagcaagatgctgagaacgggcaacaactttgagtttacctacaactttgaggaggtgcccttccactccagcttcgctcccagtcagaacctcttcaagctggccaacccgctggtggaccagtacttgtaccgcttcgtgagcacaaataacactggcggagtccagttcaacaagaacctggccgggagatacgccaacacctacaaaaactggttcccggggcccatgggccgaacccagggctggaacctgggctccggggtcaaccgcgccagtgtcagcgccctcgccacgaccaataggatggagctcgagggcgcgagttaccaggtgcccccgcagccgaacggcatgaccaacaacctccagggcagcaacacctatgccctggagaacactatgatcttcaacagccagccggcgaacccgggcaccaccgccacgtacctcgagggcaacatgctcatcaccagcgagagcgagacgcagccggtgaaccgcgtggcgtacaacgtcggcgggcagatggccaccaacaaccagagctccaccactgcccccgcgaccggcacgtacaacctccaggaaatcgtgcccggcagcgtgtggatggagagggacgtgtacctccaaggacccatctgggccaagatcccagagacgggggcgcactttcacccctctccggccatgggcggattcggactcaaacacccaccgcccatgatgctcatcaagaacacgcctgtgcccggaaatatcaccagcttctcggacgtgcccgtcagcagcttcatcacccagtacagcaccgggcaggtcaccgtggagatggagtgggagctcaagaaggaaaactccaagaggtggaacccagagatccagtacacaaacaactacaacgacccccagtttgtggactttgccccggacagcaccggggaatacagaaccaccagacctatcggaacccgataccttacccgacccctttaa

SEQ ID NO: 801 - DNA, 2175 bp, Artificial Sequence
  Description of Artificial Sequence: Synthetic polynucleotide
atgtcttttgttgatcaccctccagattggttggaagaagttggtgaaggtcttcgcgagtttttgggccttgaagcgggcccaccgaaaccaaaacccaatcagcagcatcaagatcaagcccgtggtcttgtgctgcctggttataactatctcggacccggaaacggtctcgatcgaggagagcctgtcaacagggcagacgaggtcgcgcgagagcacgacatctcgtacaacgagcagcttgaggcgggagacaacccctacctcaagtacaaccacgcggacgccgagtttcaggagaagctcgccgacgacacatccttcgggggaaacctcggaaaggcagtctttcaggccaagaaaagggttctcgaaccttttggcctggttgaagagggtgctaagacggcccctaccggaaagcggatagacgaccactttccaaaaagaaagaaggcccggaccgaagaggactccaagccttccacctcgtcagacgccgaagctggacccagcggatcccagcagctgcaaatcccagcccaaccagcctcaagtttgggagctgatacaatgtctgcgggaggtggcggcccattgggcgacaataaccaaggtgccgatggagtgggcaatgcctcgggagattggcattgcgattccacgtggatgggggacagagtcgtcaccaagtccacccgaacctgggtgctgcccagctacaacaaccaccagtaccgagagatcaaaagcggctccgtcgacggaagcaacgccaacgcctactttggatacagcaccccctgggggtactttgactttaaccgcttccacagccactggagcccccgagactggcaaagactcatcaacaactactggggcttcagaccccggtccctcagagtcaaaatcttcaacattcaagtcaaagaggtcacggtgcaggactccaccaccaccatcgccaacaacctcacctccaccgtccaagtgtttacggacgacgactaccagctgccctacgtcgtcggcaacgggaccgagggatgcctgccggccttccctccgcaggtctttacgctgccgcagtacggttacgcgacgctgaaccgcgacaacacagaaaatcccaccgagaggagcagcttcttctgcctagagtactttcccagcaagatgctgagaacgggcaacaactttgagtttacctacaactttgaggaggtgcccttccactccagcttcgctcccagtcagaacctcttcaagctggccaacccgctggtggaccagtacttgtaccgcttcgtgagcacaaataacactggcggagtccagttcaacaagaacctggccgggagatacgccaacacctacaaaaactggttcccggggcccatgggccgaacccagggctggaacctgggctccggggtcaaccgcgccagtgtcagcgccttcgccacgaccaataggatggagctcgagggcgcgagttaccaggtgcccccgcagccgaacggcatgaccaacaacctccagggcagcaacacctatgccctggagaacactatgatcttcaacagccagccggcgaacccgggcaccaccgccacgtacctcgagggcaacatgctcatcaccagcgagagcgagacgcagccggtgaaccgcgtggcgtacaacgtcggcgggcagatggccaccaacaaccagagctccaccactgcccccgcgaccggcacgtacaacctccaggaaatcgtgcccggcagcgtgtggatggagagggacgtgtacctccaaggacccatctgagccaagatcccagagacgggggcgcactttcacccctctccggccatgggcggattcggactcaaacacccaccgcccatgatgctcatcaagaacacgcctgtgcccggaaatatcaccagcttctcggacgtgcccgtcagcagcttcatcacccagtacagcaccgggcaggtcaccgtggagatggagtgggagctcaagaaggaaaactccaagaggtggaacccagagatccagtacacaaacaactacaacgacccccagtttgtggactttgccccggacagcaccggggaatgcagaaccaccagacctatcggaacccgataccttacccgacccctttaa

SEQ ID NO: 802 - DNA, 2175 bp, Artificial Sequence
  Description of Artificial Sequence: Synthetic polynucleotide
atgtcttttgttgatcaccctccagattggttggaagaagttggtgaaggtcttcgcgagtttttgggccttgaagcgggcccaccgaaaccaaaacccaatcagcagcatcaagatcaagcccgtggtcttgtgctgcctggttataactatctcggacccggaaacggtctcgatcgaggagagcctgtcaacagggcagacgaggtcgcgcgagagcacgacatctcgtacaacgagcagcttgaggcgggagacaacccctacctcaagtacaaccacgcggacgccgagtttcaggagaagctcgccgacgacacatccttcgggggaaacctcggaaaggcagtctttcaggccaagaaaagggttctcgaaccttttggcctggttgaagagggtgctaagacggcccctaccggaaagcggatagacgaccactttccaaaaagaaagaaggcccggaccgaagaggactccaagccttccacctcgtcagacgccgaagctggacccagcggatcccagcagctgcaaatcccagcccaaccagcctcaagtttgggagctgatacaatgtctgcgggaggtggcggcccattgggcgacaataaccaaggtgccgatggagtgggcaatgcctcgggagattggcattgcgattccacgtggatgggggacagagtcgtcaccaagtccacccgaacctgggtgctgcccagctacaacaaccaccagtaccgagagatcaaaagcggctccgtcgacggaagcaacgccaacgcctactttggatacagcaccccctgggggtactttgactttaaccgcttccacagccactggagcccccgagactggcaaagactcatcaacaactactggggcttcagaccccggtccctcagagtcaaaatcctcaacattcaagtcaaagaggtcacggtgcaggactccaccaccaccatcgccaacaacctcacctccaccgtccaagtgtttacggacgacgactaccagctgccctacgtcgtcggcaacgggaccgagggatgcctgccggccttccctccgcaggtctttacgctgccgcagtacggttacgcgacgctgaaccgcgacaacacagaaaatcccaccgagaggagcagcttcttctgcctagagtactttcccagcaagatgctgagaacgggcaacaactttgagtttacctacaactttgaggaggtgcccttccactccagcttcgctcccagtcagaacctcttcaagctggccaacccgctggtgggccagtacttgtaccgcttcgtgagcacaaataacactggcggagtccagttcaacgagaacctggccgggagatacgccaacacctacaaaaactggttcccggggcccatgggccgaacccagggctggaacctgggctccggggtcaaccgcgccagtgtcagcgccttcgccacgaccaataggatggagctcgagggcgcgagttaccaggtgcccccgcagccgaacggcatgaccaacaacctccagggcagcaacacctatgccctggagaacactatgatcttcaacagccagccggcgaacccgggcaccaccgccacgtacctcgagggcaacatgctcatcaccagcgagagcgagacgcagccggtgaaccgcgtggcgtacaacgtcggcgggcagatggccaccaacaaccagagctccaccactgcccccgcgaccggcacgtacaacctccaggaaatcgtgcccggcagcgtgtggatggagagggacgtgtacctccaaggacccatctgggccaagatcccagagacgggggcgcactttcacccctctccggccatgggcggattcggactcaaacacccaccgcccatgatgctcatcaagaacacgcctgtgcccggaaatatcaccagcttctcggacgtgcccgtcagcagcttcatcacccagtacagcaccgggcaggccaccgtggagatggagtgggagctcaagaaggaaaactccaagaggtggaacccagagatccagtacacaaacaactacaacgacccccagtttgtggactttgccccggacagcaccggggaatacagaaccaccagacctatcggaacccgataccttacccgacccctttaa

SEQ ID NO: 803 - DNA, 2175 bp, Artificial Sequence
  Description of Artificial Sequence: Synthetic polynucleotide
atgtcttttgttgatcaccctccagattggttggaagaagttggtgaaggtcttcgcgagtttttgggccttgaagcgggcccaccgaaaccaaaacccaatcagcagcatcaagatcaagcccgtggtcttgtgctgcctggttataactatctcggacccggaaacggcctcgatcgaggagagcctgtcaacagggcagacgaggtcgcgcgagagcacgacatctcgtacaacgagcagcttgaggcgggagacaacccctacctcaagtacaaccacgcggacgccgagtttcaggagaagctcgccgacgacacatccttcgggggaaacctcggaaaggcagtctttcaggccaagaaaagggttctcgaaccttttggcctggttgaagagggtgctaagacggcccctaccggaaagcggatagacgaccactttccaaaaagaaagaaggcccggaccgaagaggactccaagccttccacctcgtcagacgccgaagctggacccagcggatcccagcagctgcaaatcccagcccaaccagcctcaagtttgggagctgatacaatgtctgcgggaggtggcggcccattgggcgacaataaccaaggtgccgatggagtgggcaatgcctcgggagattggcattgcgattccacgtggatgggggacagagtcgtcaccaagtccacccgaacctgggtgctgcccagctacaacaaccaccagtaccgagagatcaaaagcggctccgtcgacggaagcaacgccaacgcctactttggatacagcaccccctgggggtactttgactttaaccgcttccacagccactggagcccccgagactggcaaagactcatcaacaactactggggcttcagaccccggtccctcagagtcaaaatcttcaacattcaagtcaaagaggtcacggtgcaggactccaccaccatcatcgccaacaacctcacctccaccgtccaagtgtttacggacgacgactaccagctgccctacgtcgtcggcaacgggaccgagggatgcctgccggccttccctccgcaggtctttacgctgccgcagtacggttacgcgacgctgaaccgcgacaacacagaaaatcccaccgagaggagcagcttcttctgcctagagtactttcccagcaagatgctgagaacgggcaacaactttgagtttacctacaactttgaggaggtgcccttccactccagcttcgcccccagtcagaacctcttcaagctggccaacccgctggtggaccagtacttgtaccgcttcgtgagcacaaataacactggcggagtccagttcaacaagaacctggccgggagatacgccaacacctacaaaaactggttcccggggcccatgggccgaacccagggctggaacctgggctccggggtcaaccgcgccagtgtcagcgccttcgccacgaccaataggatggagctcgagggcgcgagttaccaggtgcccccgcagccgaacggcatgaccaacaacctccagggcagcaacacctatgccctggagaacactatgatcttcaacagccagccggcgaacccgggcaccaccgccacgtacctcgagggcaacatgctcatcaccagcgagagcgagacgcagccggtgaaccgcgtggcgtacaacgtcggcgggcagatggccaccaacaaccagagctccaccactgcccccgcgaccggcacgtacaacctccaggaaatcgtgcccggcagcgtgtggatggagagggacgtgtacctccaaggacccatctgggccaagatcccagagacgggggcgcactttcacccctctccggccatgggcggattcggactcaaacacccaccgcccatgatgctcatcaagaacacgcctgtgcccggaaatatcaccagcttctcggacgtgcccgtcagcagcttcatcacccagtacagcaccgggcaggtcaccgtggagatggagtgggagctcaagaaggaaaactccaagaggtggaacccagagatccagtacacaaacaactacaacgacccccagtttgtggactttgccccggacagcaccggggaatacagaaccaccagacctatcggaacccgataccttacccgacccctttaa

SEQ ID NO: 804 - DNA, 2175 bp, Artificial Sequence
  Description of Artificial Sequence: Synthetic polynucleotide
atgtcttttgttgatcaccctccagattggttggaagaagttggtgaaggtcttcgcgagtttttgggccttgaagcgggcccaccgaaaccaaaacccaatcagcagcatcaagatcaagcccgtggtcttgtgctgcctggttataactatctcggacccggaaacggtctcgatcgaggagagcctgtcaacagggcagacgaggtcgcgcgagagcacgacatctcgtacaacgagcagcttgaggcgggagacaacccctacctcaagtacaaccacgcggacgccgagtttcaggagaagctcgccgacgacacatccttcgggggaaacctcggaaaggcagtctttcaggccaagaaaagggttctcgaaccttttggcctggttgaagagggtgctaagacggcccctaccggaaagcggatagacgaccactttccaaaaagaaagaaggcccggaccgaagaggactccaagccttccacctcgtcagacgccgaagctggacccagcggatcccagcagctgcaaatcccagcccaaccagcctcaagtttgggagctgatacaatgtctgcgggaggtggcggcccattgggcgacaataaccaaggtgccgatggagtgggcaatgcctcgggagattggcattgcgattccacgtggatgggggacagagtcgtcaccaagtccacccgaacctgggtgctgcccagctacaacaaccaccagtaccgagagatcaaaagcggctccgtcgacggaagcaacgccaacgcctactttggatacagcaccccctgggggtactttgactttaaccgcttccacagccactggagcccccgagactggcaaagactcatcaacaactactggggcttcagaccccggtccctcagagtcaaaatcttcaacattcaagtcaaagaggtcacggtgcaggactccaccaccaccatcgccaacaacctcacctccaccgtccaagtgtttacggacgacgactaccagctgccctacgtcgtcggcaacgggaccgagggatgcctgccggccttccctccgcaggtctttacgctgccgcagtacggttacgcgacgctgaaccgcgacaacacagaaaatcccaccgagaggagcagcttcttctgcctagagtactttcccagcaagatgctgagaacgggcaacaactttgagtttacctacaactttgaggaggtgcccttccactccagcttcgctcccagtcagaacctcttcaagctggccaacccgctggtggaccagtacttgtaccgcttcgtgagcacaaataacactggcggagtccagttcaacaagaacctggccgggagatacgccaacacctacaaaaactggttcccggggcccatgggccgaacccagggctggaacctgggctccggggtcaaccgcgccagtgtcagcgccttcgccacgaccaataggatggagctcgagggcgcgagttaccaggtgcccccgcagccgaacggcatgaccaacaacctccagggcagcaacacctatgccctggagaacactatgatcttcaacagccagccggcgaacccgggcaccaccgccacgtacctcgagggcaacatgctcatcaccagcgagagcgagacgcagccggtgaaccgcgtggcgtacaacgtcggcgggcagatggccaccaacaaccagagctccaccactgcccccgcgaccggcacgtacaacctccaggaaatcgtgcccggcagcgtgtggatggagagggacgtgtacctccaaggacccatctgggccaagatcccagagacgggggcgcactttcacccctctccggccatgggcggattcggactcaaacacccaccgcccatgatgctcatcaagaacacgcctgtgcccggaaatatcaccagcctctcggacgtgcccgtcagcagcttcatcacccagtacagcaccgggcaggtcaccgtggagatggagtgggagctcaagaaggaaaactccaagaggtggaacccagagatccagtacacaaacaactacaacgacccccagtttgtggactttgccccggacagcaccggggaatacagaaccaccagacctatcggaacccgataccttacccgacccctttaa

SEQ ID NO: 805 - DNA, 2175 bp, Artificial Sequence
  Description of Artificial Sequence: Synthetic polynucleotide
atgtcttttgttgatcaccctccagattggttggaagaagttggtgaaggtcttcgcgagtttttgggccttgaagcgggcccaccgaaaccaaaacccaatcagcagcatcaagatcaagcccgtggtcttgtgctgcctggttataactatctcggacccggaaacggtctcgatcgaggagagcctgccaacagggcagacgaggtcgcgcgagagcacgacatctcgtacaacgagcagcttgaggcgggagacaacccctacctcaagtacaaccacgcgggcgccgagtttcaggagaagctcgccgacgacacatccttcgggggaaacctcggaaaggcagtctttcaggccaagaaaagggttctcgaaccttttggcctggttgaagagggtgctaagacggcccctaccggaaagcggatagacgaccactttccaaaaagaaagaaggcccggaccgaagaggactccaagccttccacctcgtcagacgccgaagctggacccagcggatcccagcagctgcaaatcccagcccaaccagcctcaagtttgggagctgatacaatgtctgcgggaggtggcggcccattgggcgacaataaccaaggtgccgatggagtgggcaatgcctcgggagattggcattgcgattccacgtggatgggggacagagtcgtcaccaagtccacccgaacctgggtgctgcccggctacaacaaccaccagtaccgagagatcaaaagcggctccgtcgacggaagcaacgccaacgcctactttggatacagcaccccctgggggtactttgactttaaccgcttccacagccactggagcccccgagactggcaaagactcatcaacaactactggggcttcagaccccggtccctcagagtcaaaatcttcaacattcaagtcaaagaggtcacggtgcaggactccaccaccaccatcgccaacaacctcacctccaccgtccaagtgtttacggacgacgactaccagctgccctacgtcgtcggcaacgggaccgagggatgcctgccggccttccctccgcaggtctttacgctgccgcagtacggttacgcgacgctgaaccgcgacaacacagaaaatcccaccgagaggagcagcttcttctgcctagagtactttcccagcaagatgctgagaacgggcaacaactttgagtttacctacaactttgaggaggtgcccttccactccagcttcgctcccagtcagaacctcttcaagctggccaacccgctggtggaccagtacttgtaccgcttcgtgagcacaaataatactggcggagtccagttcaacaagaacctggccgggagatacgccaacacctacaaaaactggttcccggggcccatgggccgaacccagggctggaacctgggctccggggtcaaccgcgccagtgtcagcgccttcgccacgaccaataggatggagctcgagggcgcgagttaccaggtgcccccgcagccgaacggcatgaccaacaacctccagggcagcaacacctatgccctggagaacactatgatcttcaacagccagccggcgaacccgggcaccaccgccacgtacctcgagggcaacatgctcatcaccagcgagagcgagacgcagccggtgaaccgcgtggcgtacaacgtcggcgggcagatggccaccaacaaccagagctccaccactgcccccgcgaccggcacgtacaacctccaggaaatcgtgcccggcagcgtgtggatggagagggacgtgtacctccaaggacccatctgggccaagatcccagagacgggggcgcactttcacccctctccggccatgggcggattcggactcaaacacccaccgcccatgatgctcatcaagaacacgcctgtgcccggaaatatcaccagcttctcggacgtgcccgtcagcagcttcatcacccagtacagcaccgggcaggtcaccgtggagatggagtgggagctcaagaaggaaaactccaagaggtggaacccagagatccagtacacaaacaactacaacgacccccagtttgtggactttgccccggacagcaccggggaatacagaaccaccagacctatcggaacccgataccttacccgacccctttaa

SEQ ID NO: 806 - DNA, 2175 bp, Artificial Sequence
  Description of Artificial Sequence: Synthetic polynucleotide
atgtcttttgttgatcaccctccagattggttggaagaagttggtgaaggtcttcgcgagtttttgggccttgaagcgggcccaccgaaaccaaaacccaatcagcagcatcaagatcaagcccgtggtcttgtgctgcctggttataactatctcggacccggaaacggtctcgatcgaggagagcctgtcaacagggcagacgaggtcgcgcgagagcacgacatctcgtacaacgagcagcttgaggcgggagacaacccctacctcaagtacaaccacgcggacgccgagtttcaggagaagctcgccgacgacacatccttcgggggaaacctcggaaaggcagtctttcaggccaagaaaagggttctcgaaccttttggcctggttgaagagggtgctaagacggcccctaccggaaagcggatagacgaccactttccaaaaagaaagaaggcccggaccgaagaggactccaagcctcccacctcgtcagacgccgaagctggacccagcggatcccagcagctgcaaatcccagcccaaccagcctcaagtttgggagctgatacaatgtctgcgggaggtggcggcccattgggcgacaataaccaaggtgccgatggagtgggcaatgcctcgggagattggcattgcgattccacgtggatgggggacagagtcgtcaccaagtccacccgaacctgggtgctgcccagctacaacaaccaccagtaccgagagatcaaaagcggctccgtcgacggaagcaacgccaacgcctactttggatacagcaccccctgggggtactttgactttaaccgcttccacagccactggagcccccgagactggcaaagactcatcaacaactactggggcttcagaccccggtccctcagagtcaaaatcttcaacattcaagtcaaagaggtcacggtgcaggactccgccaccaccatcgccaacaacctcacctccaccgtccaagtgtttacggacgacgactaccagctgccctacgtcgtcggcaacgggaccgagggatgcctgccggccttccctccgcaggtctttacgctgccgcagtacggttacgcgacgctgaaccgcgacaacacagaaaatcccaccgagaggagcagcttcttctgcctagagtactttcccagcaagatgctgagaacgggcaacaactttgagtttacctacaactttgaggaggtgcccttccactccagcttcgctcccagtcagaacctcttcaagctggccaacccgctggtggaccagtacttgtaccgcttcgtgagcacaaataacactggcggagtccagttcaacaagaacctggccgggagatacgccaacacctacaaaaactggttcccggggcccatgggccgaacccagggctggaacctgggctccggggtcaaccgcgccagtgtcagcgccttcgccacgaccaataggatggagctcgagggcgcgagttaccaggtgcccccgcagccgaacggcatgaccaacaacctccagggcagcaacacctatgccctggagaacactatgatcttcaacagccagccggcgaacccgggcaccaccgccacgtacctcgagggcaacatgctcatcaccagcgagagcgagacgcagccggtgaaccgcgtggcgtacaacgtcggcgggcagatggccaccaacaaccagagctccaccactgcccccgcgaccggcacgtacaacctccaggaaatcgtgcccggcagcgtgtggatggagagggacgtgtacctccaaggacccatctgggccaagatcccagagacgggggcgcactttcacccctctccggccatgggcggattcggactcaaacacccaccgcccatgatgctcatcaagaacacgcctgtgcccggaaatatcaccagcttctcggacgtgcccgtcagcagcttcatcacccagtacagcaccgggcaggtcaccgtggagatggagtgggagctcaagaaggaaaactccaagaggtggaacccagagatccagtacacaaacaactacaacgacccccagtttgtggactttgccccggacagcaccggggaatacagaaccaccagacctatcggaacccgataccttacccgacccctttaa

SEQ ID NO: 807 - DNA, 2175 bp, Artificial Sequence
  Description of Artificial Sequence: Synthetic polynucleotide
atgtcttttgttgatcaccctccagattggttggaagaagttggtgaaggtcttcgcgagtttttgggccttgaagcgggcccaccgaaaccaaaacccaatcagcagcatcaagatcaagcccgtggtcttgtgctgcctggttataactatctcggacccggaaacggtctcgatcgaggagagcctgtcaacagggcagacgaggtcgcgcgagagcacgacatctcgtacaacgagcagcttgaggcgggagacaacccctacctcaagtacaaccacgcggacgccgagtttcaggagaagctcgccgacgacacatccttcgggggaaacctcggaaaggcagtctttcaggccaagaaaagggttctcgaaccttttggcctggttgaagagggtgctaagacggcccctaccggaaagcggatagacgaccactttccaaaaagaaagaaggcccggaccgaagaggactccaagccttccacctcgtcagacgccgaagctggacccagcggatcccagcagccgcaaatcccagcccaaccagcctcaagtttgggagctgatacaatgtctgcgggaggtggcggcccattgggcgacaataaccaaggtgccgatggagtgggcaatgcctcgggagattggcattgcgattccacgtggatgggggacagagtcgtcaccaagtccacccgaacctgggtgctgcccagctacaacaaccaccagtaccgagagatcaaaagcggctccgtcgacggaagcaacgccaacgcctactttggatacagcaccccctgggggtactttgactttaaccgcttccacagccactggagcccccgagactggcaaagactcatcaacaactactggggcttcagaccccggtccctcagagtcaaaatcttcaacattcaagtcaaagaggtcacggtgcaggactccaccaccaccatcgccaacaacctcacctccaccgtccaagtgtttacggacgacgactaccagctgccctacgtcgtcggcaacgggaccgagggatgcctgccggccttccctccgcaggtctttacgctgccgcagtacggttacgcgacgctgaaccgcgacaacacagaaaatcccaccgagaggagcagcttcttctgcctagagtactttcccagcaagatgctgagaacgggcaacaactttgagtttacctacaactttgaggaggtgcccttccactccagcttcgctcccagtcagaacctcttcaagctggccaacccgctggtggaccagtacttgtaccgcttcgtgagcacaaataacactggcggagtccagttcaacaagaacctggccgggagatacgccaacacctacaaaaactggttcccggggcccatgggccgaacccagggctggaacctgggctccggggtcaaccgcgccagtgtcagcgccttcgccacgaccaataggatggagctcgagggcgcgagttaccaggtgcccccgcagccgaacggcatgaccaacaacctccagggcagcaacacctatgccctggagaacactatgatcttcaacagccagccggcgaacccgggcaccaccgccacgtacctcgagggcaacatgctcatcaccagcgagagcgagacgcagccggtgaaccgcgtggcgtacaacgtcggcgggcagatggccaccaacaaccagagctccaccactgcccccgcgaccggcacgtacaacctccaggaaatcgtgcccggcagcgtgtggatggagagggacgtgtacctccaaggacccatctgggccaagatcccagagacgggggcgcactttcacccctctccggccatgggcggattcggactcaaacacccaccgcccatgatgctcatcaagaacacgcctgcgcccggaaatatcaccagcttctcggacgtgcccgtcagcagcttcatcacccagtacagcaccgggcaggtcaccgtggagatggagtgggagctcaagaaggaaaactccaagaggtggaacccagagatccagtacacaaacaactacaacgacccccagtttgtggactttgccccggacagcaccggggaatacagaaccaccagacctatcggaacccgataccttacccgacccctttaa

SEQ ID NO: 808 - DNA, 2175 bp, Artificial Sequence
  Description of Artificial Sequence: Synthetic polynucleotide
atgtcttttgttgatcaccctccagattggttggaagaagttggtgaaggtcttcgcgagtttttgggccttgaagcgggcccaccgaaaccaaaacccaatcagcagcatcaagatcaagcccgtggtcttgtgctgcctggttataactatctcggacccggaaacggtctcgatcgaggagagcctgtcaacagggcagacgaggtcgcgcgagagcacgacatctcgtacaacgagcagcttgaggcgggagacaacccctacctcaagtacaaccacgcggacgccgagtttcaggagaagctcgccgacgacacatccttcgggggaaacctcggaaaggcagtctttcaggccaagaaaagggttctcgaaccttttggcctggttgaagagggtgctaagacggcccctaccggaaagcggatagacgaccactttccaaaaagaaagaaggcccggaccgaagaggactccaagcctcccacctcgtcagacgccgaagctggacccagcggatcccagcagctgcaaatcccagcccaaccagcctcaagtttgggagctgatacaatgtctgcgggaggtggcggcccattgggcgacaataaccaaggtgccgatggagtgggcaatgcctcgggagattggcattgcgattccacgtggatgggggacagagtcgtcaccaagtccacccgaacctgggtgctgcccagctacaacaaccaccagtaccgagagatcaaaagcggctccgtcgacggaagcaacgccaacgcctactttggatacagcaccccctgggggtactttgactttaaccgcttccacagccactggagcccccgagactggcaaagactcatcaacaactactggggcttcagaccccggtccctcagagtcaaaatcttcaacattcaagtcaaagaggtcacggtgcaggactccaccaccaccatcgccaacaacctcacctccaccgtccaagtgtttacggacgacgactaccagctgccctacgtcgtcggcaacgggaccgagggatgcctgccggccttccctccgcaggtctttacgctgccgcagtacggttacgcgacgctgaaccgcgacaacacagaaaatcccaccgagaggagcagcttcttctgcctagagtactttcccagcaagatgctgagaacgggcaacaactttgagtttacctacaactttgaggaggtgcccttccactccagcttcgctcccagtcagaacctcttcaagctggccaacccgctggtggaccagtacttgtaccgcttcgtgagcacaaataacactggcggagtccagttcaacaagaacctggccgggagatacgccaacacctacaaaaactggttcccggggcccatgggccgaacccagggctggaacctgggctccggggtcaaccgcgccagtgtcagcgccttcgccacgaccaataggatggagctcgagggcgcgagttaccaggtgcccccgcagccgaacggcatgaccaacaacctccagggcagcaacacctatgccctggagaacactatgatcttcaacagccagccggcgaacccgggcaccaccgccacgtacctcgagggcaacatgctcatcaccagcgagagcgagacgcagccggtgaaccgcgtggcgtacaacgtcggcgggcagatggccaccaacaaccagagctccaccactgcccccgcgaccggcacgtacaacctccaggaaatcgtgcccggcagcgtgtggatggagagggacgtgtacctccaaggacccatctgggccaagatcccagagacgggggcgcactttcacccctctccggccatgggcggattcggactcaaacacccaccgcccatgatgctcatcaagaacacgcctgtgcccggaaatatcaccagcttctcggacgtgcccgtcagcagcttcatcacccagtacagcaccgggcaggtcaccgtggagatggagtgggagctcaagaaggaaaactccaagaggtggaacccagagatccagtacacaaacaactacaacgacccccagtttgtggactttgccccggacagcaccggggaatacagaaccaccagacctatcggaacccgataccttacccgacccctttaa

SEQ ID NO: 809 - DNA, 2175 bp, Artificial Sequence
  Description of Artificial Sequence: Synthetic polynucleotide
atgtcttttgttgatcaccctccagattggttggaagaagttggtgaaggtcttcgcgagtttttgggccttgaagcgggcccaccgaaaccaaaacccaatcagcagcatcaagatcaagcccgtggtcttgtgctgcctggttataactatctcggacccggaaacggtctcgatcgaggagagcctgtcaacagggcagacgaggtcgcgcgagagcacgacatctcgtacaacgagcagcttgaggcgggagacaacccctacctcaagtacaaccacgcggacgccgagtttcaggagaagctcgccgacgacacatccttcgggggaaacctcggaaaggcagtctttcaggccaagaaaagggttctcgaaccttttggcctggttgaagagggtgctaagacggcccctaccggaaagcggatagacgaccactttccaaaaagaaagaaggcccggaccgaagaggactccaagcctcccacctcgtcagacgccgaagctggacccagcggatcccagcagctgcaaatcccagcccaaccagcctcaagtttgggagctgatacaatgtctgcgggaggtggcggcccattgggcgacaataaccaaggtgccgatggagtgggcaatgcctcgggagattggcattgcgattccacgtggatgggggacagagtcgtcaccaagtccacccgaacctgggtgccgcccagctacaacaaccaccagtaccgagagatcaaaagcggctccgtcgacggaagcaacgccaacgcctactttggatacagcaccccctgggggtactttgactttaaccgcttccacagccactggagcccccgagactggcaaagactcatcaacaactactggggcttcagaccccggtccctcagagtcaaaatcttcaacattcaagtcaaagaggtcacggtgcaggactccaccaccaccatcgccaacaacctcacctccaccgtccaagtgtttacggacgacgactaccagctgccctacgtcgtcggcaacgggaccgagggatgcctgccggccttccctccgcaggtctttacgctgccgcagtacggttacgcgacgctgaaccgcgacaacacagaaaatcccaccgagaggagcagcttcttctgcctagagtactttcccagcaagatgctgagaacgggcaacaactttgagtttacctacaactttgaggaggtgcccttccactccagcttcgctcccagtcagaacctcttcaagctggccaacccgctggtggaccagtacttgtaccgcttcgtgagcacaaataacactggcggagtccagttcaacaagaacctggccgggagatacgccaacacctacaaaaactggttcccggggcccatgggccgaacccagggctggaacctgggctccggggtcaaccgcgccagtgtcagcgccttcgccacgaccaataggatggagctcgagggcgcgagttaccaggtgcccccgcagccgaacggcatgaccaacaacctccagggcagcaacacctatgccctggagaacactatgatcttcaacagccagccggcgaacccgggcaccaccgccacgtacctcgagggcaacatgctcatcaccagcgagagcgagacgcagccggtgaaccgcgtggcgtacaacgtcggcgggcagatggccaccaacaaccagagctccaccactgcccccgcgaccggcacgtacaacctccaggaaatcgtgcccggcagcgtgtggatggagagggacgtgtacctccaaggacccatctgggccaagatcccagagacgggggcgcactttcacccctctccggccatgggcggattcggactcaaacacccaccgcccatgatgctcatcaagaacacgcctgtgcccggaaatatcaccagcttctcggacgtgcccgtcagcagcttcatcacccagtacagcaccgggcaggtcgccgtggagatggagtgggagctcaagaaggaaaactccaagaggtggaacccagagatccagtacacaaacaactacaacgacccccagtttgtggactttgccccggacagcaccggggaatacagaaccaccagacctatcggaacccgataccttacccgacccctttaa

SEQ ID NO: 810 - DNA, 2175 bp, Artificial Sequence
  Description of Artificial Sequence: Synthetic polynucleotide
atgtcttttgttgatcaccctccagattggttggaagaagttggtgaaggtcttcgcgagtttttgggccttgaagcgggcccaccgaaaccaaaacccaatcagcagcatcaagatcaagcccgtggtcttgtgctgcctggttataactatctcggacccggaaacggtctcgatcgaggagagcctgtcaacagggcagacgaggtcgcgcgagagcacgacatctcgtacaacgagcagcttgaggcgggagacaacccctacctcaagtacaaccacgcggacgccgagtttcaggagaagctcgccgacgacacatccttcgggggaaacctcggaaaggcagtctttcaggccaagaaaagggttctcgaaccttttggcctggttgaagagggtgctaagacggcccctaccggaaagcggatagacgaccactttccaaaaagaaagaaggcccggaccgaagaggactccaagccttccacctcgtcagacgccgaagctggacccagcggatcccagcagctgcaaatcccagcccaaccagcctcaagtttgggagctgatacaatgtctgcgggaggtggcggcccattgggcgacaataaccaaggtgccgatggagtgggcaatgcctcgggagattggcattgcgattccacgtggatgggggacagagtcgtcaccaagtccacccgaacctgggtgctgcccagctacaacaaccaccagtaccgagagatcaaaagcggctccgtcgacggaagcaacgccaacgcctactttggatacagcaccccctgggggtactttgactttaaccgcttccacagccactggagcccccgagactggcaaagactcatcaacaactactggggcttcagaccccggtccctcagagtcaaaatcttcaacattcaagtcaaagaggtcacggtgcaggactccaccaccaccatcgccaacaacctcacctccaccgtccaagtgtttacggacgacgactaccagctgccctacgtcgtcggcaacgggaccgagggatgcctgccggccttccctccgcaggtctttacgctgccgcagtacggttacgcgacgctgaaccgcgacaacacagaaaatcccaccgagaggagcagcttcttctgcctagagtactttcccagcaagatgctgagaacgggcaacaactttgagtttacctacaactttgaggaggtgcccttccactccagcttcgctcccagtcagaacctcttcaagctggccaacccgctggtggaccagtacttgtaccgcttcgtgagcacaaataacactggcggagtccagttcaacaagaacctggccgggagatacgccaacacctacaaaaactggttcccggggcccatgggccgaacccagggctggaacctgggctccggggtcaaccgcgccagtgtcagcgccttcgccacgaccaataggatggagctcgagggcgcgagttaccaggtgcccccgcagccgaacggcatgaccaacaacctccagggcagcaacacctatgccctggagaacactatgatcttcaacagccagccggcgaacccgggcaccaccgccacgtacctcgagggcaacatgctcatcaccagcgagagcgagacgcagccggtgaaccgcgtggcgtacaacgtcggcgggcagatggccaccaacaaccagagctccaccactgcccccgcgaccggcacgtacaacctccaggaaatcgtgcccggcagcgtgtggatggagagggacgtgtacctccaaggacccatctgggccaagatcccagagacgggggcgcactttcacccctctccggccatgggcggattcggactcaaacacccaccgcccatgatgctcatcaagaacacgcctgcgcccggaaatatcaccagcttctcggacgtgcccgtcagcagcttcatcacccagtacagcaccgggcaggtcaccgtggagatggagtgggagctcaagaaggaaaactccaagaggtggaacccagagatccagtacacaaacaactacaacgacccccagtttgtggactttgccccggacagcaccggggaatacagaaccaccagacctatcggaacccgataccttacccgacccctttaa

SEQ ID NO: 811 - DNA, 2175 bp, Artificial Sequence
  Description of Artificial Sequence: Synthetic polynucleotide
atgtcttttgttgatcaccctccagattggttggaagaagttggtgaaggtcttcgcgagtttttgggccttgaagcgggcccaccgaaaccaaaacccaatcagcagcatcaagatcaagcccgtggtcttgtgctgcctggttataactatctcggacccggaaacggtctcgatcgaggagagcctgtcaacagggcagacgaggtcgcgcgagagcacgacatctcgtacaacgagcagcttgaggcgggagacaacccctacctcaagtacaaccacgcggacgccgagtttcaggagaagctcgccgacgacacatccttcgggggaaacctcggaaaggcagtctttcaggccaagaaaagggttctcgaaccttttggcctggctgaagagggtgctaagacggcccctaccggaaagcggatagacgaccactttccaaaaagaaagaaggcccggaccgaagaggactccaagccttccacctcgtcagacgccgaagctggacccagcggatcccagcagctgcaaatcccagcccaaccagcctcaagtttgggagctgatacaatgtctgcgggaggtggcggcccattgggcgacaataaccaaggtgccgatggagtgggcaatgcctcgggagattggcattgcgattccacgtggatgggggacagagtcgtcaccaagtccacccgaacctgggtgctgcccagctacaacaaccaccagtaccgagagatcaaaagcggctccgtcgacggaagcaacgccaacgcctactttggatacagcaccccctgggggtactttgactttaaccgcttccacagccactggagcccccgagactggcaaagactcatcaacaactactggggcttcagaccccggtccctcagagccaaaatcttcaacattcaagtcaaagaggtcacggtgcaggactccaccaccaccatcgccaacaacctcacctccaccgtccaagtgtttacggacgacgactaccagctgccctacgtcgtcggcaacgggaccgagggatgcctgccggccttccctccgcaggtctttacgctgccgcagtacggttacgcgacgctgaaccgcgacaacacagaaaatcccaccgagaggagcagcttcttctgcctagagtactttcccagcaagatgctgagaacgggcaacaaccttgagtttacctacaactttgaggaggtgcccttccactccagcttcgctcccagtcagaacctcttcaagctggccaacccgctggtggaccagtacttgtaccgcttcgtgagcacaaataacactggcggagtccagttcaacaagaacctggccgggagatacgccaacacctacaaaaactggttcccggggcccatgggccgaacccagggctggaacctgggctccggggtcaaccgcgccagtgtcagcgccttcgccacgaccaataggatggagctcgagggcgcgagttaccaggtgcccccgcagccgaacggcatgaccaacaacctccagggcagcaacacctatgccctggagaacactatgatcttcaacagccagccggcgaacccgggcaccaccgccacgtacctcgagggcaacatgctcatcaccagcgagagcgagacgcagccggtgaaccgcgtggtgcacaacgtcggcgggcagatggccaccaacaaccagagctccaccactgcccccgcgaccggcacgtacaacctccaggaaatcgtgcccggcagcgtgtggatggagagggacgtgtacctccaaggacccatctgggccaagatcccagagacgggggcgcactttcacccctctccggccatgggcggattcggactcaaacacccaccgcccatgatgctcatcaagaacacgcctgtgcccggaaatatcaccagcttctcggacgtgcccgtcagcagcttcatcacccagtacagcaccgggcaggtcaccgtggagatggagtgggagctcaagaaggaaaactccaagaggtggaacccggagatccagtacacaaacaactacaacgacccccagtttgtggactttgccccggacagcaccggggaatacagaaccaccagacctatcggaacccgataccttacccgacccctttaa

SEQ ID NO: 812 - DNA, 2175 bp, Artificial Sequence
  Description of Artificial Sequence: Synthetic polynucleotide
atgtcttttgttgatcaccctccagattggttggaagaagttggtgaaggtcttcgcgagtttttgggccttgaagcgggcccaccgaaaccaaaacccaatcagcagcatcaagatcaagcccgtggtcttgtgctgcctggttataactatctcggacccggaaacggtctcgatcgaggagagcctgtcaacagggcagacgaggtcgcgcgagagcacgacatctcgtacaacgagcagcttgaggcgggagacaacccctacctcaagtacaaccacgcggacgccgagtttcaggagaagctcgccgacgacacatccttcgggggaaacctcggaaaggcagtctttcaggccaagaaaagggttctcgaaccttttggcctggttgaagagggtgctaagacggcccctaccggaaagcggatagacgaccactttccaaaaagaaagaaggcccggaccgaagaggactccaagccttccacctcgtcagacgccgaagctggacccagcggatcccagcagctgcaaatcccagcccaaccagcctcaagtttgggagctgatacaatgtctgcgggaggtggcggcccattgggcgacaataaccaaggtgccgatggagtgggcaatgcctcgggagattggcattgcgattccacgtggatgggggacagagtcgtcaccaagtccacccgaacctgggtgctgcccagctacaacaaccaccagtaccgagagatcaaaagcggctccgtcgacggaggcaacgccaacgcctactttggatacagcaccccctgggggtactttgactttaaccgcttccacagccactggagcccccgggactggcaaagactcatcaacaactactggggcttcagaccccggtccctcagagtcaaaatcttcaacattcaagtcaaagaggtcacggtgcaggactccaccaccaccatcgccaacaacctcacctccaccgtccaagtgtttacggacgacgactaccagctgccctacgtcgtcggcaacgggaccgagggatgcctgccggccttccctccgcaggtctttacgctgccgcagtacggttacgcgacgctgaaccgcgacaacacagaaaatcccaccgagaggagcagcttcttctgcctagagtactttcccagcaagatgctgagaacgggcaacaactttgagtttacctacaactttgaggaggtgcccttccactccagcttcgctcccagtcagaacctcttcaagctggccaacccgctggtggaccagtacttgtaccgcttcgtgagcacaaataacactggcggagtccagttcaacaagaacctggccgggagatacgccaacacctacaaaaactggttcccggggcccatgggccgaacccagggctggaacctgggctccggggtcaaccgcgccagtgtcagcgccttcgccacgaccaataggatggagctcgagggcgcgagttaccaggtgcccccgcagccgaacggcatgaccaacaacctccagggcagcaacacctatgccctggagaacactatgatcttcaacagccagccggcgaacccgggcaccaccgccacgtacctcgagggcaacatgctcatcaccagcgagagcgagacgcagccggtgaaccgcgtggcgtacaacgtcggcgggcagatggccaccaacaaccagagctccaccactgcccccgcgaccggcacgtacaacctccaggaaatcgtgcccggcagcgtgtggatggagagggacgtgtacctccaaggacccatctgggccaagatcccagagacgggggcgcactttcacccctctccggccatgggcggattcggactcaaacacccaccgcccatgatgctcatcaagaacacgcctgcgcccggaaatatcaccagcttctcggacgtgcccgtcagcagcttcatcacccagtacagcaccgggcaggtcaccgtggagatggagtgggagctcaagaagggaaactccaagaggtggaacccagagatccagtacacaaacaactacaacgacccccagtttgtggactttgccccggacagcaccggggaatacagaaccaccagacctatcggaacccgataccttacccgacccctttaa

SEQ ID NO: 813 - DNA, 2175 bp, Artificial Sequence
  Description of Artificial Sequence: Synthetic polynucleotide
atgtcttttgttgatcaccctccagattggttggaagaagttggtgaaggtcttcgcgagtttttgggccttgaagcgggcccaccgaaaccaaaacccaatcagcagcatcaagatcaagcccgtggtcttgtgctgcctggttataactatctcggacccggaaacggtctcgatcgaggagagcctgtcaacagggcagacgaggtcgcgcgagagcacgacatctcgtacaacgagcagcttgaggcgggagacaacccctacctcaagtacaaccacgcggacgccgagtttcaggagaagctcgccgacgacacgtccttcgggggaaacctcggaaaggcagtctttcaggccaagaaaagggttctcgaaccttttggcctggttgaagagggtgctaagacggcccctaccggaaagcggatagacgaccactttccaaaaagaaagaaggcccggaccgaagaggactccaagccttccacctcgtcagacgccgaagctggacccagcggatcccagcagctgcaaatcccagcccaaccagcctcaagtttgggagctgatacaatgtctgcgggaggtggcggcccattgggcgacaataaccaaggtgccgatggagtgggcaatgcctcgggagattggcattgcgattccacgtggatgggggacagagtcgtcaccaagtccacccgaacctgggtgctgcccagctacaacaaccaccagtaccgagagatcaaaagcggctccgtcgacggaagcaacgccaacgcctactttggatacagcaccccctgggggtactttgactttaaccgcttccacagccactggagcccccgagactggcaaagactcatcaacaactactggggcttcagaccccggtccctcagagtcaaaatcttcaacattcaagtcaaagaggtcacggtgcaggactccaccaccaccatcgccaacaacctcacctccaccgtccaagtgtttacggacgacgactaccagctgccctacgtcgtcggcaacgggaccgagggatgcctgccggccttccctccgcaggtctttacgctgccgcagtacggttacgcgacgctgaaccgcgacaacacagaaaatcccaccgagaggagcagcttcttctgcctagagtactttcccagcaagatgctgagaacgggcaacaactttgagtttacctacaactttgaggaggtgcccttccactccagcttcgctcccagtcagaacctcttcaagctggccaacccgctggtggaccagtacttgtaccgcttcgtgagcacaaataacactggcggagtccagttcaacaagaacctggccgggagatacgccaacacctacaaaaactggttcccggggcccatgggccgaacccagggctggaacctgggctccggggtcaaccgcgccagtgtcagcgccttcgccacgaccaataggatggagctcgagggcgcgagttaccaggtgcccccgcagccgaacggcatgaccaacaacctccagggcagcaacacctatgccctggagaacactatgatcttcaacagccagccggcgaacccgggcaccaccgccacgtacctcgagggcaacatgctcatcaccagcgagagcgagacgcagccggtgaaccgcgtggcgtacaacgtcggcgggcagatggccaccaacaaccagagctccaccactgcccccgcgaccggcacgtacaacctccaggaaatcgtgcccggcagcgtgtggatggagagggacgtgtacctccaaggacccatctgggccaagatcccagagacgggggtgcactttcacccctctccggccatgggcggattcggactcaaacacccaccgcccatgatgctcatcaagaacacgcctgtgcccggaaatatcaccagcttctcggacgtgcccgtcagcagcttcatcacccagtacagcaccgggcaggtcaccgtggagatggagtgggagctcaagaaggaaaactccaagaggtggaacccagagatccagtacacaaacaactacaacgacccccagtttgtggactttgccccggacagcaccggggaatacagaaccaccagacctatcggaacccgataccttacccgacccctttaa

SEQ ID NO: 814 - DNA, 2175 bp, Artificial Sequence
  Description of Artificial Sequence: Synthetic polynucleotide
  misc_feature (1652)..(1652): n is a, c, t, or g
atgtcttttgttgatcaccctccagattggttggaagaagttggtgaaggtcttcgcgagtttttgggccttgaagcgggcccaccgaaaccaaaacccaatcagcagcatcaagatcaagcccgtggtcttgtgctgcctggttataactatctcggacccggaaacggtctcgatcgaggagagcctgtcaacagggcagacgaggtcgcgcgagagcacgacatctcgtacaacgagcagcttgaggcgggagacaacccctacctcaagtacaaccacgcggacgccgagtttcaggagaagctcgccgacgacacatccttcgggggaaacctcggaaaggcagtctttcaggccaagaaaagggttctcgaaccttttggcctggttgaagagggtgctaagacggcccctaccggaaagcggatagacgaccactttccaaaaagaaagaaggcccggaccgaggaggactccaagccttccacctcgtcagacgccgaagctggacccagcggatcccagcagctgcaaatcccagcccaaccagcctcaagtttgggagctgatacaatgtctgcgggaggtggcggcccattgggcgacaataaccaaggtgccgatggagtgggcaatgcctcgggagattggcattgcgattccacgtggatgggggacagagtcgtcaccaagtccacccgaacctgggtgctgcccagctacaacaaccaccagtaccgagagatcaaaagcggctccgtcgacggaagcaacgccaacgcctactttggatacagcaccccctgggggtactttgactttaaccgcttccacagccactggagcccccgagactggcaaagactcatcaacaactactggggcttcagaccccggtccctcagagtcaaaatcttcaacattcaagtcaaagaggtcacggtgcaggactccaccaccaccatcgccaacaacctcacctccaccgtccaagtgtttacggacgacgactaccagctgccctacgtcgtcggcaacgggaccgagggatgcctgccggccttccctccgcaggtctttacgctgccgcagtacggttacgcgacgctgaaccgcgacaacacagaaaatcccaccgagaggagcagcttcttctgcctagagtactttcccagcaagatgctgagaacgggcaacaactttgagtttacctacaactttgaggaggtgcccttccactccagcttcgctcccagtcagaacctcttcaagctggccaacccgctggtggaccagtacttgtaccgcttcgtgagcacaaataacactggcggagtccagttcaacaagaacctggccgggagatacgccaacacctacaaaaactggttcccggggcccatgggccgaacccagggctggaacctgggctccggggtcaaccgcgccagtgtcagcgccttcgccacgaccaataggatggagctcgagggcgcgagttaccaggtgcccccgcagccgaacggcatgaccaacaacctccagggcagcaacacctatgccctggagaacactatgatcttcaacagccagccggcgaacccgggcaccaccgccacgtacctcgagggcagcatgctcatcaccancgagagcgagacgcagccggtgaaccgcgtggcgtacaacgtcggcgggcagatggccaccaacaaccagagctccaccactgcccccgcgaccggcacgtacaacctccaggaaatcgtgcccggcagcgtgtggatggagagggacgtgtacctccaaggacccatctgggccaagatcccagagacgggggcgcactttcacccctctccggccatgggcggattcggactcaaacacccaccgcccatgatgctcatcaagaacacgcctgtgcccggaaatatcaccagcttctcggacgtgcccgtcagcagcttcatcacccagtacagcaccgggcaggtcaccgtggagatggagtgggagctcaagaaggaaaactccaagaggtggaacccagagatccagtacacaaacaactacaacgacccccagtttgtggactttgccccggacagcaccggggaatacagaaccaccagacctatcggaacccgataccttacccgacccctttaa

SEQ ID NO: 815 - DNA, 2211 bp, Artificial Sequence
  Description of Artificial Sequence: Synthetic polynucleotide
atggctgctgacggttatcttccagattggctcgaggacaacctttctgaaggcattcgtgagtggtgggctctgaaacctggagtccctcaacccaaagcgaaccaacaacaccaggacaaccgtcggggtcttgtgcttccgggttacaaatacctcggacccggtaacggactcgacaaaggagagccggtcaacgaggcggacgcggcagccctcgaacacgacaaagcttacgaccagcagctcaaggccggtgacaacccgtacctcaagtacaaccacgccgacgccgagtttcaggagcgtcttcaagaagatacgtcttttgggggcaaccttggcagagcagtcttccaggccaaaaagaggatccttgagcctcttggtctggttgaggaagcagctaaaacggctcctggaaagaagaggcctgtagatcagtctcctcaggaaccggactcatcatctggtgttggcaaatcgggcaaacagcctgccagaaaaagactaaatttcggtcagactggcgactcagagtcagtcccagaccctcaacctctcggagaaccaccagcagcccccacaagtttgggatctaatacaatggcttcaggcggtggcgcaccaatggcagacaataacgagggtgccgatggagtgggtaattcctcaggaaattggcattgcgattcccaatggctgggcgacagagtcatcaccaccagcaccagaacctgggccctgcccacttacaacaaccatctctacaagcaaatctccagccaatcaggagcttcaaacgacaaccactactttggctacagcaccccttgggggtattttgactttaacagattccactgccacttctcaccacgtgactggcagcgactcattaacaacaactggggattccggcccaagaaactcagcttcaagctcttcaacatccaagttaaagaggtcacgcagaacgatggcacgacgactattgccaataaccttaccagcacggttcaagtgtttacggactcggagtatcagctcccgtacgtgctcgggtcggcgcaccaaggctgtctcccgccgtttccagcggacgtcttcatggtccctcagtatggatacctcaccctgaacaacggaagtcaagcggtgggacgctcatccttttactgcctggagtacttcccttcgcagatgctaaggactggaaataacttccaattcagctataccttcgaggatgtaccttttcacagcagctacgctcacagccagagtttggatcgcttgatgaatcctcttattgatcagtatctgtactacctgaacagaacgcaaggaacaacctctggaacaaccaaccaatcacggctgctttttagccaggctgggcctcagtctatgtctttgcaggccagaaattggctacctgggccctgctaccggcaacagagactttcaaagactgctaacgacaacaacaacagtaactttccttggacagcggccagcaaatatcatctcaatggccgcgactcgctggtgaatccaggaccagctatggccagtcacaaggacgatgaagaaaaatttttccctatgcacggcaatctaatatttggcaaagaagggacaacggcaagtaacgcagaattagataatgtaatgattacggatgaagaagagattcgtaccaccaatcctgtggcaacagagcagtatggaactgtggcaaataacttgcagagctcaaatacagctcccacgactagaactgtcaatgatcagggggccttacctggcatggtgtggcaagatcgtgacgtgtaccttcaaggacctatctgggcaaagattcctcacacggatggacactttcatccttctcctctgatgggaggctttggactgaaacatccgcctcctcaaatcatgatcaaaaatactccggtaccggcaaatcctccgacgactttcagcccggccaagtttgcttcatttatcactcagtactccactggacaggtcagcgtggaaattgagtgggagctacagaaagaaaacagcaaacgttggaatccagagattcagtacacttccaactacaacaagtctgttaatgtggactttactgtagacactaatggtgtttatagtgaacctcgccctattggaacccggtatctcacacgaaacttgtaa

SEQ ID NO: 816 - DNA, 2205 bp, Artificial Sequence; identical to SEQ ID NO: 84
  Description of Artificial Sequence: Synthetic polynucleotide

SEQ ID NO: 817 - DNA, 2234 bp, Artificial Sequence
  Description of Artificial Sequence: Synthetic polynucleotide
atgtcttttgttgatcaccctccagattggttggaagaagttggtgaaggtcttcgcgagtttttgggccttgaagcgggcccaccgaaaccaaaacccaatcagcagcatcaagatcaagcccgtggtcttgtgctgcctggttataactatctcggacccggaaacggtctcgatcgaggagagcctgtcaacagggcagacgaggtcgcgcgagagcacgacatctcgtacaacgagcagcttgaggcgggagacaacccctacctcaagtacaaccacgcggacgccgagtttcaggagaagctcgccgacgacacatccttcgggggaaacctcggaaaggcagtctttcaggccaagaaaagggttctcgaaccttttggcctggttgaagagggtgctaagacggcccctaccggaaagcggatagacgaccactttccaaaaagaaagaaggctcggaccgaagaggactccaagccttccacctcgtcagacgccgaagctggacccagcggatcccagcagctgcaaatcccagcccaaccagcctcaagtttgggagctgatacaatgtctgcgggaggtggcggcccattgggcgacaataaccaaggtgccgatggagtgggcaatgcctcgggagattggcattgcgattccacgtggatgggggacagagtcgtcaccaagtccacccgaacctgggtgctgcccagctacaacaaccaccagtaccgagagatcaaaagcggctccgtcgacggaagcaacgccaacgcctactttggatacagcaccccctgggggtactttgactttaaccgcttccacagccactggagcccccgagactggcaaagactcatcaacaactactggggcttcagaccccggtccctcagagtcaaaatcttcaacattcaagtcaaagaggtcacggtgcaggactccaccaccaccatcgccaacaacctcacctccaccgtccaagtgtttacggacgacgactaccagctgccctacgtcgtcggcaacgggaccgagggatgcctgccggccttccctccgcaggtctttacgctgccgcagtacggttacgcgacgctgaaccgcgacaacacagaaaatcccaccgagaggagcagcttcttctgcctagagtactttcccagcaagatgctgagaacgggcaacaactttgagtttacctacaactttgaggaggtgcccttccactccagcttcgctcccagtcagaacctgttcaagctggccaacccgctggtggaccagtacttgtaccgcttcgtgagcacaaataacactggcggagtccagttcaacaagaacctggccgggagatacgccaacacctacaaaaactggttcccggggcccatgggccgaacccagggctggaacctgggctccggggtcaaccgcgccagtgtcagcgccttcgccacgaccaataggatggagctcgagggcgcgagttaccaggtgcccccgcagccgaacggcatgaccaacaacctccagggcagcaacacctatgccctggagaacactatgatcttcaacagccagccggcgaacccgggcaccaccgccacgtacctcgagggcaacatgctcatcaccagcgagagcgagacgcagccggtgaaccgcgtggcgtacaacgtcggcgggcagatggccaccaacaaccagagctccaccactgcccccgcgaccggcacgtacaacctccaggaaatcgtgcccggcagcgtgtggatggagagggacgtgtacctccaaggacccatctgggccaagatcccagagacgggggcgcactttcacccctctccggccatgggcggattcggactcaaacacccaccgcccatgatgctcatcaagaacacgcctgtgcccggaaatatcaccagcttctcggacgtgcccgtcagcagcttcatcacccagtacagcaccgggcaggtcaccgtggagatggagtgggagctcaagaaggaaaactccaagaggtggaacccagagatccagtacacaaacaactacaacgacccccagtttgtggactttgccccggacagcaccggggaatacagaaccaccagacctatcggaacccgataccttacccgacccctttaacccattcatgtcgcataccctcaataaaccgtgtattcgtgtcagtaaaatactgcctc

SEQ ID NO: 818 - protein, 736 aa, Artificial Sequence
  Description of Artificial Sequence: Synthetic polypeptide
MAADGYLPDWLEDNLSEGIREWWALKPGVPQPKANQQHQDNRRGLVLPGYKYLGPGNGLDKGEPVNEADAAALEHDKAYDQQLKAGDNPYLKYNHADAEFQERLQEDTSFGGNLGRAVFQAKKRILEPLGLVEEAAKTAPGKKRPVDQSPQEPDSSSGVGKSGKQPARKRLNFGQTGDSESVPDPQPLGEPPAAPTSLGSNTMASGGGAPMADNNEGADGVGNSSGNWHCDSQWLGDRVITTSTRTWALPTYNNHLYKQISSQSGASNDNHYFGYSTPWGYFDFNRFHCHFSPRDWQRLINNNWGFRPKKLSFKLFNIQVKEVTQNDGTTTIANNLTSTVQVFTDSEYQLPYVLGSAHQGCLPPFPADVFMVPQYGYLTLNNGSQAVGRSSFYCPEYFPSQMLRTGNNFQFSYTFEDVPFHSSYAHSQSLDRLMNPLIDQYLYYLNRTQGTTSGTTNQSRLLFSQAGPQSMSLQARNWLPGPCYRQQRLSKTANDNNNSNFPWTAASKYHLNGRDSLVNPGPAMASHKDDEEKFFPMHGNLIFGKEGTTASNAELDNVMITDEEEIRTTNPVATEQYGTVANNLQSSNTAPTTRTVNDQGALPGMVWQDRDVYLQGPIWAKIPHTDGHFHPSPLMGGFGLKHPPPQIMIKNTPVPANPPTTFSPAKFASFITQYSTGQVSVEIEWELQKENSKRWNPEIQYTSNYNKSVNVDFTVDTNGVYSEPHPIGTRYLTRNL

SEQ ID NO: 819 - protein, 736 aa, Artificial Sequence
  Description of Artificial Sequence: Synthetic polypeptide
MAADGYLPDWLEDNLSEGIREWWALKPGVPQPKANQQHQDNRRGLVLPGYKYLGPGNGLDKGEPVNEADAAALEHDKAYDQQLKAGDNPYLKYNHADAEFQERLQEDTSFGGNLGRAVFQAKKRILEPLGLVEEAAKTAPGKKRPVDQSPQEPDSSSGVGKSGKQPARKRLNFGQTGDSESVPDPQPLGEPPAAPTSLGSNTMASGGGAPMADNNEGADGVGNSSGNWHCDSQWLGDRVITTSTRTWALPTYNNHLYKQISSQSGASNDNHYFGYSTPWGYFDFNRFHCHFSPRDWQRLINNNWGFRPKKLSFKLFNIQVKEVTQNDGTTTVANNLTSTVQVFTDSEYQLPYVLGSAHQGCLPPFPADVFMVPQYGYLTLNNGSQAVGRSSFYCLEYFPSQMLRTGNNFQFSYTFEDVPFHSSYAHSQSLDRLMNPLIDQYLYYLNRTQGTTSGTTNQSRLLFSQAGPQSMSLQARNWLPGPCYRQQRLSKTANDNNNSNFPWTAASKYHLNGRDSLVNPGPAMASHKDDEEKFFPMHGNLIFGKEGTTASNAELDNVMITDEEEIRTTNPVATEQYGTVANNLQSSNTAPTTRTVNDQGALPGMVWQDRDVYLQGPIWAKIPHTDGHFHPSPLMGGFGLKHPPPQIMIKNTPVPANPPTTFSPAKFASFITQYSTGQVSVEIEWELQKENSKRWNPEIQYTSNYNKSVNVDFTVDTNGVYSEPRPIGTRYLTRNL

SEQ ID NO: 820 - protein, 736 aa, Artificial Sequence
  Description of Artificial Sequence: Synthetic polypeptide
MAADGYLPDWLEDNLSEGIREWWALKPGVPQPKANQQHQDNRRGLVLPGYKYLGPGNGLDKGEPVNEADAAALEHDKAYDQQLKAGDNPYLKYNHADAEFQERLQEDTSFGGNLGRAVFQAKKRILEPLGLVEEAAKTAPGKKRPVDQSPQEPDSSSGVGKSGKQPARKRLNFGQTGDSESVPDPQPLGEPPAAPTSLGSNTMASGGGAPMADNNEGADGVGNSSGNWHCDSQWLGDRVITTSTRTWALPTYNNHLYKQISGQSGASNDNHYFGYSTPWGYFDFNRFHCHFSPRDWQRLINNNWGFRPKKLSFKLFNIQVKEVTQNDGTTTIANNLTSTVQVFTDSEYQLPYVLGSAHQGCLPPFPADVFMVPQYGYLTLNNGSQAVGRSSFYCLEYFPSQMLRTGNNFQFSYTFEDVPFHSSYAHSQSLDRLMNPLIDQYLYYLNRTQGTTSGTTNQSRLLFSQAGPQSMSLQARNWLPGPCYRQQRLSKTANGNNNSNFPWTAASKYHLNGRDSLVNPGPAMASHKDDEEKFFPMHGNLIFGKEGTTASNAELDNVMITDEEEIRTTNPVATEQCGTVANNLQSSNTAPTTRTVNDQGALPGMVWQDRDVYLQGPIWAKIPHTDGHFHPSPLMGGFGLKHPPPQIMIKNTPVPANPPTTFSPAKFASFITQYSTGQVSVEIEWELQKENSKRWNPEIQYTSNYNKSVNVDFTVDTNGVYSEPRPIGTRYLTRNL

SEQ ID NO: 821 - protein, 736 aa, Artificial Sequence
  Description of Artificial Sequence: Synthetic polypeptide
MAADGYLPDWLEDNLSEGIREWWALKPGVPQPKANQQHQDNRRGLVLPGYKYLGPGNGLDKGEPVNEADAAALEHDKAYDQQLKAGDNPYLKYNHADAEFQERLQEDTSFGGNLGRAVFQAKKRILEPLGLVEGAAKTAPGKKRPVDQSPQEPDSSSGVGKSGKQPARKRLNFGQTGDSESVPDPQPLGEPPAAPTSLGSNTMASGGGAPMADNNEGADGVGNSSGNWHCDSQWLGDRVITTSTRTWALPTYNSHLYKQISSQSGASNDNHYFGYSTPWGYFDFNRFHCHFSPRDWQRLINNNWGFRPKKLSFKLFNIQVKEVTQNDGTTTIANNLTSTVQVFTDSEYQLPYVLGSAHQGCLPPFPADAFMVPQYGYLTLNNGSQAVGRSSFYCLEYFPSQMLRTGNNFQFSYTFEDVPFHGSYAHSQSLDRLMNPLIDQYLYYLNRTQGTTSGTTNQSRLLFSQAGPQSMSLQARNWLPGPCYRQQRLSKTANDNNNSNFPWTAASKYHLNGRDSLVNPGPAMASHKDDEEKFFPMHGNLIFGKEGTTASNAELDNVMITDEEEIRTTNPVATEQYGTVANNLQSSNTAPTTRTVNDQGALPGMVWQDRDVYLQGPIWAKIPHTDGHFHPSPLMGGFGLKHPPPQIMIKNTPVPANPPTTFSPAKFASFITQYSTGQVSVEIEWELQKENSKRWNPEIQYTSNYNKSVNVDFTVDTNGVYSEPRPIGTRYLTRNS

SEQ ID NO: 822 - protein, 736 aa, Artificial Sequence
  Description of Artificial Sequence: Synthetic polypeptide
MAADGYLPDWLEDNLSEGIREWWALKPGVPQPKANQQHQDNRRGLVLPGYKYLGPGNGLDKGEPVNEADAAALEHDKAYDQQLKAGDNPYLKYNHADAEFQERLQEDTSFGGNLGRAVFQAKKRILEPLGLVEGAAKTAPGKKRPVDQSPQEPDSSSGVGKSGKQLARKRLNFGQTGDSESVPDPQPLGEPPAAPTSLGSNTMASGGGAPMADNNEGADGVGNSSGNWHCDSQWLGDRVITTSTRTWALPTYNSHLYKQISGQSGASNDNHYFGYSTPWGYFDFNRFHCHFSPRDWQRLINNNWGFRPKKLSFKLFNIQVKEVTQNDGTTTIANNLTSTVQVFTDSEYQLPYVLGSAHQGCLPPFPADVFMVPQYGYLTLNNGSQAVGRSSFYCLEYFPSQMLRTGNNFQFSYTFEDVPFHSSYAHSQSLDRLMNPLIDQYLYYLNRTQGTTSGTTNQSRLLFSQAGPQSMSLQARNWLPGPCYRQQRLSKTANDNNNSNFPWTAASKYHLNGRDSLVNPGPAMASHKDDEEKFFPMHGNLIFGKEGTTASNAELDNVMITDEEEIRTTNPVATEQYGTVANNLQSSNTAPTTRTVNDQGALPGMVWQDRDVYLQGPIWAKIPHTDGHFHPSPLMGGFGLKHPPPQIMIKNTPVPANPPTTFSPAKFASFITQYSTGQVSVEIEWELQKENSKRWNPEIQYTSNYNKSVNVDFTVDTNGVYSEPRPIGTRYLTRNL

SEQ ID NO: 823 - protein, 736 aa, Artificial Sequence
  Description of Artificial Sequence: Synthetic polypeptide
MAADGYLPDWLEDNLSEGIREWWALKPGVPQPKANQQHQDDRRGLVLPGYKYLGPGNGLDKGEPVNEADAAALEHDKAYDQQLKAGDNPCLKYNHADAEFQERLQEDTSFGGNLGRAVFQAKKRILEPLGLVEEAAKTAPGKKRPVDQSPQEPDSSSGVGKSGKQPARKRLNFGQTGDSESVPDPQPLGEPPAAPTSLGSNTMASGGSAPMADNNEGADGVGNSSGNWHCDSQWLGDRVITTSTRTWALPTYNNHLYKQISSQSGASNDNHYFGYSTPWGYFDFNRFHCHFSPRDWQRLINNNWGFRPKKLSFKLFNIQVKEVTQNDGTTTIANNLTSTVQVFTDSEYQLPYVLGSAHQGCLPPFPADVFMVPQYGYLTLNNGSQAVGRSSFYCLEYFPSQMLRTGNNFQFSYTFEDVPFHSSYAHSQSLDRLMDPLIDQYLYYLNRTQGTTSGTTNQSRLLFSQAGPQSMSLQARNWLPGPCYRQQRLSKTANDNNNSNFPWTAASKYHLNGRDSLVNPGPAMASHKDDEEKFFPMHGNLIFGKEGTTASNAELDNVMITDEEEIRTTNPVATEQYGTVANNLQSSNTAPTTRTVNDQGALPGMVWQDRDVYLQGPIWAKIPHTDGHFHPSPLMGGFGLKHPPPQIMIKNTPVPANPPTTFSPAKFASFITQYSTGQVSVEIEWELQKENSKRWNPEIQYTSNYNKSVNVDFTVDTNGVYSEPRPIGTRYLTRNL

SEQ ID NO: 824 - protein, 736 aa, Artificial Sequence
  Description of Artificial Sequence: Synthetic polypeptide
MAADGYLPDWLEDNLSEGIREWWALKPGVPQPKANQQHQDDRRGLVLPGYKYLGPGNGLDKGEPVNEADAAALEHDKAYDQQLKAGDNPYLKYNHADAEFQERLQEDTSFGGNLGRAVFQAKKRILEPLGLVEEAAKTAPGKKRPVDQSPQEPDSSSGVGKSGKQPARKRLNFGQTGDSESVPDPQPLGEPPAAPTSLGSNTMASGGGAPMADNNEGADGVGNSSGNWHCDSQWLGNRVITTSTRTWALPTYNNHLYKQISSQSGASNDNHYFGYSTPWGYFDFNRFHCHFSPRDWQRLINNNWGFRPKKLSFKLFNIQVKEVTQNDGTTTIANNLTSTVQVFTDSEYQLPYVLGSAHQGCLPPFPADVFMVPQYGYLTLNNGSQAVGRSSFYCLEYFPSQMLRTGNNFQFSYTFEDVPFHSSYAHSQSLDRLMNPLIDQYLYYLNRTQGTTSGTTNQSRLLFSQAGPQSMSLQARNWLPGPCYRQQRLSKTANDNNNSNFPWTAASKYHLNGRDSLVNPGPAMASHKDDEEKFFPMHGNLIFGKEGTTASNAELDNVMITDEEEIRTTNPVATEQYGTVANNLQSSNTAPTTRTVNDQGALPGMVWQDRDVYLQGPIWAKIPHTDGHFHPSPLMGGFGLKHPPPQIMIKNTPVPANPPTTFSPAKFASFITQYSTGQVSVEIEWELQKENSKRWNPEIQYTSNYNKSVNVDFTVDTNGVYSEPRPIGTRYLTRNL

SEQ ID NO: 825 - protein, 736 aa, Artificial Sequence
  Description of Artificial Sequence: Synthetic polypeptide
MAADGYLPDWLEDNLSEGIREWWALKPGVPQPKANQQHQDDRRGLVLPGYKYLGPGNGLDKGEPVNEADAAALEHDKAYDQQLKAGDNPYLKYNHADAEFQERLQEDTSFGGNLGRAVFQAKKRILEPLGLVEEAAKTAPGKKRPVDQSPQEPDSSSGVGKSGKQPARKRLNFGQTGDSESVPDPQPLGEPPAAPTSLGSNTMASGGGAPMADNNEGADGVGNSSGNWHCDSQWLGDRVITTSTRTWALPTYNNHLYKQISSQSGASNDNHYFGYSTPWGYFDFNRFHCHFSPRDWQRLINNNWGFRPKKLSFKLFNIQVKEVTQNDGTTTIANNLTSTVQVFTDSEYQLPYVLGSAHQGCLPPFPADVFMVPQYGYLTLNNGSQAVGRSSFYCLEYFPSQMLRTGNNFQFSYTFEDVPFHSSYAHSQSLDRLMNPLIDQYLYYLNRTQGTTSGTTNQSRLLFSQAGPQSMSLQARNWLPGPCYRQQRLSKTANDNNNSNFPWTAASKYHLNGRDSLVNPGPAMASHKDDEEKFFPMHGNLIFGKEGTTASNAELDNVMITDEEEIRTTNPVATVQYGTVANNLQSSNTAPTTRTVNDQGALPGMVWQDRDVYLQGPIWAKIPHTDGHFHPSPLMGGFGLKHPPPQIMIKNTPVPANPPTTFSPAKFASFITQYSTGQVSVEIEWELQKENSKRWNPEIQYTSNYNKSVNVDFTVDTNGVYSEPRPIGTRYLTRNL

SEQ ID NO: 826 - protein, 735 aa, Artificial Sequence
  Description of Artificial Sequence: Synthetic polypeptide
MAADGYLPDWLEDNLSEGIREWWALKPGVPQPKANQQHQDNRRGLVLPGYKYLGPGNGLDKGEPVNEADAAALEHDKAYDQQLKAGDNPYLKYNHADAEFQERLQEDTSFGGNLGRAVFQAKKGILEPLGLVEEAAKTAPGKKRPVDQSPQEPDSSSGVGKSGKQPARKRLNFGQTGDSESVPDPQPLGEPPAAPTSLGSNTMASGGGAPMADNNEGADGVGNSSGNWHCDSQWLGDRVITTSTRTWALPTYNNHLYKQISSQSGASNDNHYFGYSTPWGYFDFNRFHCHFSPRDWQRLINNNWGFRPKKLSFKLFNIQVKEVTQNDGTTTIANNLTSTVQVFTDSEYQLPYVFGSAHQGCLPPFPADVFMVPQYGYLTLNNGSQAVGRSSFYCLEYFPSQMLRTGNNFQFSYTFEDVPFHSSYAHSQSSDRLMNPLIDQYLYYLNRTQGTTSGTTNQSRLLFSQAGPQSMSLQARNWLPGPCYRQQRLSKTANDNNNSNFPTAASKYHLNGRDSLVNPGPAMASHKDDEEKFFPMHGNLIFGKEGTTASNAELDNVMITDEEEIRTTNPVATEQYGTVANNLQSSNTAPTTRTVNDQGALPGMVWQDRDVYLQGPIWAKIPHTDGHFHPSPLMGGFGLKHPPPQIMIKNTPVPANPPTTFSPAKFASFITQYSTGQVSVEIEWELQKENSKRWNPEIQYTSNYNKSVNVDFTVDTNGVYSEPRPIGTRYLTRNL

SEQ ID NO: 827 - protein, 736 aa, Artificial Sequence
  Description of Artificial Sequence: Synthetic polypeptide
MAADGYLPDWLEDNLSEGIREWWALKPGVPQPKANQQHQDNRRGLVLPGYKYLGPGNGLDEGEPVNEADAAALEHDKAYDQQLKAGDNPYLKYNHADAEFQERLQEDTSFGGNLGRAVFQAKKRILEPLGLVEGAAKTAPGKKRPVDQSPQEPDSSSGVGKSGKQPARKRLNFGQTGDSESVPDPQPLGEPPAAPTSLGSNTMASGGGAPMADNNEGADGVGNSSGNWHCDSQWLGDRVITTSTRTWALPTYNSHLYKQISSQSGASNDNHYFGYSTPWGYFDFNRFHCHFSPRDWQRLINNNWGFRPKKLSFKLFNIQVKEVTQNDGTTTIANNLTSTVQVFTDSEYQLPYVLGSAHQGCLPPFPADVFMVPQYGYLTLNNGSQAVGRSSFYCLEYFPSQMLRTGNNFQFSYTFEDVPFHSSYAHSQSLDRLMNPLIDQYLYYLNRTQGTTSGTTNQSRLLFSQAGPQSMSLQARNWLPGPCYRQQRLSKTANDNNNSNFPWTAASKYHLNGRDSLVNPGPAMASHKDDEEKFFPMHGNLIFGKEGTTASNAELDNVMITDEEEIRTTNPVATEQYGTVANNLQSSNTAPTTRTVNDQGALPGMVWQDRDVYLQGPIWAKIPHTDGHFHPSPLMGGFGLKHPPPQIMIKNTPVPANPPTTFSPAKFASFITQYSTGQVSVEIEWELQKENSKRWNPEIQYTSNYNKSVNVDFTVDTNGVYSEPRPIGTRYLTRNL

SEQ ID NO: 828 - protein, 668 aa, Artificial Sequence
  Description of Artificial Sequence: Synthetic polypeptide
MAADGYLPDWLEDNLSEGIREWWALKPGVPQPKANQQHQDNRRGLVLPGYKYLGPGNGLDKGEPVNEADAAALEHDKAYDQQLKAGDNPYLKYNHADAEFQERLQEDTSFGGNLGRAVFQAKKRILEPLGLVEGAAKTAPGKKRPVDQSPQEPDSSSGVGKSGKQPARKRLNFGQTGDSESVPDPQPLGEPPAAPTSLGSNTMASGGGAPMADNNEGADGVGNSSGNWHCDSQWLGDRVITTSTRTWALPTYNSHLYKQISSQSGASNDNHYFGYSTPWGILTLTDSTATSHHVTGSDSLTTTGDSGPRNSASSSSTSKLKRSRRTMARRLLPITLPARFKCLRTRSISSRTCSGRRTKAVSRRFQRTPSWSLSMDTSPTTEVKRWDAHPFTAWSTSLRRCGLEITSNSAIPSRMYLFTAATLTARVWIAILLLISICTTTERKEQPLEQPTNHGCFLARLGLSLCLCRPEIGYLGPATGNRDFQRLLTTTTTVTFLGQRPANIISMAATRWIQDQLWPVTRTMKKNFSLCTAIRGPYLAWCGKIVTCTFKDLSGQRFLTRMDTFILLLWEALDNIRLLKSSKILRYRQILRRLSARPSLLHLSLSTPLDRSAWKLSGSYRKKTANVGIQRFSTLPTTTSLLMWTLLTLMVFIVNLALLEPGISHETC

SEQ ID NO: 829 - protein, 734 aa, Artificial Sequence
  Description of Artificial Sequence: Synthetic polypeptide
MTDGYLPDWLEDNLSEGVREWWALQPGAPKPKANQQHQDNARGLVLPGYKYLGPGNGLDKGEPVNAADAAALEHDKAYDQQLKAGDNPYLKYNHADAEFQQRLQGDTSFGGNLGRAVFQAKKRVLEPLGLVEQAGETAPGKKRPLIESPQQPDSSTGIGKKGKQPAKKKLVFEDETGAGDGPPEGSTSGAMSDDSEMRAATGGAAVEGGQGADGVGNASGDWHCDSTWSEGHVTTTSTRTWVLPTYNNHLYKRLGESLQSNTYNGFSTPWGYFDFNRFHCHFSPRDWQRLINNNWGMRPKAMRVKIFNIQVKEVTTSNGETTVANNLTSTVQIFADSSYELPYVMDAGQEGSLPPFPNDVFMVPQYGYCGLVTGNTSQQQTDRNAFYCLEYFPSQMLRTGNNFEITYSFEKVPFHSMYAHSQSLDRLMNPLIDQYLWGLQSTTTGTTLNAGTATTNFTKLRPTNLSNFKKNWLPGPSIKQQGFSKTANQNYKIPATGSDSLIKYETHSTLDGRWSALTPGPPMATAGPADSKFSNSQLIFAGPKQNGNTATVPGTLIFTSEEELAATNATDTDMWGNLPGGDQSNSNLPTVDRLTALGAVPGMVWQNRDIYYQGPIWAKIPHTDGHFHPSPLIGGFGLKHPPPQIFIKNTPVPANPATTFSSTPVNSFITQYSTGQVSVQIDWEIQKERSKRWNPEVQFTSNYGQQNSLLWAPDAAGKYTEPRAIGTRYLTHHL

SEQ ID NO: 830 - protein, 734 aa, Artificial Sequence
  Description of Artificial Sequence: Synthetic polypeptide
MTDGYLPDWLEDNLSEGVREWWALQPGAPKPKANQQHQDNARGLVLPGYKYLGPGNGLDKGEPVNAADAAALEHDKAYDQQLKAGDNPYLKYNHADAEFQQRLQGDTSFGGNLGRAVFQAKKRVLEPLGLVEQAGETAPGKKRPLIESPQQPDSSTGIGKKGKQPAKKKLVFEDETGAGDGPPEGSTSGAMSDDSEMRAAAGGAAVEGGQGADGVGNASGDWHCDSTWSEGHVTTTSTRTWVLPTYNNHLYKRLGESLQSNTYNGFSTPWGYFDFNRFHCHFLPRDWQRLINNNWGVRPKAMRVKIFNIQVKEVTTSNGETTVANNLTSTVQIFADSSYELPYVMDAGQEGSLPPFPNDVFMVPQYGYCGLVTGDTSQQQTDRNAFYCLEYFPSQMLRTGNNFEITYSFEKVPFHSMYAHSQSLDRLMNPLIDQYLWGLQSTTTGTTLNAGTATTNFTKLRPTNFSNFKKNWLPGPSIKQQGFSKTANQNYKIPATGSDSLIKYETHSTLDGRWSALTPGPPMATAGPADSKFSNSQLIFAGPKQNGNTATVPGTLIFTSEEELAATNATDTDMWGNLPGGDQSNSNLPTVDRLTALGAVPGMVWQNRDIYYQGPIWAKIPHTDGHFHPSPLIGGFGLKHPPPQIFIKNTPVPANPATTFSSTPVNSFITQYSTGQVSVQIDWEIQKERSKRWNPEVQFTSNYGQQNSLLWAPDAAGKYTEPRAIGTRYLTHHL

SEQ ID NO: 831 - protein, 734 aa, Artificial Sequence
  Description of Artificial Sequence: Synthetic polypeptide
MTDGYLPDWLEDNLSEGVREWWALQPGAPKPKANQQHQDNARGLVLPGYKYLGPGNGLDEGEPVNAADAAALEHDKAYDQQLKAGDNPYLKYNHADAEFQQRLQGDTSFGGNLGRAVFQAKKRVLEPLGLVEQAGETAPGKKRPLIESPQQPDSSTGIGKKGKQPAKKKLVFEDETGAGDGPPEGSTSGAMSDDSEMRAAAGGAAVEGGQGADGVGNASGDWHCDSTWSEGHVTTTSTRTWVLPTYNNHLYKRLGESLQSNTYNGFSTPWGYFDFNRFHCHFSPRDWQRLINNNWGMRPKAMRVKIFNIQVKEVTTSNGETTVANNLTSTVQIFADSSYELPYVMDAGQEGSLPPFPNDVFMVPQYGYCGLVTGNTSQQQTDRNAFYCLEYFPSQMLRTGNNFEITYSFEKVPFHSMYAHSQSLDRLMNPLIDQYLWGLQSTTTGTTLNAGTATTNFTKLRPTNFSNFKKNWLPGPSIKQQGFSKTANQNYKIPATGSDSLIKYETHSTLDGRWSALTPGPPMATAGPADSKFSNSQLIFAGPKQNGNTATVPGTLIFTSEEELAATNATDTDMWGNLPGGDQSNSNLPTVDRLTALGAVPGMVWQNRDIYYQGPIWAKIPHTDGHFHPSPLIGGFGLKHPPPQIFIKNTPVPANPATTFSSTPVNSFITQYSTGQVSVQIDWEIQKERSKRWNPEVQFTSNYGQQNSLLWAPDAAGKYTEPRAIGTRYLTHHL

SEQ ID NO: 832 - protein, 734 aa, Artificial Sequence
  Description of Artificial Sequence: Synthetic polypeptide
MTDGYLPDWLEDNLSEGVREWWALQPGAPKPKANQQHQDNARGLVLPGYKYLGPGNGLDKGEPVNAADAAALEHDKAYDQQLKAGDNPYLKYNHADAEFQQRLQGDTSFGGNLGRAVFQAKKRVLEPLGLVEQAGETAPGKKRPLIESPQQPDSSTGIGKKGKQPAKKKLVFEDGTGAGDGPPEGSTSGAMSDDSEMRAAAGGAAVEGGQGADGVGNASGDWHCDSTWSEGHVTTTSTRTWVLPTYNNHLYKRLGESLQSNTYNGFPTPWGYFDFNRFHCHFSPRDWQRLINNNWGMRPKAMRVKIFNIQVKEVTTSNGETTAANNLTSTVQIFADSSYELPYVMDAGQEGSLPPFPNDVFMVPQYGYCGLVTGNTSQQQTDRNAFYCLEYFPSQMLRTGNNFEITYSFEKVPFHSMYAHSQSLDRLMNPLIDQYLWGLQSTTTGTTLNAGTATTNFTKLRPTNFSNFKKNWLPGPSIKQQGFSKTANQNYKIPATGSDSLIKYETHSTLDGRWSALTPGPPMATAGPADSKFSNSQLIFAGPKQNGNTATVPGTLIFTSEEELAATNATDTDMWGNLPGGDQSNSNLPTVDRLTALGAVPGMVWQNRDIYYQGPIWAKIPHTDGHFHPSPLIGGFGLKHPPPQIFIKNTPVPANPATTFSSTPVNSFITQYSTGQVSVQIDWEIQKERSKRWNPEVQFTSNYGQQNSLLWAPDAAGKYTEPRAIGTRYLTHHL

SEQ ID NO: 833 - protein, 734 aa, Artificial Sequence
  Description of Artificial Sequence: Synthetic polypeptide
MTDGYLPDWLEDNLSEGVREWWALQPGAPKPKANQQHQDNARGLVLPGYKYLGPGNGLDKGEPVNAADAAALEHDKAYDQQLKAGDNPYLKYNHADAEFQQRLQGDTSFGGNLGRAVFQAKKRVLEPLGLVEQAGETAPGKKRPLIESPQQPDSSTGIGKKGKQPAKKKLVFEDETGAGDGPPEGSTSGAMSDDSEMRAAAGGAAVEGGQGADGVGNASGDWHCDSTWSEGHVTTTSTRTWVLPTYNNHLYKRLGESLQSNTYNGFSTPWGYFDFNRFHCHFSPRDWQRLINNNWGMRPKAMRVKIFNIQVKEVTTSNGETTVANNLTSTVQIFADSSYELPYVMDAGQEGSLPPFPNDVFMVPQYGYRGLVTGNTSQQQTDRNAFYCLEYFPSQMLRTGNNFEITYSFEKVPFHSMYAHSQSLDRLMNPLIDQYLWGLQSTTTGTTLNAGTATTNFTKLRPTNFSNFKKNWLPGPSIKQQGFSKTANQNYKIPATGSDSLIKYETHSTLDGRWSALTPGPPMATAGPADSKFSNSQLIFAGPKQNGNTATVPGTLIFTSEEELAATNATDTDMWGNLPGGDQSNSNLPTVDRLTALGAVPGMVWQNRDIYYQGPIWAKIPHTDGHFHPSPLIGGFGLKHPPPQIFIKNTPVPANPATTFSSTPVNSFITQYSTGQVSVQIDWEIQKERSKRWNPEVQFTSNYGQQNSLLWAPDAAGKYTEPRAIGTRYLTHHL

SEQ ID NO: 834 - protein, 734 aa, Artificial Sequence
  Description of Artificial Sequence: Synthetic polypeptide
MTDGYLPDWLEDNLSEGVREWWALQPGAPKPKANQQHQDNARGLVLQGYKYLGPGNGLDKGEPVNAADAAALEHDKAYDQQLKAGDNPYLKYNHADAEFQQRLQGDTSFGGNLGRAVFQAKKRVLEPLGLVEQAGETAPGKKRPLIESPQQPDSSTGIGKKGKQPAKKKLVFEDETGAGDGPPEGSTSGAMSDDSEMRAAAGGAAVEGGQGADGVGNASGDWHCDSTRSEGHVTTTSTRTWVLPTYNNHLYKRLGESLQSNTYNGFSTPWGYFDFNRFHCHFSPRDWQRLINNNWGMRPKAMRVKIFNIQVKEVTTSNGETTVANNLTSTVQIFADSSYELPYVMDAGQEGSLPPFPNDVFMVPQYGYCGLVTGNTSQQQTDRNAFYCLEYFPSQMLRTGNNFEITYSFEKVPFHSMYAHSQSLDRLMNPLIDQYLWGLQSTTTGTTLNAGTATTNFTKLRPTNFSNFKKNWLPGPSIKQQGFSKTANQNYKIPATGSDSLIKYETHSTLDGRWSARTPGPPMATAGPADSKFSNSQLIFAGPKQNGNTATVPGTLIFTSEEELAATNATDTDMWGNLPGGDQSNSNLPTVDRLTALGAVPGMVWQNRDIYYQGPIWAKIPHTDGHFHPSPLIGGFGLKHPPPQIFIKNTPVPANPATTFSSTPVNSFITQYSTGQVSVQIDWEIQKERSKRWNPEVQFTSNYGQQNSLLWAPDAAGKYTEPRAIGTRYLTHHL

SEQ ID NO: 835 - protein, 724 aa, Artificial Sequence
  Description of Artificial Sequence: Synthetic polypeptide
MSFVDHPPDWLEEVGEGLREFLGLEAGPPKPKPNQQHQDQARGLVLPGYNYLGPGNGLDRGEPVNRADEVAREHDISYNEQLEAGDNPYLKYNHADAEFQERLADDTSFGGNLGKAVFQAKKRVLEPFGLVEEGAKTAPTGKRIDDHFPKRKKARTEEDSKPSTSSDAEAGPSGSQQLQIPAQPASSLGADTMSAGGGGPLGDNNQGADGVGNASGDWHCDSTWMGDRVVTKSTRTWVLPSYNNHQYREIKSGSVDGSNANAYFGYSTPWGYFDFNRFHSHWSPRDWQRLINNYWGFRPRSLRVKIFNIQVKEVTVQDSTTTIANNLTSTVQVFTDDDYQLPYVVGNGTEGCLPAFPPQVFTLPQYGYATLNRDNTENPTERSSFFCLEYFPSKMLRTGNNFEFTYNFEEVPFHSSFAPSQNLFKLANPLVDQYLYRFVSTNNTGGVQFNKNLAGRYANTYKNWFPGPMGRTQGWNLGSGVNRASVSAFATTNRMELEGASYQVPPQPNGMTNNLQGSNTYALENTMIFNSQPANPGTTATYLEGNMLITSESETQPVNRVAYNVGGQMATNNQSSTTAPATGTYNLQEIVPGSVWMERDVYLQGPIWAKIPETEAHFHPSPAMGGFGLKHPPPMMLIKNTPVPGNITSFSDVPVSSFITQYSTGQVTVEMEWELKKENSKRWNPEIQYTNNYNDPQFVDFAPDSTGEYRTTRPIGTRYLTRPL

SEQ ID NO: 836 - protein, 724 aa, Artificial Sequence
  Description of Artificial Sequence: Synthetic polypeptide
MSFVDHPPDWLEEVGEGLREFLGLEAGPPKPKPNQQHQDQARGLVLPGYNYLGPGNGLDRGEPVNRADEVAREHDISYNEQLEAGDNPYLKYNHADAEFQEKLADDTSSGGNLGKAVFQAKKRVLEPFGLVEEGAKTAPTGKRIDDHFPKRKKARTEEDSKPSTSSDAEAGPSGSQQLQIPAQPASSLGADTMSAGGGGPLGDNNQGADGVGNASGDWHCDSTWMGDRVVTKSTRTWVLPSYNNHQYREIKSGSVDGSNANAYFGYSTPWGYFDFNRFHSHWSPRDWQRLINNYWGFRPRSLRVKIFNIQVKEVTVQDSTTTIANNLTSTVQVFTDDDYQLPYVVGNGTEGCLPAFPPQVFTLPQYGYATLNRDNTENPTERSSFFCLEYFPSKMLRTGNNFEFTYNFEEVPFHSSFAPSQNLFKLANPLVDQYLYRFVSTNNTGGVQFNKNLAGRYANTYKNWFPGPMGRTQGWNLGSGVNRASVSAFATTNRMELEGASYQVPPQPNGMTNNLQGSNTYALENTMIFNSQPANPGTTATYLEGNMLITSESETQPVNRVAYNVGGQMATNNQSSTTAPATGTYNLQEIVPGSVWMERDVYLQGPIWAKIPETGAHFHPSPAMGGFGLKHPPPMMLIKNTPVPGNITSFSDVPVSSFITQYSTGQVTVEMEWELKKENSKRWNPEIQYTNNYNDPQFVDFAPDSTGEYRTTRPIGTRYLTRPL

SEQ ID NO: 837 - protein, 724 aa, Artificial Sequence
  Description of Artificial Sequence: Synthetic polypeptide
MSFVDHPPDWLEEVGEGLREFLGLEAGPPKPKPNQQHQDQARGLVLPGYNYLGPGNGLDRGEPVNRADEVAREHDISYNEQLEAGDNPYLKYNHADAEFQEKLADDTSFGGNLGKAVFQAKKRVLEPFGLVEEGAKTAPTGKRIDDHFPKRKKARTEEDSKPSTSSDAEAGPSGSQQLQIPAQPASSLGADTMSAGGGGPLGDNNQGADGVGNASGDWHCDSTWMGDRVVTKSTRTWVLPSYNNHQYREIKSGSVDGSNANAYFGYSTPWGYFDFNRFHSHWSPRDWQRLINNYWGFRPRSLRVKIFNIQVKEVTVQDSTTTIANNLTSTVQVFTDDDYQLPYVVGNGTEGCLPAFPPQVFTLPQYGYATLNRDNTENPTERSSFFCLEYFPSKMLRTGNNFEFTYNFEEVPFHSSFAPSQNLFKLANPLVDQYLYRFVSTNNTGGVQFNKNLAGRYANTYKNWFPGPMGRTQGWNLGSGVNRASVSAFATTNRMELEGASYQVPPQPNGMTNNLQGSNTYALENTMIFNSQPANPGTTATYLEGNMLITSESETQPVNRVAYNVGGQMATNNQSSTTAPATGTYNLQEIVPGSVWMERDVYLQGPIWAKIPETGAHFHPSPAMGGFGLKHPPPMMLIKSTPVPGNITSFSDVPVSSFITQYSTGQVTVEMEWELKKENSKRWNPEIQYTNNYNDPQFVDFAPDSTGEYRTTRPIGTRYLTRPL

SEQ ID NO: 838 - protein, 724 aa, Artificial Sequence
  Description of Artificial Sequence: Synthetic polypeptide
MSFVDHPPDWLEEVGEGLREFLGPEAGPPKPKPNQQHQDQARGLVLPGYNYLGPGNGLDRGEPVNRADEVAREHDISYNEQLEAGDNPYLKYNHADAEFQEKLADDTSFGGNLGKAVFQAKKRVLEPFGLVEEGAKTAPTGKRIDDHFPKRKKVRTEEDSKPSTSSDAEAGPSGSQQLQIPAQPASSLGADTMSAGGGGPLGDNNQGADGVGNASGDWHCDSTWMGDRVVTKSTRTWVPPSYNNHQYREIKSGSVDGSNANAYFGYSTPWGYFDFNRFHSHWSPRDWQRLINNYWGFRPRSLRVKIFNIQVKEVTVQDSTTTIANNLTSTVQVFTDDDYQLPYVVGNGTEGCLPAFPPQVFTLPQYGYATLNRDNTENPTERSSFFCLEYFPSKMLRTGNNFEFTYNFEEVPFHSSFAPSQNLFKLANPLVDQYLYRFVSTNNTGGVQFNKNLAGRYANTYKNWFPGPMGRTQGWNLGSGVNRASVSAFATTNRMELEGASYQVPPQPNGMTNNLQGSNTYALENTMIFNSQPANPGTTATYLEGNMLITSESETQPVNRVACNVGGQMATNNQSSTTAPATGTYNLQEIVPGSVWMERDVYLQGPIWAKIPETGAHFHPSPAMGGFGLKHPPPMMLIKNTPVPGNITSFSDVPVSSFITQYSTGQVTVEMEWELKKENSKRWNPEIQYTNNYNDPQFVDFAPDSTGEYRTTRPIGTRYLTRPL

SEQ ID NO: 839 - protein, 724 aa, Artificial Sequence
  Description of Artificial Sequence: Synthetic polypeptide
MSFVDHPPDWLEEVGEGLREFLGLEAGPPKPKPNQQHQDQARGLVLPGYNYLGPGNGLDRGEPVNRADEVAREHDISYNEQLEAGDNPYLKYNHADAEFQEKLADDTSFGGNLGKAVFQAKKRVLEPFGLVEEGAKTAPTGKRIDDHFPKRKKARTEEDSKPSTSSDAEAGPSGSQQLQIPAQPASSLGADTMSAGGGGPLGDNNQGADGVGNASGDWHCDSTWMGDRVVTKSTRTWVLPSYNNHQYREIKSGSVDGSNANAYFGYSTPWGYFDFNRFHSHWSPRDWQRLINNYWGFRPRSLRVKIFNIQVKEVTVQDSTTTIANNLTSTVQVFTDDDYQLPYVVGNGTEGCLPAFPPQVFTLPQYGYATLNRDNTENPTERSSFFCLEYFPSKMLRTGNNFEFTYNFEEVPFHSSFAPSQNLFKLANPLVDQYLYRFVSTNNTGGVQFNKNLAGRYANTYKNWFPGPMGRTQGWNLGSGVNRASVSAFATTNRMELEGASYQVPPQPNGMTNNLQGSNTYALENTMIFNSQPANPGTTATYLEGNMLITSESETQPVNRVAYNVGGQMATNNQSSTTAPATGAYNLQEIVPGSVWMERDVYLQGPIWAKIPETGAHFHPSPAMGGFGLKHPPPMMLIKNTPVPGNITSFSDVPVSSFITQYSTGQVTVEMEWELKKENSKRWNPEIQYTNNYNDPQFVDFAPDSTGEYRTTRPIGTRYLTRPL

SEQ ID NO: 840 - protein, 724 aa, Artificial Sequence
  Description of Artificial Sequence: Synthetic polypeptide
MSFVDHPPDWLEEVGEGLREFLGLEAGPPKPKPNQQHQDQARGLVLPGYNYLGPGNGLDRGEPVNRADGVAREHDISYNEQLEAGDNPYLKYNHADAEFQEKLADDTSFGGNLGKAVFQAKKRVLEPFGLVEEGAKTAPTGKRIDDHFPKRKKARTEEDSKPSTSSDAEAGPSGSQQLQIPAQPASSLGADTMSAGGGGPLGDNNQGADGVGNASGDWHCDSTWMGDRVVTKSTRTWVLPSYNNHQYREIKSGSVDGSNANAYFGYSTPWGYFDFNRFHSHWSPRDWQRLINNYWGFRPRSLRVKIFNIQVKEVTVQDSTTTIANNLTSTVQAFTDDDYQLPYVVGNGTEGCLPAFPPQVFTLPQYGYATLNRDNTENPTERSSFFCLEYFPSKMLRTGNNFEFTYNFEEVPFHSSFAPSQNLFKLANPLVDQYLYRFVSTNNTGGVQFNKNLAGRYANTYKNWFPGPMGRTQGWNLGSGVNRASVSAFATTNRMELEGASYQVPPQPNGMTNNLQGSNTYALENTMIFNSQPANPGTTATYLEGNMLITSESETQPVNRVAYNVGGQMATNNQSSTTAPATGTYNLQEIVPGSVWMERDVYLQGPIWAKIPETGAHFHPSPAMGGFGLKHPPPMMLIKNTPVPGNITSFSDVPVSSFITQYSTGQVTVEMEWELKKENSKRWNPEIQYTNNYNDPQFVDFAPDSTGEYRTTRPIGTRYLTRPL

SEQ ID NO: 841 - protein, 723 aa, Artificial Sequence
  Description of Artificial Sequence: Synthetic polypeptide
MSFVDHPPDWLEEVGEGLREFLGLEAGPPKPKPNQQHQDQARGLVLPGYNYLGPGNGLDRGEPVNRADEVAREHDISYNEQLEAGDNPYLKYNHADAEFQEKLADDTSFGGNLGKAVFQAKKRVLEPFGLVEEGAKTAPTGKRIDDHFPKRKKARTEEDSKPSTSSDAEAGPSGSQQLQIPAQPASSLGADTMSAGGGGPLGDNNQGADGVGNASGDWHCDSTWMGDRVVTKSTRTWVLPSYNNHQYREIKSGSVDGSNANAYFGYSTPWGYFDFNRFHSHWSPRDWQRLINNYWGFRPRSLRVKIFNIQVKEVTVQDSTTTIANNLTSTVQVFTDDDYQLPYVVGNGTEGCLPAFPPQVFTLPQYGYATLNRDNTENPTERSSFFCLEYFPSKMLRTGNNFEFTYNFEEVPFHSSFAPSQNLFKLANPLVDQYLYRFVSTNNTGGVQFNKNLAGRYANTYKNWFPGPMGRTQGWNLGSGVNRASVSAFATTNRMELEGASYVPPQPNGMTNNLQGSNTYALENTMIFNSQPANPGTTATYLEGNMLITSESETQPVNRVAYNVGGQMATNNQSSTTAPATGTYNLQEIVPGSVWMEGDVYLQGPIWAKIPETGAHFHPSPAMGGFGLKHPPPMMLIKNTPVPGNITSFSDVPVSSFITQYSTGQVTVEMEWELKKENSKRWNPEIQYTNNYNDPQFVDFAPDSTGEYRTTRPIGTRYLTRPL

SEQ ID NO: 842 - protein, 724 aa, Artificial Sequence
  Description of Artificial Sequence: Synthetic polypeptide
MSFVDHPPDWLEEVGEGLREFLGLEAGPPKPKPNQQHQDQARGLVLPGYNYLGPGNGLDRGEPVNRADEVAREHDISYNEQLEAGDNPYLKYNHADAEFQEKLADDTSFGGNLGKAVFQAKKRVLEPFGLVEEGAKTAPTGKRIDDHFPKRKKVRTEEDSKPSTSSDAEAGPSGSQQLQIPAQPASSLGADTMSAGGGGPLGDNNQGADGVGNASGDWHCDSTWMGDRVVTKSTRTWVLPSYNNHQYREIKSGSVDGSNANAYFGYSTPWGYFDFNRFHSHWSPRDWQRLINNYWGFRPRSLRVKIFNIQVKEVTVQDSTTTIANNLTSTVQVFTDDDYQLPYVVGNGTEGCLPAFPPQVFTLPQYGYATLNRDNTENPTERSSFFCLEYFPSKMLRTGNNFEFTYNFEEVPFHSSFAPSQNLFKLANPLVDQYLYRFVSTNNTGGVQFNKNLAGRYANTYKNWFPGPMGRTQGWNLGSGVNRASVSAFATTNRMELEGASYQVPPQPNGMTNNLQGSNTYALENTMIFNSQPANPGTTATYLEGNMLITSESETQPVNRVAYNVGGQMATNNQSSTTAPATGTYNLQEIVPGSVWMERDVYLQGPIWAKIPETGAHFHPSPAMGGFGLKHPPPMMLIKNTPVPGNITSFSDVPVSSFITQYSTGQVTVEMEWELKKENSERWNPEIQYTNNYNDPQFVDFAPDSTGEYRTTRPIGTRYLTRPL

SEQ ID NO: 843 - protein, 724 aa, Artificial Sequence
  Description of Artificial Sequence: Synthetic polypeptide
MSFVDHPPDWLEEVGEGLREFLGLEAGPPKPKPNQQHQDQARGLVLPGYNYLGPGNGLDRGEPVNRADEVAREHDISYSEQLEAGDNPYLKYNHADAEFQEKLADDTSFGGNLGKAVFQAKKRVLEPFGLVEEGAKTAPTGKRIDDHFPKRKKARTEEDSKPSTSSDAEAGPSGSQQLQIPAQPASSLGADTMSAGGGGPLGDNNQGADGVGNASGDWHCDSTWMGDRVVTKSTRTWVLPSYNNHQYREIKSGSVDGSNANAYFGYSTPWGYFDFNRFHSHWSPRDWQRLINNYWGFRPRSLRVKIFNIQVKEVTVQDSTTTIANNLTSTVQVFTDDDYQLPYVVGNGTEGCLPAFPPQVFTLPQYGYATLNRDNTENPTERSSFFCLEYFPSKMLRTGNNFEFTYNFEEVPFHSSFAPSQNLFKLANPLVDQYLYRFVSTNNTGGVQFNKNLAGRYANTYKNWFPGPMGRTQGWNLGSGVNRASVSAFATTNRMELEGASYQVPPQPNGMTNNLQGSNTYALENTMIFNSQPANPGTTATYLEGNMLITSESETQPVNRVAYNVGGQMATNNQSSTTAPATGTYNLQEIVPGSVWMERDVYLQGPIWAKIPETGAHFHPSPAMGGFGLKHPPPMMLIKNTPVPGNITSFSDVPVSSFITQYSTGQVTVEMEWELKKENSKRWNPEIQYTNNYNDPQFVDFAPDSTGEYRTARPIGTRYLTRPL

SEQ ID NO: 844 - protein, 724 aa, Artificial Sequence
  Description of Artificial Sequence: Synthetic polypeptide
MSFVDHPPDWLEEVGEGLREFLGPEAGPPKPKPNQQHQDQARGLVLPGYNYLGPGNGLDRGEPVNRADEVAREHDISYNEQLEAGDNPYLKYNHADAEFQEKLADDTSFGGNLGKAVFQAKKRVLEPFGLVEEGAKTAPTGKRIDDHFPKRKKARTEEDSKPSTSSDAEAGPSGSQQLQIPAQPASSLGADTMSAGGGGPLGDNNQGADGVGNASGDWHCDSTWMGDRVVTKSTRTWVLPSYNNHQYREIKSGSVDGSNANAYFGYSTPWGYFDFNRFHSHWSPRDWQRLINNYWGFRPRSLRVKIFNIQVKEVTVQDSTTTIANNLTSTVQVFTDDDYQLPYVVGNGTEGCLPAFPPQVFTLPQYGYATLNRDNTENPTERSSFFCLEYFPSKMLRTGNNFEFTYNFEEVPFHSSFAPSQNLFKLANPLVDQYLYRFVSTNNTGGVQFNKNLAGRYANTYKNWFPGPMGRTQGWNLGSGVNRASVSAFATTNRMELEGASYQVPPQPNGMTNNLQGSNTYALENTMIFNSQPANPGTTATYLEGNMLITSESETQPVNRVAYNVGGQMTTNNQSSTTAPATGTYNLQEIVPGSVWMERDVYPQGPIWAKIPETGAHFHPSPAMGGFGLKHPPPMMLIKNTPVPGNITSFSDVPVSSFITQYSTGQVTVEMEWELKKENSKRWNPEIQYTNNYNDPQFVDFAPDSTGEYRTTRPIGTRYLTRPL

SEQ ID NO: 845 - protein, 724 aa, Artificial Sequence
  Description of Artificial Sequence: Synthetic polypeptide
MSFVDHPPDWLEEVGEGLREFLGLEAGPPKPKPNQQHQDQARGLVLPGYNYLGPGNGLDRGEPVNRADEVAREHDISYNEQLEAGDNPYLKYNHADAEFQEKLADDTSFGGNLGKAVFQAKKRVLEPFGLVEEGAKTAPTGKRIDDHFPKRKKARTEEDSKPSTSSDAEAGPSGSQQLQIPAQPASSLGADTMSAGGGGPLGDNNQGADGVGNASGDWHCDSTWMGDRVVTKSTRTWVLPSYNNHQYREIKSGSVDGSNANAYFGYSTPWGYFDFNRFHSHWSPRDWQRLINNYWGFRPRSLRVKIFNIQVKEVTVQDSTTTIANNLTSTVQVFTDDDYQLPYVVGNGTEGCLPAFPPQVFTLPQYGYATLNRDNTENPTERSSFLCLEYFPSKMLRTGNNFEFTYNFEEVPFHSSFAPSQNLFKLANPLVDQYLYRFVSTNNTGGVQFNKNLAGRYANTYKNWFPGPMGRTQGWNLGSGVNRASVSAFATTNRMELEGASYQVPPQPNGMTNNLQGSNTYALENTMIFNSQPANPGTTATYLEGNMLITSESETQPVNRVAYNVGGQMATNNQSSTTAPATGTYNLQEIVPGSVWMKRDVYLQGPIWAKIPETGAHFHPSPAMGGFGLKHPPPMMLIKNTPVPGNITSFSDVPVSSFITQYSTGQVTVEMEWELKKENSKRWNPEIQYTNNYNDPQFVDFAPDSTGEYRTTRPIGTRYLTRPL

SEQ ID NO: 846 - protein, 724 aa, Artificial Sequence
  Description of Artificial Sequence: Synthetic polypeptide
MSFVDHPPDWLEEVGEGLREFLGLEAGPPKPKPNQQHQDQARGLVLPGYNYLGPGNGLDRGEPVNRADEVAREHDISYNEQLEAGDNPYLKYNHADAEFQEKLADDTSFGGNLGKAVFQAKKRVLEPFGLVEEGAKTAPTGKRIDDHFPKRKKARTEEDSKPSTPSDAEAGPSGSQQLQIPAQPASSLGADTMSAGGGGPLGDNNQGADGVGNASGDWHCDSTWMGDRVVTKSTRTWVLPSYNNHQYREIKSGSVDGSNANAYFGYSTPWGYFDFNRFHSHWSPRDWQRLINNYWGFRPRSLRVKIFNIQVKEVTVQDSTTTIANNLTSTVQVFTDDDYQLPYVVGNGTEGCLPAFPPQVFTLPQYGYATLNRDNTENPTERSSFFCLEYFPSKMLRTGNNFEFTYNFEEVPFHSSFAPSQNLFKLANPLVDQYLYRFVSTNNTGGVQFNKNLAGRYANTYKNWFPGPMGRTQGWNLGSGVNRASVSAFATTNRMELEGASYQVPPQPNGMTNNLQGSNTYALENTMIFNSQPANPGTTATYLEGNMLITSESETQPVNRVAYNVGGQMATNNQSSTTAPATGTYNLQEIVPGSVWMERDVYLQGPIWAKIPETGAHFHPSPAMGGFGLKHPPPMMLIKNTPVPGNITSFSDVPVSSFITQYSTGQVTVEMEWELKKENSKRWNPEIQYTNNYNDPQFVDFAPDSTGEYRTTRPIGTRYLTRPL

SEQ ID NO: 847 - protein, 724 aa, Artificial Sequence
  Description of Artificial Sequence: Synthetic polypeptide
MSFVDHPPDWLEEVGEGLREFLGLEAGPPKPKPNQQHQDQARGLVLPGYNYLGPGNGLDRGEPVNRADEVAREHDISYNEQLEAGDNPYLKYNHADAEFQEKLADDTSFGGNLGKAVFQAKKRVLEPFGLVEEGAKTAPTGKRIDDHFPKRKKARTEEDSKPSTSSDAEAGPSGSQQLQIPAQPASSLGADTMSAGGGGPLGDNNQGADGVGNASGDWHCDSTWMGDRVVTKSTRTWVLPSYNNHQYREIKSGSVDGSNANAYFGYSTPWGYFDFNRFHSHWSPRDWQRLINNYWGFRPRSLRVKIFNIQVKEVTVQDSTTTIANNLTSTVQVFTDDDYQLPYVVGNGTEGCLPAFPPQVFTLPQYGYATLNRDNTENPTERSSFFCLEYFPSKMLRTGNNFEFTYNFEEVPFHSSFAPSQNLFKLANPLVDQYLYRFVSTNNTGGVQFNKNLAGRYANTHKNWFPGPMGRTQGWNLGSGVNRASVSAFATTNRMELEGASYQVPPQSNGMTNNLRGSNTYALENTMIFNSQPANPGTTATYLEGNMLITSESETQPVNRVAYNVGGQMATNNQSSTTAPATGTYNLQEIVPGSVWMERDVYLQGPIWAKIPETGAHFHPSPAMGGFGLKHPPPMMLIKNTPVPGNITSFSDVPVSSFITQYSTGQVTVEMEWELKKENSKRWNPEIQYTNNYNDPQFVDFAPDSTGEYRTTRPIGTRYLTRPL

SEQ ID NO: 848 - protein, 724 aa, Artificial Sequence
  Description of Artificial Sequence: Synthetic polypeptide
MSFVDHPPDWLEEVGEGLREFLGLEAGPPKPKPNQQHQDQARGLVLPGYNYLGPGNGLDRGEPVNRADEVAREHDISYNEQLEAGDNPYLKYNHADAEFQEKLADDTSFGGNLGKAVFQAKKRVLEPFGLVEEGAKTAPTGKRIDDHFPKRKKARTEEDSKPSTSSDAEAGPSGSQQLQIPAQPASSLGADTMSAGGGGPLGDNNQGADGVGNASGDWHCDSTWMGDRVVTKSTRTWVLPSYNNHQYREIKSGSVDGSNANAYFGYSTPWGYFDFNRFHSHWSPRDWQRLINNYWGFRPRSLRVKIFNIQVKEVTVQDSTTTIANNLTSTVQVFTDDDYQLPYVVGNGTEGCLPAFPPQVFTLPQYGYATLNRDNTENPTERSSFFCLEYFPSKMLRTGNNFEFTYNFEEVPFHSSFAPSQNLFKLANPLVDQYLYRFVSTNNTGGVQFNKNLAGRYANTYKNWFPGPMGRTQGWNLGSGVNRASVSAFATTNRMELEGASYQVPPQPNGMTNNLQGSNTYALENTMIFNSQPANPGTTATYLEGNMLITSESETQPVNRVAYSVGGQMATNNQSSTTAPTTGTYNLQEIVPGSVWMERDVYLQGPIWAKIPETGAHFHPSPAMGGFRLKHPPPMMLIKNTPVPGNITSFSDVPVSSFITQYSTGQVTVEMEWELKKENSKRWNPEIQYTNNYNDPQFVDFAPDSTGEYRTTRPIGTRYLTRPL

SEQ ID NO: 849 - protein, 724 aa, Artificial Sequence
  Description of Artificial Sequence: Synthetic polypeptide
MSFVDHPPDWLEEVGEGLREFLGLEAGPPKPKPNQQHQDQARGLVLPGYNYLGPGNGLDRGEPVNRADEVAREHDISYNEQLEAGDNPYLKYNHADAEFQEKLADDTSFGGNLGKAVFQAKKRVLEPFGLVEEGAKTAPTGKRIDDHFPKRKKARTEEDSKPSTSSDAEAGPSGSQQLQIPAQPASSLGADTMSAGGGGPLGDNNQGADGVGNASGDWHCDSTWMGDRVVTKSTRTWVLPSYNNHQYREIKSGSVDGSNANAYFGYSTPWGYFDFNRFHSHWSPRDWQRLINNYWGFRPRSLRVKIFNIQVKEVTVQDSTTTIANNLTSTVQVFTDDDYQLPYVVGNGTEGCLPAFPPQVFTLPQYGYATLNRDNTENPTERSSFFCLEYFPSKMLRTGNNFEFTYNFEEVPFHSSFAPSQNLFKLANPLVDQYLYRFVSTNNTGGVQFNKNLAGRYANTYKNWFPGPMGRTQGWNLGSGVNRASVSAFAATNRMELEGASYQVPPQPNGMTNNLQGSNTYALENTMIFNSQPANPGTTATYLEGNMLITSESETQPVNRVAYNVGGQMATNNQSSTTAPATGTYNLQEIVPGGVWMERDVYLQGPIWAKIPETGAHFHPSPAMGGFGLKHPPPMMLIKNTPVPGNTTSFSDVPVSSFITQYSTGQVTVEMEWELKKENSKRWNPEIQYTNNYNDPQFVDFAPDSTGEYRTTRPIGTRYLTRPL

SEQ ID NO: 850 - protein, 724 aa, Artificial Sequence
  Description of Artificial Sequence: Synthetic polypeptide
MSFVDHPPDWLEEVGEGLREFLGLEAGPPKPKPNQQHQDQARGLVLPGYNYLGPGNGLDRGEPVNRADEVAREHDISYNEQLEAGDNPYLKYNHADAEFQEKLADDTSFGGNLGKVVFQAKKRVLEPFGLVEEGAKTAPTGKRIDDHFPKRKKARTEEDSKPSTSSDAEAGPSGSQQLQIPAQPASSLGADTMSAGGGGPLGGNNQGADGVGNASGDWHCDSTWMGDRVVTKSTRTWVLPSYNNHQYREIKSGSVDGSNANAYFGYSTPWGYFDFNRFHSHWGPRDWQRLINNYWGFRPRSLRVKIFNIQVKEVTVQDSTTTIANNLTSTVQVFTDDDYQLPYVVGNGTEGCLPAFPPQVFTLPQYGYATLNRDNTENPTERSSFFCLEYFPSKMLRTGNNFEFTYNFEEVPFHSSFAPSQNLFKLANPLVDQYLYRFVSTNNTGGVQFNKNLAGRYANTYKNWFPGPMGRTQGWNLGSGVNRASVSALATTNRMELEGASYQVPPQPNGMTNNLQGSNTYALENTMIFNSQPANPGTTATYLEGNMLITSESETQPVNRVAYNVGGQMATNNQSSTTAPATGTYNLQEIVPGSVWMERDVYLQGPIWAKIPETGAHFHPSPAMGGFGLKHPPPMMLIKNTPVPGNITSFSDVPVSSFITQYSTGQVTVEMEWELKKENSKRWNPEIQYTNNYNDPQFVDFAPDSTGEYRTTRPIGTRYLTRPL

SEQ ID NO: 851 - protein, 723 aa, Artificial Sequence
  Description of Artificial Sequence: Synthetic polypeptide
MSFVDHPPDWLEEVGEGLREFLGLEAGPPKPKPNQQHQDQARGLVLPGYNYLGPGNGLDRGEPVNRADEVAREHDISYNEQLEAGDNPYLKYNHADAEFQEKLADDTSFGGNLGKAVFQAKKRVLEPFGLVEEGAKTAPTGKRIDDHFPKRKKARTEEDSKPSTSSDAEAGPSGSQQLQIPAQPASSLGADTMSAGGGGPLGDNNQGADGVGNASGDWHCDSTWMGDRVVTKSTRTWVLPSYNNHQYREIKSGSVDGSNANAYFGYSTPWGYFDFNRFHSHWSPRDWQRLINNYWGFRPRSLRVKIFNIQVKEVTVQDSTTTIANNLTSTVQVFTDDDYQLPYVVGNGTEGCLPAFPPQVFTLPQYGYATLNRDNTENPTERSSFFCLEYFPSKMLRTGNNFEFTYNFEEVPFHSSFAPSQNLFKLANPLVDQYLYRFVSTNNTGGVQFNKNLAGRYANTYKNWFPGPMGRTQGWNLGSGVNRASVSAFATTNRMELEGASYQVPPQPNGMTNNLQGSNTYALENTMIFNSQPANPGTTATYLEGNMLITSESETQPVNRVAYNVGGQMATNNQSSTTAPATGTYNLQEIVPGSVWMERDVYLQGPIAKIPETGAHFHPSPAMGGFGLKHPPPMMLIKNTPVPGNITSFSDVPVSSFITQYSTGQVTVEMEWELKKENSKRWNPEIQYTNNYNDPQFVDFAPDSTGECRTTRPIGTRYLTRPL

SEQ ID NO: 852 - protein, 724 aa, Artificial Sequence
  Description of Artificial Sequence: Synthetic polypeptide
MSFVDHPPDWLEEVGEGLREFLGLEAGPPKPKPNQQHQDQARGLVLPGYNYLGPGNGLDRGEPVNRADEVAREHDISYNEQLEAGDNPYLKYNHADAEFQEKLADDTSFGGNLGKAVFQAKKRVLEPFGLVEEGAKTAPTGKRIDDHFPKRKKARTEEDSKPSTSSDAEAGPSGSQQLQIPAQPASSLGADTMSAGGGGPLGDNNQGADGVGNASGDWHCDSTWMGDRVVTKSTRTWVLPSYNNHQYREIKSGSVDGSNANAYFGYSTPWGYFDFNRFHSHWSPRDWQRLINNYWGFRPRSLRVKILNIQVKEVTVQDSTTTIANNLTSTVQVFTDDDYQLPYVVGNGTEGCLPAFPPQVFTLPQYGYATLNRDNTENPTERSSFFCLEYFPSKMLRTGNNFEFTYNFEEVPFHSSFAPSQNLFKLANPLVGQYLYRFVSTNNTGGVQFNENLAGRYANTYKNWFPGPMGRTQGWNLGSGVNRASVSAFATTNRMELEGASYQVPPQPNGMTNNLQGSNTYALENTMIFNSQPANPGTTATYLEGNMLITSESETQPVNRVAYNVGGQMATNNQSSTTAPATGTYNLQEIVPGSVWMERDVYLQGPIWAKIPETGAHFHPSPAMGGFGLKHPPPMMLIKNTPVPGNITSFSDVPVSSFITQYSTGQATVEMEWELKKENSKRWNPEIQYTNNYNDPQFVDFAPDSTGEYRTTRPIGTRYLTRPL

SEQ ID NO: 853 - protein, 724 aa, Artificial Sequence
  Description of Artificial Sequence: Synthetic polypeptide
MSFVDHPPDWLEEVGEGLREFLGLEAGPPKPKPNQQHQDQARGLVLPGYNYLGPGNGLDRGEPVNRADEVAREHDISYNEQLEAGDNPYLKYNHADAEFQEKLADDTSFGGNLGKAVFQAKKRVLEPFGLVEEGAKTAPTGKRIDDHFPKRKKARTEEDSKPSTSSDAEAGPSGSQQLQIPAQPASSLGADTMSAGGGGPLGDNNQGADGVGNASGDWHCDSTWMGDRVVTKSTRTWVLPSYNNHQYREIKSGSVDGSNANAYFGYSTPWGYFDFNRFHSHWSPRDWQRLINNYWGFRPRSLRVKIFNIQVKEVTVQDSTTIIANNLTSTVQVFTDDDYQLPYVVGNGTEGCLPAFPPQVFTLPQYGYATLNRDNTENPTERSSFFCLEYFPSKMLRTGNNFEFTYNFEEVPFHSSFAPSQNLFKLANPLVDQYLYRFVSTNNTGGVQFNKNLAGRYANTYKNWFPGPMGRTQGWNLGSGVNRASVSAFATTNRMELEGASYQVPPQPNGMTNNLQGSNTYALENTMIFNSQPANPGTTATYLEGNMLITSESETQPVNRVAYNVGGQMATNNQSSTTAPATGTYNLQEIVPGSVWMERDVYLQGPIWAKIPETGAHFHPSPAMGGFGLKHPPPMMLIKNTPVPGNITSFSDVPVSSFITQYSTGQVTVEMEWELKKENSKRWNPEIQYTNNYNDPQFVDFAPDSTGEYRTTRPIGTRYLTRPL

SEQ ID NO: 854 - protein, 724 aa, Artificial Sequence
  Description of Artificial Sequence: Synthetic polypeptide
MSFVDHPPDWLEEVGEGLREFLGLEAGPPKPKPNQQHQDQARGLVLPGYNYLGPGNGLDRGEPVNRADEVAREHDISYNEQLEAGDNPYLKYNHADAEFQEKLADDTSFGGNLGKAVFQAKKRVLEPFGLVEEGAKTAPTGKRIDDHFPKRKKARTEEDSKPSTSSDAEAGPSGSQQLQIPAQPASSLGADTMSAGGGGPLGDNNQGADGVGNASGDWHCDSTWMGDRVVTKSTRTWVLPSYNNHQYREIKSGSVDGSNANAYFGYSTPWGYFDFNRFHSHWSPRDWQRLINNYWGFRPRSLRVKIFNIQVKEVTVQDSTTTIANNLTSTVQVFTDDDYQLPYVVGNGTEGCLPAFPPQVFTLPQYGYATLNRDNTENPTERSSFFCLEYFPSKMLRTGNNFEFTYNFEEVPFHSSFAPSQNLFKLANPLVDQYLYRFVSTNNTGGVQFNKNLAGRYANTYKNWFPGPMGRTQGWNLGSGVNRASVSAFATTNRMELEGASYQVPPQPNGMTNNLQGSNTYALENTMIFNSQPANPGTTATYLEGNMLITSESETQPVNRVAYNVGGQMATNNQSSTTAPATGTYNLQEIVPGSVWMERDVYLQGPIWAKIPETGAHFHPSPAMGGFGLKHPPPMMLIKNTPVPGNITSLSDVPVSSFITQYSTGQVTVEMEWELKKENSKRWNPEIQYTNNYNDPQFVDFAPDSTGEYRTTRPIGTRYLTRPL

SEQ ID NO: 855 - protein, 724 aa, Artificial Sequence
  Description of Artificial Sequence: Synthetic polypeptide
MSFVDHPPDWLEEVGEGLREFLGLEAGPPKPKPNQQHQDQARGLVLPGYNYLGPGNGLDRGEPANRADEVAREHDISYNEQLEAGDNPYLKYNHAGAEFQEKLADDTSFGGNLGKAVFQAKKRVLEPFGLVEEGAKTAPTGKRIDDHFPKRKKARTEEDSKPSTSSDAEAGPSGSQQLQIPAQPASSLGADTMSAGGGGPLGDNNQGADGVGNASGDWHCDSTWMGDRVVTKSTRTWVLPGYNNHQYREIKSGSVDGSNANAYFGYSTPWGYFDFNRFHSHWSPRDWQRLINNYWGFRPRSLRVKIFNIQVKEVTVQDSTTTIANNLTSTVQVFTDDDYQLPYVVGNGTEGCLPAFPPQVFTLPQYGYATLNRDNTENPTERSSFFCLEYFPSKMLRTGNNFEFTYNFEEVPFHSSFAPSQNLFKLANPLVDQYLYRFVSTNNTGGVQFNKNLAGRYANTYKNWFPGPMGRTQGWNLGSGVNRASVSAFATTNRMELEGASYQVPPQPNGMTNNLQGSNTYALENTMIFNSQPANPGTTATYLEGNMLITSESETQPVNRVAYNVGGQMATNNQSSTTAPATGTYNLQEIVPGSVWMERDVYLQGPIWAKIPETGAHFHPSPAMGGFGLKHPPPMMLIKNTPVPGNITSFSDVPVSSFITQYSTGQVTVEMEWELKKENSKRWNPEIQYTNNYNDPQFVDFAPDSTGEYRTTRPIGTRYLTRPL

SEQ ID NO: 856 - protein, 724 aa, Artificial Sequence
  Description of Artificial Sequence: Synthetic polypeptide
MSFVDHPPDWLEEVGEGLREFLGLEAGPPKPKPNQQHQDQARGLVLPGYNYLGPGNGLDRGEPVNRADEVAREHDISYNEQLEAGDNPYLKYNHADAEFQEKLADDTSFGGNLGKAVFQAKKRVLEPFGLVEEGAKTAPTGKRIDDHFPKRKKARTEEDSKPPTSSDAEAGPSGSQQLQIPAQPASSLGADTMSAGGGGPLGDNNQGADGVGNASGDWHCDSTWMGDRVVTKSTRTWVLPSYNNHQYREIKSGSVDGSNANAYFGYSTPWGYFDFNRFHSHWSPRDWQRLINNYWGFRPRSLRVKIFNIQVKEVTVQDSATTIANNLTSTVQVFTDDDYQLPYVVGNGTEGCLPAFPPQVFTLPQYGYATLNRDNTENPTERSSFFCLEYFPSKMLRTGNNFEFTYNFEEVPFHSSFAPSQNLFKLANPLVDQYLYRFVSTNNTGGVQFNKNLAGRYANTYKNWFPGPMGRTQGWNLGSGVNRASVSAFATTNRMELEGASYQVPPQPNGMTNNLQGSNTYALENTMIFNSQPANPGTTATYLEGNMLITSESETQPVNRVAYNVGGQMATNNQSSTTAPATGTYNLQEIVPGSVWMERDVYLQGPIWAKIPETGAHFHPSPAMGGFGLKHPPPMMLIKNTPVPGNITSFSDVPVSSFITQYSTGQVTVEMEWELKKENSKRWNPEIQYTNNYNDPQFVDFAPDSTGEYRTTRPIGTRYLTRPL

SEQ ID NO: 857 - protein, 724 aa, Artificial Sequence
  Description of Artificial Sequence: Synthetic polypeptide
MSFVDHPPDWLEEVGEGLREFLGLEAGPPKPKPNQQHQDQARGLVLPGYNYLGPGNGLDRGEPVNRADEVAREHDISYNEQLEAGDNPYLKYNHADAEFQEKLADDTSFGGNLGKAVFQAKKRVLEPFGLVEEGAKTAPTGKRIDDHFPKRKKARTEEDSKPSTSSDAEAGPSGSQQPQIPAQPASSLGADTMSAGGGGPLGDNNQGADGVGNASGDWHCDSTWMGDRVVTKSTRTWVLPSYNNHQYREIKSGSVDGSNANAYFGYSTPWGYFDFNRFHSHWSPRDWQRLINNYWGFRPRSLRVKIFNIQVKEVTVQDSTTTIANNLTSTVQVFTDDDYQLPYVVGNGTEGCLPAFPPQVFTLPQYGYATLNRDNTENPTERSSFFCLEYFPSKMLRTGNNFEFTYNFEEVPFHSSFAPSQNLFKLANPLVDQYLYRFVSTNNTGGVQFNKNLAGRYANTYKNWFPGPMGRTQGWNLGSGVNRASVSAFATTNRMELEGASYQVPPQPNGMTNNLQGSNTYALENTMIFNSQPANPGTTATYLEGNMLITSESETQPVNRVAYNVGGQMATNNQSSTTAPATGTYNLQEIVPGSVWMERDVYLQGPIWAKIPETGAHFHPSPAMGGFGLKHPPPMMLIKNTPAPGNITSFSDVPVSSFITQYSTGQVTVEMEWELKKENSKRWNPEIQYTNNYNDPQFVDFAPDSTGEYRTTRPIGTRYLTRPL

SEQ ID NO: 858 - protein, 724 aa, Artificial Sequence
  Description of Artificial Sequence: Synthetic polypeptide
MSFVDHPPDWLEEVGEGLREFLGLEAGPPKPKPNQQHQDQARGLVLPGYNYLGPGNGLDRGEPVNRADEVAREHDISYNEQLEAGDNPYLKYNHADAEFQEKLADDTSFGGNLGKAVFQAKKRVLEPFGLVEEGAKTAPTGKRIDDHFPKRKKARTEEDSKPPTSSDAEAGPSGSQQLQIPAQPASSLGADTMSAGGGGPLGDNNQGADGVGNASGDWHCDSTWMGDRVVTKSTRTWVLPSYNNHQYREIKSGSVDGSNANAYFGYSTPWGYFDFNRFHSHWSPRDWQRLINNYWGFRPRSLRVKIFNIQVKEVTVQDSTTTIANNLTSTVQVFTDDDYQLPYVVGNGTEGCLPAFPPQVFTLPQYGYATLNRDNTENPTERSSFFCLEYFPSKMLRTGNNFEFTYNFEEVPFHSSFAPSQNLFKLANPLVDQYLYRFVSTNNTGGVQFNKNLAGRYANTYKNWFPGPMGRTQGWNLGSGVNRASVSAFATTNRMELEGASYQVPPQPNGMTNNLQGSNTYALENTMIFNSQPANPGTTATYLEGNMLITSESETQPVNRVAYNVGGQMATNNQSSTTAPATGTYNLQEIVPGSVWMERDVYLQGPIWAKIPETGAHFHPSPAMGGFGLKHPPPMMLIKNTPVPGNITSFSDVPVSSFITQYSTGQVTVEMEWELKKENSKRWNPEIQYTNNYNDPQFVDFAPDSTGEYRTTRPIGTRYLTRPL

SEQ ID NO: 859 - protein, 724 aa, Artificial Sequence
  Description of Artificial Sequence: Synthetic polypeptide
MSFVDHPPDWLEEVGEGLREFLGLEAGPPKPKPNQQHQDQARGLVLPGYNYLGPGNGLDRGEPVNRADEVAREHDISYNEQLEAGDNPYLKYNHADAEFQEKLADDTSFGGNLGKAVFQAKKRVLEPFGLVEEGAKTAPTGKRIDDHFPKRKKARTEEDSKPPTSSDAEAGPSGSQQLQIPAQPASSLGADTMSAGGGGPLGDNNQGADGVGNASGDWHCDSTWMGDRVVTKSTRTWVPPSYNNHQYREIKSGSVDGSNANAYFGYSTPWGYFDFNRFHSHWSPRDWQRLINNYWGFRPRSLRVKIFNIQVKEVTVQDSTTTIANNLTSTVQVFTDDDYQLPYVVGNGTEGCLPAFPPQVFTLPQYGYATLNRDNTENPTERSSFFCLEYFPSKMLRTGNNFEFTYNFEEVPFHSSFAPSQNLFKLANPLVDQYLYRFVSTNNTGGVQFNKNLAGRYANTYKNWFPGPMGRTQGWNLGSGVNRASVSAFATTNRMELEGASYQVPPQPNGMTNNLQGSNTYALENTMIFNSQPANPGTTATYLEGNMLITSESETQPVNRVAYNVGGQMATNNQSSTTAPATGTYNLQEIVPGSVWMERDVYLQGPIWAKIPETGAHFHPSPAMGGFGLKHPPPMMLIKNTPVPGNITSFSDVPVSSFITQYSTGQVAVEMEWELKKENSKRWNPEIQYTNNYNDPQFVDFAPDSTGEYRTTRPIGTRYLTRPL

SEQ ID NO: 860 - protein, 724 aa, Artificial Sequence
  Description of Artificial Sequence: Synthetic polypeptide
MSFVDHPPDWLEEVGEGLREFLGLEAGPPKPKPNQQHQDQARGLVLPGYNYLGPGNGLDRGEPVNRADEVAREHDISYNEQLEAGDNPYLKYNHADAEFQEKLADDTSFGGNLGKAVFQAKKRVLEPFGLVEEGAKTAPTGKRIDDHFPKRKKARTEEDSKPSTSSDAEAGPSGSQQLQIPAQPASSLGADTMSAGGGGPLGDNNQGADGVGNASGDWHCDSTWMGDRVVTKSTRTWVLPSYNNHQYREIKSGSVDGSNANAYFGYSTPWGYFDFNRFHSHWSPRDWQRLINNYWGFRPRSLRVKIFNIQVKEVTVQDSTTTIANNLTSTVQVFTDDDYQLPYVVGNGTEGCLPAFPPQVFTLPQYGYATLNRDNTENPTERSSFFCLEYFPSKMLRTGNNFEFTYNFEEVPFHSSFAPSQNLFKLANPLVDQYLYRFVSTNNTGGVQFNKNLAGRYANTYKNWFPGPMGRTQGWNLGSGVNRASVSAFATTNRMELEGASYQVPPQPNGMTNNLQGSNTYALENTMIFNSQPANPGTTATYLEGNMLITSESETQPVNRVAYNVGGQMATNNQSSTTAPATGTYNLQEIVPGSVWMERDVYLQGPIWAKIPETGAHFHPSPAMGGFGLKHPPPMMLIKNTPAPGNITSFSDVPVSSFITQYSTGQVTVEMEWELKKENSKRWNPEIQYTNNYNDPQFVDFAPDSTGEYRTTRPIGTRYLTRPL

SEQ ID NO: 861 - protein, 724 aa, Artificial Sequence
  Description of Artificial Sequence: Synthetic polypeptide
MSFVDHPPDWLEEVGEGLREFLGLEAGPPKPKPNQQHQDQARGLVLPGYNYLGPGNGLDRGEPVNRADEVAREHDISYNEQLEAGDNPYLKYNHADAEFQEKLADDTSFGGNLGKAVFQAKKRVLEPFGLAEEGAKTAPTGKRIDDHFPKRKKARTEEDSKPSTSSDAEAGPSGSQQLQIPAQPASSLGADTMSAGGGGPLGDNNQGADGVGNASGDWHCDSTWMGDRVVTKSTRTWVLPSYNNHQYREIKSGSVDGSNANAYFGYSTPWGYFDFNRFHSHWSPRDWQRLINNYWGFRPRSLRAKIFNIQVKEVTVQDSTTTIANNLTSTVQVFTDDDYQLPYVVGNGTEGCLPAFPPQVFTLPQYGYATLNRDNTENPTERSSFFCLEYFPSKMLRTGNNLEFTYNFEEVPFHSSFAPSQNLFKLANPLVDQYLYRFVSTNNTGGVQFNKNLAGRYANTYKNWFPGPMGRTQGWNLGSGVNRASVSAFATTNRMELEGASYQVPPQPNGMTNNLQGSNTYALENTMIFNSQPANPGTTATYLEGNMLITSESETQPVNRVVHNVGGQMATNNQSSTTAPATGTYNLQEIVPGSVWMERDVYLQGPIWAKIPETGAHFHPSPAMGGFGLKHPPPMMLIKNTPVPGNITSFSDVPVSSFITQYSTGQVTVEMEWELKKENSKRWNPEIQYTNNYNDPQFVDFAPDSTGEYRTTRPIGTRYLTRPL

SEQ ID NO: 862 - protein, 724 aa, Artificial Sequence
  Description of Artificial Sequence: Synthetic polypeptide
MSFVDHPPDWLEEVGEGLREFLGLEAGPPKPKPNQQHQDQARGLVLPGYNYLGPGNGLDRGEPVNRADEVAREHDISYNEQLEAGDNPYLKYNHADAEFQEKLADDTSFGGNLGKAVFQAKKRVLEPFGLVEEGAKTAPTGKRIDDHFPKRKKARTEEDSKPSTSSDAEAGPSGSQQLQIPAQPASSLGADTMSAGGGGPLGDNNQGADGVGNASGDWHCDSTWMGDRVVTKSTRTWVLPSYNNHQYREIKSGSVDGGNANAYFGYSTPWGYFDFNRFHSHWSPRDWQRLINNYWGFRPRSLRVKIFNIQVKEVTVQDSTTTIANNLTSTVQVFTDDDYQLPYVVGNGTEGCLPAFPPQVFTLPQYGYATLNRDNTENPTERSSFFCLEYFPSKMLRTGNNFEFTYNFEEVPFHSSFAPSQNLFKLANPLVDQYLYRFVSTNNTGGVQFNKNLAGRYANTYKNWFPGPMGRTQGWNLGSGVNRASVSAFATTNRMELEGASYQVPPQPNGMTNNLQGSNTYALENTMIFNSQPANPGTTATYLEGNMLITSESETQPVNRVAYNVGGQMATNNQSSTTAPATGTYNLQEIVPGSVWMERDVYLQGPIWAKIPETGAHFHPSPAMGGFGLKHPPPMMLIKNTPAPGNITSFSDVPVSSFITQYSTGQVTVEMEWELKKGNSKRWNPEIQYTNNYNDPQFVDFAPDSTGEYRTTRPIGTRYLTRPL

SEQ ID NO: 863 - protein, 724 aa, Artificial Sequence
  Description of Artificial Sequence: Synthetic polypeptide
MSFVDHPPDWLEEVGEGLREFLGLEAGPPKPKPNQQHQDQARGLVLPGYNYLGPGNGLDRGEPVNRADEVAREHDISYNEQLEAGDNPYLKYNHADAEFQEKLADDTSFGGNLGKAVFQAKKRVLEPFGLVEEGAKTAPTGKRIDDHFPKRKKARTEEDSKPSTSSDAEAGPSGSQQLQIPAQPASSLGADTMSAGGGGPLGDNNQGADGVGNASGDWHCDSTWMGDRVVTKSTRTWVLPSYNNHQYREIKSGSVDGSNANAYFGYSTPWGYFDFNRFHSHWSPRDWQRLINNYWGFRPRSLRVKIFNIQVKEVTVQDSTTTIANNLTSTVQVFTDDDYQLPYVVGNGTEGCLPAFPPQVFTLPQYGYATLNRDNTENPTERSSFFCLEYFPSKMLRTGNNFEFTYNFEEVPFHSSFAPSQNLFKLANPLVDQYLYRFVSTNNTGGVQFNKNLAGRYANTYKNWFPGPMGRTQGWNLGSGVNRASVSAFATTNRMELEGASYQVPPQPNGMTNNLQGSNTYALENTMIFNSQPANPGTTATYLEGNMLITSESETQPVNRVAYNVGGQMATNNQSSTTAPATGTYNLQEIVPGSVWMERDVYLQGPIWAKIPETGVHFHPSPAMGGFGLKHPPPMMLIKNTPVPGNITSFSDVPVSSFITQYSTGQVTVEMEWELKKENSKRWNPEIQYTNNYNDPQFVDFAPDSTGEYRTTRPIGTRYLTRPL

SEQ ID NO: 864 - protein, 724 aa, Artificial Sequence
  Description of Artificial Sequence: Synthetic polypeptide
  MOD_RES (551)..(551): Xaa = any amino acid
MSFVDHPPDWLEEVGEGLREFLGLEAGPPKPKPNQQHQDQARGLVLPGYNYLGPGNGLDRGEPVNRADEVAREHDISYNEQLEAGDNPYLKYNHADAEFQEKLADDTSFGGNLGKAVFQAKKRVLEPFGLVEEGAKTAPTGKRIDDHFPKRKKARTEEDSKPSTSSDAEAGPSGSQQLQIPAQPASSLGADTMSAGGGGPLGDNNQGADGVGNASGDWHCDSTWMGDRVVTKSTRTWVLPSYNNHQYREIKSGSVDGSNANAYFGYSTPWGYFDFNRFHSHWSPRDWQRLINNYWGFRPRSLRVKIFNIQVKEVTVQDSTTTIANNLTSTVQVFTDDDYQLPYVVGNGTEGCLPAFPPQVFTLPQYGYATLNRDNTENPTERSSFFCLEYFPSKMLRTGNNFEFTYNFEEVPFHSSFAPSQNLFKLANPLVDQYLYRFVSTNNTGGVQFNKNLAGRYANTYKNWFPGPMGRTQGWNLGSGVNRASVSAFATTNRMELEGASYQVPPQPNGMTNNLQGSNTYALENTMIFNSQPANPGTTATYLEGSMLITXESETQPVNRVAYNVGGQMATNNQSSTTAPATGTYNLQEIVPGSVWMERDVYLQGPIWAKIPETGAHFHPSPAMGGFGLKHPPPMMLIKNTPVPGNITSFSDVPVSSFITQYSTGQVTVEMEWELKKENSKRWNPEIQYTNNYNDPQFVDFAPDSTGEYRTTRPIGTRYLTRPL

SEQ ID NO: 865 - protein, 736 aa, Artificial Sequence; identical to SEQ ID NO: 39
  Description of Artificial Sequence: Synthetic polypeptide

SEQ ID NO: 866 - protein, 734 aa, Artificial Sequence; identical to SEQ ID NO: 57
  Description of Artificial Sequence: Synthetic polypeptide

SEQ ID NO: 867 - protein, 723 aa, Artificial Sequence
  Description of Artificial Sequence: Synthetic polypeptide
MSFVDHPPDWLEEVGEGLREFLGLEAGPPKPKPNQQHQDQARGLVLPGYNYLGPGNGLDRGEPVNRADEVAREHDISYNEQLEAGDNPYLKYNHADAEFQEKLADDTSFGGNLGKAVFQAKKRVLEPFGLVEEGAKTAPTGKRIDDHFPKRKKARTEEDSKPSTSSDAEAGPSGSQQLQIPAQPASSLGADTMSAGGGPLGDNNQGADGVGNASGDWHCDSTWMGDRVVTKSTRTWVLPSYNNHQYREIKSGSVDGSNANAYFGYSTPWGYFDFNRFHSHWSPRDWQRLINNYWGFRPRSLRVKIFNIQVKEVTVQDSTTTIANNLTSTVQVFTDDDYQLPYVVGNGTEGCLPAFPPQVFTLPQYGYATLNRDNTENPTERSSFFCLEYFPSKMLRTGNNFEFTYNFEEVPFHSSFAPSQNLFKLANPLVDQYLYRFVSTNNTGGVQFNKNLAGRYANTYKNWFPGPMGRTQGWNLGSGVNRASVSAFATTNRMELEGASYQVPPQPNGMTNNLQGSNTYALENTMIFNSQPANPGTTATYLEGNMLITSESETQPVNRVAYNVGGQMATNNQSSTTAPATGTYNLQEIVPGSVWMERDVYLQGPIWAKIPETGAHFHPSPAMGGFGLKHPPPMMLIKNTPVPGNITSFSDVPVSSFITQYSTGQVTVEMEWELKKENSKRWNPEIQYTNNYNDPQFVDFAPDSTGEYRTTRPIGTRYLTRPL

SEQ ID NO: 868 - protein, 743 aa, Artificial Sequence
  Description of Artificial Sequence: Synthetic polypeptide
MAADGYLPDWLEDNLSEGIREWWALKPGAPQPKANQQHQDNARGLVLPGYKYLGPGNGLDKGEPVNAADAAALEHDKAYDQQLKAGDNPYLKYNHADAEFQERLKEDTSFGGNLGRAVFQAKKRLLEPLGLVEEAAKTAPGKKRPVEQSPQEPDSSAGIGKSGAQPAKKRLNFGQTGDTESVPDPQPIGEPPAAPSGVGSLTMASGGGAPVADNNEGADGVGSSSGNWHCDSQWLGDRVITTSTRTWALPTYNNHLYKQISNSTSGGSSNDNAYFGYSTPWGYFDFNRFHCHFSPRDWQRLINNNWGFRPKRLNFKLFNIQVKEVTDNNGVKTIANNLTSTVQVFTDSDYQLPYVLGSAHEGCLPPFPADVFMIPQYGYLTLNDGSQAVGRSSFYCLEYFPSQMLRTGNNFQFSYEFENVPFHSSYAHSQSLDRLMNPLIDQYLYYLSRTINGSGQNQQTLKFSVAGPSNMAVQGRNYIPGPSYRQQRVSTTVTQNNNSEFAWPGASSWALNGRNSLMNPGPAMASHKEGEDRFFPLSGSLIFGKQGTGRDNVDADKVMITNEEEIKTTNPVATESYGQVATNHQSAQTLAVPFKAQAQTGWVQNQGILPGMVWQDRDVYLQGPIWAKIPHTDGNFHPSPLMGGFGMKHPPPQILIKNTPVPADPPTAFNKDKLNSFITQYSTGQVSVEIEWELQKENSKRWNPEIQYTSNYYKSNNVEFAVNTEGVYSEPRPIGTRYLTRNL

SEQ ID NO: 869 - DNA, 2232 bp, Artificial Sequence
  Description of Artificial Sequence: Synthetic polynucleotide
atggctgccgatggttatcttccagattggctcgaggacaaccttagtgaaggaattcgcgagtggtgggctttgaaacctggagcccctcaacccaaggcaaatcaacaacatcaagacaacgctcgaggtcttgtgcttccgggttacaaataccttggacccggcaacggactcgacaagggggagccggtcaacgcagcagacgcggcggccctcgagcacgacaaggcctacgaccagcagctcaaggccggagacaacccgtacctcaagtacaaccacgccgacgccgagttccaggagcggctcaaagaagatacgtcttttgggggcaacctcgggcgagcagtcttccaggccaaaaagaggcttcttgaacctcttggtctggttgaggaagcggctaagacggctcctggaaagaagaggcctgtagagcagtctcctcaggaaccggactcctccgcgggtattggcaaatcgggtgcacagcccgctaaaaagagactcaatttcggtcagactggcgacacagagtcagtcccagaccctcaaccaatcggagaacctcccgcagccccctcaggtgtgggatctcttacaatggcttcaggtggtggcgcaccagtggcagacaataacgaaggtgccgatggagtgggtagttcctcgggaaattggcattgcgattcccaatggctgggggacagagtcatcaccaccagcacccgaacctgggccctgcccacctacaacaatcacctctacaagcaaatctccaacagcacatctggaggatcttcaaatgacaacgcctacttcggctacagcaccccctgggggtattttgacttcaacagattccactgccacttctcaccacgtgactggcagcgactcatcaacaacaactggggattccggcctaagcgactcaacttcaagctcttcaacattcaggtcaaagaggttacggacaacaatggagtcaagaccatcgccaataaccttaccagcacggtccaggtcttcacggactcagactatcagctcccgtacgtgctcgggtcggctcacgagggctgcctcccgccgttcccagcggacgttttcatgattcctcagtacgggtatctgacgcttaatgatggaagccaggccgtgggtcgttcgtccttttactgcctggaatatttcccgtcgcaaatgctaagaacgggtaacaacttccagttcagctacgagtttgagaacgtacctttccatagcagctacgctcacagccaaagcctggaccgactaatgaatccactcatcgaccaatacttgtactatctctctagaactattaacggttctggacagaatcaacaaacgctaaaattcagtgtggccggacccagcaacatggctgtccagggaagaaactacatacctggacccagctaccgacaacaacgtgtctcaaccactgtgactcaaaacaacaacagcgaatttgcttggcctggagcttcttcttgggctctcaatggacgtaatagcttgatgaatcctggacctgctatggccagccacaaagaaggagaggaccgtttctttcctttgtctggatctttaatttttggcaaacaaggtaccggcagagacaacgtggatgcggacaaagtcatgataaccaacgaagaagaaattaaaactactaacccggtagcaacggagtcctatggacaagtggccacaaaccaccagagtgcccaaactttggcggtgccttttaaggcacaggcgcagaccggttgggttcaaaaccaaggaatacttccgggtatggtttggcaggacagagatgtgtacctgcaaggacccatttgggccaaaattcctcacacggacggcaactttcacccttctccgctgatgggagggtttggaatgaagcacccgcctcctcagatcctcatcaaaaacacacctgtacctgcggatcctccaacggccttcaacaaggacaagctgaactctttcatcacccagtattctactggccaagtcagcgtggagatcgagtgggagctgcagaaggaaaacagcaagcgctggaacccggagatccagtacacttccaactattacaagtctaataatgttgaatttgctgttaatactgaaggtgtatatagtgaaccccgccccattggcaccagatacctgactcgtaatctgtaa

SEQ ID NO: 870 - protein, 736 aa, Artificial Sequence
  Description of Artificial Sequence: Synthetic polypeptide
MAADGYLPDWLEDNLSEGIREWWALKPGAPQPKANQQHQDNARGLVLPGYKYLGPGNGLDKGEPVNAADAAALEHDKAYDQQLKAGDNPYLKYNHADAEFQERLKEDTSFGGNLGRAVFQAKKRLLEPLGLVEEAAKTAPGKKRPVEQSPQEPDSSAGIGKSGAQPAKKRLNFGQTGDTESVPDPQPIGEPPAAPSGVGSLTMASGGGAPVADNNEGADGVGSSSGNWHCDSQWLGDRVITTSTRTWALPTYNNHLYKQISNSTSGGSSNDNAYFGYSTPWGYFDFNRFHCHFSPRDWQRLINNNWGFRPKRLNFKLFNIQVKEVTDNNGVKTIANNLTSTVQVFTDSDYQLPYVLGSAHEGCLPPFPADVFMIPQYGYLTLNDGSQAVGRSSFYCLEYFPSQMLRTGNNFQFSYEFENVPFHSSYAHSQSLDRLMNPLIDQYLYYLSRTIQSSQTPRQTLKFSVAGPSNMAVQGRNYIPGPSYRQQRVSTTVTQNNNSEFAWPGASSWALNGRNSLMNPGPAMASHKEGEDRFFPLSGSLIFGKQGTGRDNVDADKVMITNEEEIKTTNPVATESYGQVATNHQSAQAQAQTGWVQNQGILPGMVWQDRDVYLQGPIWAKIPHTDGNFHPSPLMGGFGMKHPPPQILIKNTPVPADPPTAFNKDKLNSFITQYSTGQVSVEIEWELQKENSKRWNPEIQYTSNYYKSNNVEFAVNTEGVYSEPRPIGTRYLTRNL

SEQ ID NO: 871 - protein, 743 aa, Artificial Sequence
  Description of Artificial Sequence: Synthetic polypeptide
MAADGYLPDWLEDNLSEGIREWWALKPGAPQPKANQQHQDNARGLVLPGYKYLGPGNGLDKGEPVNAADAAALEHDKAYDQQLKAGDNPYLKYNHADAEFQERLKEDTSFGGNLGRAVFQAKKRLLEPLGLVEEAAKTAPGKKRPVEQSPQEPDSSAGIGKSGAQPAKKRLNFGQTGDTESVPDPQPIGEPPAAPSGVGSLTMASGGGAPVADNNEGADGVGSSSGNWHCDSQWLGDRVITTSTRTWALPTYNNHLYKQISNSTSGGSSNDNAYFGYSTPWGYFDFNRFHCHFSPRDWQRLINNNWGFRPKRLNFKLFNIQVKEVTDNNGVKTIANNLTSTVQVFTDSDYQLPYVLGSAHEGCLPPFPADVFMIPQYGYLTLNDGSQAVGRSSFYCLEYFPSQMLRTGNNFQFSYEFENVPFHSSYAHSQSLDRLMNPLIDQYLYYLSRTIILGTGTSQTLKFSVAGPSNMAVQGRNYIPGPSYRQQRVSTTVTQNNNSEFAWPGASSWALNGRNSLMNPGPAMASHKEGEDRFFPLSGSLIFGKQGTGRDNVDADKVMITNEEEIKTTNPVATESYGQVATNHQSAQTRTNPEAAQAQTGWVQNQGILPGMVWQDRDVYLQGPIWAKIPHTDGNFHPSPLMGGFGMKHPPPQILIKNTPVPADPPTAFNKDKLNSFITQYSTGQVSVEIEWELQKENSKRWNPEIQYTSNYYKSNNVEFAVNTEGVYSEPRPIGTRYLTRNL

SEQ ID NO: 872 - protein, 743 aa, Artificial Sequence
  Description of Artificial Sequence: Synthetic polypeptide
MAADGYLPDWLEDNLSEGIREWWALKPGAPQPKANQQHQDNARGLVLPGYKYLGPGNGLDKGEPVNAADAAALEHDKAYDQQLKAGDNPYLKYNHADAEFQERLKEDTSFGGNLGRAVFQAKKRLLEPLGLVEEAAKTAPGKKRPVEQSPQEPDSSAGIGKSGAQPAKKRLNFGQTGDTESVPDPQPIGEPPAAPSGVGSLTMASGGGAPVADNNEGADGVGSSSGNWHCDSQWLGDRVITTSTRTWALPTYNNHLYKQISNSTSGGSSNDNAYFGYSTPWGYFDFNRFHCHFSPRDWQRLINNNWGFRPKRLNFKLFNIQVKEVTDNNGVKTIANNLTSTVQVFTDSDYQLPYVLGSAHEGCLPPFPADVFMIPQYGYLTLNDGSQAVGRSSFYCLEYFPSQMLRTGNNFQFSYEFENVPFHSSYAHSQSLDRLMNPLIDQYLYYLSRTIILGTGTSQTLKFSVAGPSNMAVQGRNYIPGPSYRQQRVSTTVTQNNNSEFAWPGASSWALNGRNSLMNPGPAMASHKEGEDRFFPLSGSLIFGKQGTGRDNVDADKVMITNEEEIKTTNPVATESYGQVATNHQSAQNGGTSSSAQAQTGWVQNQGILPGMVWQDRDVYLQGPIWAKIPHTDGNFHPSPLMGGFGMKHPPPQILIKNTPVPADPPTAFNKDKLNSFITQYSTGQVSVEIEWELQKENSKRWNPEIQYTSNYYKSNNVEFAVNTEGVYSEPRPIGTRYLTRNL

SEQ ID NO: 873 - protein, 7 aa, Artificial Sequence
  Description of Artificial Sequence: Synthetic polypeptide
TLAVPFK

SEQ ID NO: 874 - protein, 7 aa, Artificial Sequence
  Description of Artificial Sequence: Synthetic polypeptide
KFPVALT

SEQ ID NO: 875 - protein, 6 aa, Artificial Sequence
  Description of Artificial Sequence: Synthetic polypeptide
LAVPFK

SEQ ID NO: 876 - protein, 5 aa, Artificial Sequence
  Description of Artificial Sequence: Synthetic polypeptide
AVPFK

SEQ ID NO: 877 - protein, 4 aa, Artificial Sequence
  Description of Artificial Sequence: Synthetic polypeptide
VPFK

SEQ ID NO: 878 - protein, 6 aa, Artificial Sequence
  Description of Artificial Sequence: Synthetic polypeptide
TLAVPF

SEQ ID NO: 879 - protein, 5 aa, Artificial Sequence
  Description of Artificial Sequence: Synthetic polypeptide
TLAVP

SEQ ID NO: 880 - protein, 4 aa, Artificial Sequence
  Description of Artificial Sequence: Synthetic polypeptide
TLAV

SEQ ID NO: 881 - protein, 7 aa, Artificial Sequence
  Description of Artificial Sequence: Synthetic polypeptide
SVSKPFL

SEQ ID NO: 882 - protein, 7 aa, Artificial Sequence
  Description of Artificial Sequence: Synthetic polypeptide
FTLTTPK

SEQ ID NO: 883 - protein, 7 aa, Artificial Sequence
  Description of Artificial Sequence: Synthetic polypeptide
MNATKNV

SEQ ID NO: 884 - protein, 7 aa, Artificial Sequence
  Description of Artificial Sequence: Synthetic polypeptide
QSSQTPR

SEQ ID NO: 885 - protein, 7 aa, Artificial Sequence
  Description of Artificial Sequence: Synthetic polypeptide
ILGTGTS

SEQ ID NO: 886 - protein, 7 aa, Artificial Sequence
  Description of Artificial Sequence: Synthetic polypeptide
TRTNPEA

SEQ ID NO: 887 - protein, 7 aa, Artificial Sequence
  Description of Artificial Sequence: Synthetic polypeptide
NGGTSSS

SEQ ID NO: 888 - protein, 7 aa, Artificial Sequence
  Description of Artificial Sequence: Synthetic polypeptide
YTLSQGW

SEQ ID NO: 889 - DNA, 21 bp, Artificial Sequence
  Description of Artificial Sequence: Synthetic polynucleotide
aagtttcctgtggcgttgact

SEQ ID NO: 890 - DNA, 21 bp, Artificial Sequence
  Description of Artificial Sequence: Synthetic polynucleotide
actttggcggtgccttttaag

SEQ ID NO: 891 - DNA, 21 bp, Artificial Sequence
  Description of Artificial Sequence: Synthetic polynucleotide
agtgtgagtaagccttttttg

SEQ ID NO: 892 - DNA, 21 bp, Artificial Sequence
  Description of Artificial Sequence: Synthetic polynucleotide
tttacgttgacgacgcctaag

SEQ ID NO: 893 - DNA, 21 bp, Artificial Sequence
  Description of Artificial Sequence: Synthetic polynucleotide
atgaatgctacgaagaatgtg

SEQ ID NO: 894 - DNA, 21 bp, Artificial Sequence
  Description of Artificial Sequence: Synthetic polynucleotide
cagtcgtcgcagacgcctagg

SEQ ID NO: 895 - DNA, 21 bp, Artificial Sequence
  Description of Artificial Sequence: Synthetic polynucleotide
attctggggactggtacttcg

SEQ ID NO: 896 - DNA, 21 bp, Artificial Sequence
  Description of Artificial Sequence: Synthetic polynucleotide
acgcggactaatcctgaggct

SEQ ID NO: 897 - DNA, 21 bp, Artificial Sequence
  Description of Artificial Sequence: Synthetic polynucleotide
aatggggggactagtagttct

SEQ ID NO: 898 - DNA, 21 bp, Artificial Sequence
  Description of Artificial Sequence: Synthetic polynucleotide
tatactttgtcgcagggttgg

SEQ ID NO: 899 - protein, 9 aa, Artificial Sequence
  Description of Artificial Sequence: Synthetic polypeptide
SADNNNSEY

SEQ ID NO: 900 - protein, 9 aa, Artificial Sequence
  Description of Artificial Sequence: Synthetic polypeptide
LIDQYLYYL

SEQ ID NO: 901 - protein, 9 aa, Artificial Sequence
  Description of Artificial Sequence: Synthetic polypeptide
VPQYGYLTL

SEQ ID NO: 902 - protein, 9 aa, Artificial Sequence
  Description of Artificial Sequence: Synthetic polypeptide
TTSTRTWAL

SEQ ID NO: 903 - protein, 9 aa, Artificial Sequence
  Description of Artificial Sequence: Synthetic polypeptide
YHLNGRDSL

SEQ ID NO: 904 - protein, 9 aa, Artificial Sequence
  Description of Artificial Sequence: Synthetic polypeptide
SQAVGRSSF

SEQ ID NO: 905 - protein, 9 aa, Artificial Sequence
  Description of Artificial Sequence: Synthetic polypeptide
VPANPSTTF

SEQ ID NO: 906 - protein, 9 aa, Artificial Sequence
  Description of Artificial Sequence: Synthetic polypeptide
FPQSGVLIF

SEQ ID NO: 907 - protein, 15 aa, Artificial Sequence
  Description of Artificial Sequence: Synthetic polypeptide
YFDFNRFHCHFSPRD

SEQ ID NO: 908 - protein, 15 aa, Artificial Sequence
  Description of Artificial Sequence: Synthetic polypeptide
VGNSSGNWHCDSTWM

SEQ ID NO: 909 - protein, 15 aa, Artificial Sequence
  Description of Artificial Sequence: Synthetic polypeptide
QFSQAGASDIRDQSR

SEQ ID NO: 910 - protein, 13 aa, Artificial Sequence
  Description of Artificial Sequence: Synthetic polypeptide
GASDIRQSRNWLP

SEQ ID NO: 911 - protein, 15 aa, Artificial Sequence
  Description of Artificial Sequence: Synthetic polypeptide
GNRQAATADVNTQGV

SEQ ID NO: 912 - protein, 9 aa, Artificial Sequence
  Description of Artificial Sequence: Synthetic polypeptide
LDRLMNPLI

SEQ ID NO: 913 - protein, 9 aa, Artificial Sequence
  Description of Artificial Sequence: Synthetic polypeptide
QPAKKRLNF

SEQ ID NO: 914 - protein, 7 aa, Artificial Sequence
  Description of Artificial Sequence: Synthetic polypeptide
QAVRTSL

SEQ ID NO: 915 - protein, 7 aa, Artificial Sequence
  Description of Artificial Sequence: Synthetic polypeptide
LAKERLS

SEQ ID NO: 916 - RNA, 21 nt, Artificial Sequence
  Description of Artificial Sequence: Synthetic oligonucleotide
uuaacgucaguucauaaacuu

SEQ ID NO: 917 - RNA, 21 nt, Artificial Sequence
  Description of Artificial Sequence: Synthetic oligonucleotide
  misc_feature (20)..(21): nn= is a deoxythymidine dinucleotide
uuaacgucaguucauaaacnn

SEQ ID NO: 918 - RNA, 21 nt, Artificial Sequence
  Description of Artificial Sequence: Synthetic oligonucleotide
ugucgguaccgucuaacacuu

SEQ ID NO: 919 - RNA, 21 nt, Artificial Sequence
  Description of Artificial Sequence: Synthetic oligonucleotide
  misc_feature (20)..(21): nn= is a deoxythymidine dinucleotide
ugucgguaccgucuaacacnn

SEQ ID NO: 920 - RNA, 21 nt, Artificial Sequence
  Description of Artificial Sequence: Synthetic oligonucleotide
uaagcauggagcuagcagguu

SEQ ID NO: 921 - RNA, 21 nt, Artificial Sequence
  Description of Artificial Sequence: Synthetic oligonucleotide
  misc_feature (20)..(21): nn= is a deoxythymidine dinucleotide
uaagcauggagcuagcaggnn

SEQ ID NO: 922 - RNA, 21 nt, Artificial Sequence
  Description of Artificial Sequence: Synthetic oligonucleotide
uacaacgagacugaauugcuu

SEQ ID NO: 923 - RNA, 21 nt, Artificial Sequence
  Description of Artificial Sequence: Synthetic oligonucleotide
  misc_feature (20)..(21): nn= is a deoxythymidine dinucleotide
uacaacgagacugaauugcnn

SEQ ID NO: 924 - RNA, 21 nt, Artificial Sequence
  Description of Artificial Sequence: Synthetic oligonucleotide
uucaguucauaaaccuggauu

SEQ ID NO: 925 - RNA, 21 nt, Artificial Sequence
  Description of Artificial Sequence: Synthetic oligonucleotide
  misc_feature (20)..(21): nn= is a deoxythymidine dinucleotide
uucaguucauaaaccuggann

SEQ ID NO: 926 - RNA, 21 nt, Artificial Sequence
  Description of Artificial Sequence: Synthetic oligonucleotide
uaacgucaguucauaaaccuu

SEQ ID NO: 927 - RNA, 21 nt, Artificial Sequence
  Description of Artificial Sequence: Synthetic oligonucleotide
  misc_feature (20)..(21): nn= is a deoxythymidine dinucleotide
uaacgucaguucauaaaccnn

SEQ ID NO: 928 - RNA, 21 nt, Artificial Sequence
  Description of Artificial Sequence: Synthetic oligonucleotide
uccggucacaacauugugguu

SEQ ID NO: 929 - RNA, 21 nt, Artificial Sequence
  Description of Artificial Sequence: Synthetic oligonucleotide
  misc_feature (20)..(21): nn= is a deoxythymidine dinucleotide
uccggucacaacauuguggnn

SEQ ID NO: 930 - RNA, 21 nt, Artificial Sequence
  Description of Artificial Sequence: Synthetic oligonucleotide
uugcacgguucuuugugacuu

SEQ ID NO: 931 - RNA, 21 nt, Artificial Sequence
  Description of Artificial Sequence: Synthetic oligonucleotide
  misc_feature (20)..(21): nn= is a deoxythymidine dinucleotide
uugcacgguucuuugugacnn

SEQ ID NO: 932 - RNA, 21 nt, Artificial Sequence
  Description of Artificial Sequence: Synthetic oligonucleotide
uuuuauaacaagagguucauu

SEQ ID NO: 933 - RNA, 21 nt, Artificial Sequence
  Description of Artificial Sequence: Synthetic oligonucleotide
  misc_feature (20)..(21): nn= is a deoxythymidine dinucleotide
uuuuauaacaagagguucann

SEQ ID NO: 934 - RNA, 21 nt, Artificial Sequence
  Description of Artificial Sequence: Synthetic oligonucleotide
uccaaauacugguugucgguu

SEQ ID NO: 935 - RNA, 21 nt, Artificial Sequence
  Description of Artificial Sequence: Synthetic oligonucleotide
  misc_feature (20)..(21): nn= is a deoxythymidine dinucleotide
uccaaauacugguugucggnn

SEQ ID NO: 936 - RNA, 21 nt, Artificial Sequence
  Description of Artificial Sequence: Synthetic oligonucleotide
uauuuuaggaauuccaauguu

SEQ ID NO: 937 - RNA, 21 nt, Artificial Sequence
  Description of Artificial Sequence: Synthetic oligonucleotide
  misc_feature (20)..(21): nn= is a deoxythymidine dinucleotide
uauuuuaggaauuccaaugnn

SEQ ID NO: 938 - RNA, 21 nt, Artificial Sequence
  Description of Artificial Sequence: Synthetic oligonucleotide
uuuaggaauuccaaugaucuu

SEQ ID NO: 939 - RNA, 21 nt, Artificial Sequence
  Description of Artificial Sequence: Synthetic oligonucleotide
  misc_feature (20)..(21): nn= is a deoxythymidine dinucleotide
uuuaggaauuccaaugaucnn

SEQ ID NO: 940 - RNA, 21 nt, Artificial Sequence
  Description of Artificial Sequence: Synthetic oligonucleotide
  misc_feature (20)..(21): nn= is a deoxythymidine dinucleotide
uuaaucucuuuacugauaunn

SEQ ID NO: 941 - RNA, 21 nt, Artificial Sequence
  Description of Artificial Sequence: Synthetic oligonucleotide
  misc_feature (20)..(21): nn= is a deoxythymidine dinucleotide
gauuuuaggaauuccaaugnn

SEQ ID NO: 942 - RNA, 22 nt, Artificial Sequence
  Description of Artificial Sequence: Synthetic oligonucleotide
uaagcauggagcuagcaggcuu

SEQ ID NO: 943 - RNA, 21 nt, Artificial Sequence
  Description of Artificial Sequence: Synthetic oligonucleotide
uaagcauggagcuagcagggu

SEQ ID NO: 944 - RNA, 22 nt, Artificial Sequence
  Description of Artificial Sequence: Synthetic oligonucleotide
aaggacuugagggacucgaagu

SEQ ID NO: 945 - RNA, 21 nt, Artificial Sequence
  Description of Artificial Sequence: Synthetic oligonucleotide
aaggacuugagggacucgaag

SEQ ID NO: 946 - RNA, 19 nt, Artificial Sequence
  Description of Artificial Sequence: Synthetic oligonucleotide
aaggacuugagggacucga

SEQ ID NO: 947 - RNA, 21 nt, Artificial Sequence
  Description of Artificial Sequence: Synthetic oligonucleotide
aggacuugagggacucgaagu

SEQ ID NO: 948 - RNA, 22 nt, Artificial Sequence
  Description of Artificial Sequence: Synthetic oligonucleotide
gaggacuugagggacucgaagu

SEQ ID NO: 949 - RNA, 22 nt, Artificial Sequence
  Description of Artificial Sequence: Synthetic oligonucleotide
aaggacuugagggacucgaagu

SEQ ID NO: 950 - RNA, 23 nt, Artificial Sequence
  Description of Artificial Sequence: Synthetic oligonucleotide
aaggacuugagggacucgaaguu

SEQ ID NO: 951 - RNA, 21 nt, Artificial Sequence
  Description of Artificial Sequence: Synthetic oligonucleotide
aaggacuugagggacucgaag

SEQ ID NO: 952 - RNA, 19 nt, Artificial Sequence
  Description of Artificial Sequence: Synthetic oligonucleotide
aaggacuugagggacucga

SEQ ID NO: 953 - RNA, 22 nt, Artificial Sequence
  Description of Artificial Sequence: Synthetic oligonucleotide
aaggacuugagggacucgaagg

SEQ ID NO: 954 - RNA, 21 nt, Artificial Sequence
  Description of Artificial Sequence: Synthetic oligonucleotide
aaggacuugagggacucgaau

SEQ ID NO: 955 - RNA, 22 nt, Artificial Sequence
  Description of Artificial Sequence: Synthetic oligonucleotide
aaggacuugagggacucgaaga

SEQ ID NO: 956 - RNA, 22 nt, Artificial Sequence
  Description of Artificial Sequence: Synthetic oligonucleotide
aaggacuugagggacucgaagg

SEQ ID NO: 957 - RNA, 23 nt, Artificial Sequence
  Description of Artificial Sequence: Synthetic oligonucleotide
aaggacuugagggacucgaaggu

SEQ ID NO: 958 - RNA, 23 nt, Artificial Sequence
  Description of Artificial Sequence: Synthetic oligonucleotide
aaggacuugagggacucgaagga

SEQ ID NO: 959 - RNA, 21 nt, Artificial Sequence
  Description of Artificial Sequence: Synthetic oligonucleotide
aaggacuugagggacucgaag

SEQ ID NO: 960 - RNA, 22 nt, Artificial Sequence
  Description of Artificial Sequence: Synthetic oligonucleotide
aaggacuugagggacucgaagu

SEQ ID NO: 961 - RNA, 19 nt, Artificial Sequence
  Description of Artificial Sequence: Synthetic oligonucleotide
aaggacuugagggacucga

SEQ ID NO: 962 - RNA, 23 nt, Artificial Sequence
  Description of Artificial Sequence: Synthetic oligonucleotide
aaggacuugagggacucgaagga

SEQ ID NO: 963 - RNA, 22 nt, Artificial Sequence
  Description of Artificial Sequence: Synthetic oligonucleotide
aaggacuugagggacucgaagg

SEQ ID NO: 964 - RNA, 24 nt, Artificial Sequence
  Description of Artificial Sequence: Synthetic oligonucleotide
aaggacuugagggacucgaaggau

SEQ ID NO: 965 - RNA, 25 nt, Artificial Sequence
  Description of Artificial Sequence: Synthetic oligonucleotide
aaggacuugagggacucgaaggauu

SEQ ID NO: 966 - RNA, 21 nt, Artificial Sequence
  Description of Artificial Sequence: Synthetic oligonucleotide
aaggacuugagggacucgaag

SEQ ID NO: 967 - RNA, 24 nt, Artificial Sequence
  Description of Artificial Sequence: Synthetic oligonucleotide
aaggacuugagggacucgaaggaa

SEQ ID NO: 968 - RNA, 23 nt, Artificial Sequence
  Description of Artificial Sequence: Synthetic oligonucleotide
gaugaagugcacacauuggauga

SEQ ID NO: 969 - RNA, 22 nt, Artificial Sequence
  Description of Artificial Sequence: Synthetic oligonucleotide
gaugaacugcacacauuggaug

SEQ ID NO: 970 - RNA, 23 nt, Artificial Sequence
  Description of Artificial Sequence: Synthetic oligonucleotide
gaugaauugcacacaguagauga

SEQ ID NO: 971 - RNA, 24 nt, Artificial Sequence
  Description of Artificial Sequence: Synthetic oligonucleotide
aaggacuugagggacucgaagguu

SEQ ID NO: 972 - RNA, 25 nt, Artificial Sequence
  Description of Artificial Sequence: Synthetic oligonucleotide
aaggacuugagggacucgaagguuu

SEQ ID NO: 973 - RNA, 23 nt, Artificial Sequence
  Description of Artificial Sequence: Synthetic oligonucleotide
aaggacuugagggacucgaaggu

SEQ ID NO: 974 - RNA, 26 nt, Artificial Sequence
  Description of Artificial Sequence: Synthetic oligonucleotide
aaggacuugagggacucgaagguuuu

SEQ ID NO: 975 - RNA, 27 nt, Artificial Sequence
  Description of Artificial Sequence: Synthetic oligonucleotide
aaggacuugagggacucgaagguuuuu

SEQ ID NO: 976 - RNA, 22 nt, Artificial Sequence
  Description of Artificial Sequence: Synthetic oligonucleotide
aaggacuugagggacucgaagg

SEQ ID NO: 977 - RNA, 22 nt, Artificial Sequence
  Description of Artificial Sequence: Synthetic oligonucleotide
uaaggacuugagggacucgaag

SEQ ID NO: 978 - RNA, 21 nt, Artificial Sequence
  Description of Artificial Sequence: Synthetic oligonucleotide
aaggacuugagggacucgaag

SEQ ID NO: 979 - RNA, 22 nt, Artificial Sequence
  Description of Artificial Sequence: Synthetic oligonucleotide
aaggacuugagggacucgaagu

SEQ ID NO: 980 - RNA, 30 nt, Artificial Sequence
  Description of Artificial Sequence: Synthetic oligonucleotide
aaggacuugagggacucgaagacgaguccc

SEQ ID NO: 981 - RNA, 31 nt, Artificial Sequence
  Description of Artificial Sequence: Synthetic oligonucleotide
aaggacuugagggacucgaagacgaguccca

SEQ ID NO: 982 - RNA, 31 nt, Artificial Sequence
  Description of Artificial Sequence: Synthetic oligonucleotide
aaggacuugagggacucgaagacgagucccu

SEQ ID NO: 983 - RNA, 23 nt, Artificial Sequence
  Description of Artificial Sequence: Synthetic oligonucleotide
gaugaagugcacacauuggauac

SEQ ID NO: 984 - RNA, 24 nt, Artificial Sequence
  Description of Artificial Sequence: Synthetic oligonucleotide
gaugaagugcacacauuggauaca

SEQ ID NO: 985 - RNA, 30 nt, Artificial Sequence
  Description of Artificial Sequence: Synthetic oligonucleotide
gaugaagugcacacauuggauacaaugugu

SEQ ID NO: 986 - RNA, 21 nt, Artificial Sequence
  Description of Artificial Sequence: Synthetic oligonucleotide
gaugaagugcacacauuggau

SEQ ID NO: 987 - RNA, 22 nt, Artificial Sequence
  Description of Artificial Sequence: Synthetic oligonucleotide
gaugaagugcacacauuggaua

SEQ ID NO: 988 - RNA, 23 nt, Artificial Sequence
  Description of Artificial Sequence: Synthetic oligonucleotide
gaugaauugcacacaguagauau

SEQ ID NO: 989 - RNA, 25 nt, Artificial Sequence
  Description of Artificial Sequence: Synthetic oligonucleotide
gaugaauugcacacaguagauauac

SEQ ID NO: 990 - RNA, 30 nt, Artificial Sequence
  Description of Artificial Sequence: Synthetic oligonucleotide
gaugaauugcacacaguagauauacugugu

SEQ ID NO: 991 - RNA, 24 nt, Artificial Sequence
  Description of Artificial Sequence: Synthetic oligonucleotide
gaugaauugcacacaguagauaua

SEQ ID NO: 992 - RNA, 24 nt, Artificial Sequence
  Description of Artificial Sequence: Synthetic oligonucleotide
augaauugcacacaguagauauac

SEQ ID NO: 993 - RNA, 22 nt, Artificial Sequence
  Description of Artificial Sequence: Synthetic oligonucleotide
gaugaauugcacacaguagaua

SEQ ID NO: 994 - RNA, 30 nt, Artificial Sequence; identical to SEQ ID NO: 990
  Description of Artificial Sequence: Synthetic oligonucleotide

SEQ ID NO: 995 - RNA, 20 nt, Artificial Sequence
  Description of Artificial Sequence: Synthetic oligonucleotide
uacaacgagacugaauugcu

SEQ ID NO: 996 - RNA, 20 nt, Artificial Sequence
  Description of Artificial Sequence: Synthetic oligonucleotide
acaacgagacugaauugcuu

SEQ ID NO: 997 - RNA, 22 nt, Artificial Sequence
  Description of Artificial Sequence: Synthetic oligonucleotide
uccggucacaacauugugguuc

SEQ ID NO: 998 - RNA, 20 nt, Artificial Sequence
  Description of Artificial Sequence: Synthetic oligonucleotide
uccggucacaacauuguggu

SEQ ID NO: 999 - RNA, 18 nt, Artificial Sequence
  Description of Artificial Sequence: Synthetic oligonucleotide
uccggucacaacauugug

SEQ ID NO: 1000 - RNA, 20 nt, Artificial Sequence
  Description of Artificial Sequence: Synthetic oligonucleotide
ccggucacaacauugugguu

SEQ ID NO: 1001 - RNA, 20 nt, Artificial Sequence
  Description of Artificial Sequence: Synthetic oligonucleotide
uuuuauaacaagagguucau

SEQ ID NO: 1002 - RNA, 20 nt, Artificial Sequence
  Description of Artificial Sequence: Synthetic oligonucleotide
uuuauaacaagagguucauu

SEQ ID NO: 1003 - RNA, 20 nt, Artificial Sequence
  Description of Artificial Sequence: Synthetic oligonucleotide
uaagcauggagcuagcaggu

SEQ ID NO: 1004 - RNA, 20 nt, Artificial Sequence
  Description of Artificial Sequence: Synthetic oligonucleotide
aagcauggagcuagcagguu

SEQ ID NO: 1005 - RNA, 20 nt, Artificial Sequence
  Description of Artificial Sequence: Synthetic oligonucleotide
ccaaauacugguugucgguu

SEQ ID NO: 1006 - RNA, 22 nt, Artificial Sequence
  Description of Artificial Sequence: Synthetic oligonucleotide
uacaacgagacugaauugcuuu

SEQ ID NO: 1007 - RNA, 22 nt, Artificial Sequence
  Description of Artificial Sequence: Synthetic oligonucleotide
uaacgucaguucauaaaccuuu

SEQ ID NO: 1008 - RNA, 22 nt, Artificial Sequence
  Description of Artificial Sequence: Synthetic oligonucleotide
guccggucacaacauugugguu

SEQ ID NO: 1009 - RNA, 23 nt, Artificial Sequence
  Description of Artificial Sequence: Synthetic oligonucleotide
uccggucacaacauugugguuug

SEQ ID NO: 1010 - RNA, 22 nt, Artificial Sequence
  Description of Artificial Sequence: Synthetic oligonucleotide
uccggucacaacauugugguuu

SEQ ID NO: 1011 - RNA, 19 nt, Artificial Sequence
  Description of Artificial Sequence: Synthetic oligonucleotide
uccggucacaacauugugg

SEQ ID NO: 1012 - RNA, 22 nt, Artificial Sequence
  Description of Artificial Sequence: Synthetic oligonucleotide
uaagcauggagcuagcagguuu

SEQ ID NO: 1013 - RNA, 21 nt, Artificial Sequence
  Description of Artificial Sequence: Synthetic oligonucleotide
aagcauggagcuagcagguuu

SEQ ID NO: 1014 - RNA, 22 nt, Artificial Sequence
  Description of Artificial Sequence: Synthetic oligonucleotide
uccaaauacugguugucgguuu

SEQ ID NO: 1015 - RNA, 21 nt, Artificial Sequence
  Description of Artificial Sequence: Synthetic oligonucleotide
ccaaauacugguugucgguuu

SEQ ID NO: 1016 - RNA, 21 nt, Artificial Sequence
  Description of Artificial Sequence: Synthetic oligonucleotide
guuuaugaacugaucuuaccc

SEQ ID NO: 1017 - RNA, 21 nt, Artificial Sequence
  Description of Artificial Sequence: Synthetic oligonucleotide
guguuagacgguacugauccc

SEQ ID NO: 1018 - RNA, 21 nt, Artificial Sequence
  Description of Artificial Sequence: Synthetic oligonucleotide
ccugcuagcuccaugcuuccc

SEQ ID NO: 1019 - RNA, 21 nt, Artificial Sequence
  Description of Artificial Sequence: Synthetic oligonucleotide
guuuaugaacugaucuuagcc

SEQ ID NO: 1020 - RNA, 21 nt, Artificial Sequence
  Description of Artificial Sequence: Synthetic oligonucleotide
guguuagacgguacugaugcc

SEQ ID NO: 1021 - RNA, 21 nt, Artificial Sequence
  Description of Artificial Sequence: Synthetic oligonucleotide
ccugcuagcuccaugcuugcc

SEQ ID NO: 1022 - RNA, 21 nt, Artificial Sequence
  Description of Artificial Sequence: Synthetic oligonucleotide
guuuaugaagugaucuuaacc

SEQ ID NO: 1023 - RNA, 21 nt, Artificial Sequence
  Description of Artificial Sequence: Synthetic oligonucleotide
guguuagaccguacugauacc

SEQ ID NO: 1024 - RNA, 21 nt, Artificial Sequence
  Description of Artificial Sequence: Synthetic oligonucleotide
ccugcuagcaccaugcuuacc

SEQ ID NO: 1025 - RNA, 21 nt, Artificial Sequence
  Description of Artificial Sequence: Synthetic oligonucleotide
guuuaugaacugaucuuaacc

SEQ ID NO: 1026 - RNA, 21 nt, Artificial Sequence
  Description of Artificial Sequence: Synthetic oligonucleotide
guguuagacgguacugauacc

SEQ ID NO: 1027 - RNA, 21 nt, Artificial Sequence
  Description of Artificial Sequence: Synthetic oligonucleotide
ccugcuagcuccaugcuuacc

SEQ ID NO: 1028 - RNA, 21 nt, Artificial Sequence
  Description of Artificial Sequence: Synthetic oligonucleotide
  misc_feature (20)..(21): nn= is a deoxythymidine dinucleotide
ccugcuagcuccaugcuuann

SEQ ID NO: 1029 - RNA, 21 nt, Artificial Sequence
  Description of Artificial Sequence: Synthetic oligonucleotide
guuuaugaacugaucuugccc

SEQ ID NO: 1030 - RNA, 21 nt, Artificial Sequence
  Description of Artificial Sequence: Synthetic oligonucleotide
guuuaugaacugaucuuggcc

SEQ ID NO: 1031 - RNA, 21 nt, Artificial Sequence
  Description of Artificial Sequence: Synthetic oligonucleotide
guuuaugaacugaucuugacc

SEQ ID NO: 1032 - RNA, 21 nt, Artificial Sequence
  Description of Artificial Sequence: Synthetic oligonucleotide
gcaauucagucucguuguccc

SEQ ID NO: 1033 - RNA, 21 nt, Artificial Sequence
  Description of Artificial Sequence: Synthetic oligonucleotide
uccagguuuaugaacugaccc

SEQ ID NO: 1034 - RNA, 21 nt, Artificial Sequence
  Description of Artificial Sequence: Synthetic oligonucleotide
gguuuaugaacugacguuccc

SEQ ID NO: 1035 - RNA, 21 nt, Artificial Sequence
  Description of Artificial Sequence: Synthetic oligonucleotide
ccacaauguugugacuggccc

SEQ ID NO: 1036 - RNA, 21 nt, Artificial Sequence
  Description of Artificial Sequence: Synthetic oligonucleotide
gucacaaagaaccguguaccc

SEQ ID NO: 1037 - RNA, 21 nt, Artificial Sequence
  Description of Artificial Sequence: Synthetic oligonucleotide
ugaaccucuuguuauaaaccc

SEQ ID NO: 1038 - RNA, 21 nt, Artificial Sequence
  Description of Artificial Sequence: Synthetic oligonucleotide
ccgacaaccaguauuuggccc

SEQ ID NO: 1039 - RNA, 21 nt, Artificial Sequence
  Description of Artificial Sequence: Synthetic oligonucleotide
gcaauucagucucguugugcc

SEQ ID NO: 1040 - RNA, 21 nt, Artificial Sequence
  Description of Artificial Sequence: Synthetic oligonucleotide
uccagguuuaugaacugagcc

SEQ ID NO: 1041 - RNA, 21 nt, Artificial Sequence
  Description of Artificial Sequence: Synthetic oligonucleotide
gguuuaugaacugacguugcc

SEQ ID NO: 1042 - RNA, 21 nt, Artificial Sequence
  Description of Artificial Sequence: Synthetic oligonucleotide
ccacaauguugugacugggcc

SEQ ID NO: 1043 - RNA, 21 nt, Artificial Sequence
  Description of Artificial Sequence: Synthetic oligonucleotide
gucacaaagaaccguguagcc

SEQ ID NO: 1044 - RNA, 21 nt, Artificial Sequence
  Description of Artificial Sequence: Synthetic oligonucleotide
ugaaccucuuguuauaaagcc

SEQ ID NO: 1045 - RNA, 21 nt, Artificial Sequence
  Description of Artificial Sequence: Synthetic oligonucleotide
ccgacaaccaguauuugggcc

SEQ ID NO: 1046 - RNA, 21 nt, Artificial Sequence
  Description of Artificial Sequence: Synthetic oligonucleotide
gcaauucagucucguuguacc

SEQ ID NO: 1047 - RNA, 21 nt, Artificial Sequence
  Description of Artificial Sequence: Synthetic oligonucleotide
  misc_feature (20)..(21): nn= is a deoxythymidine dinucleotide
gcaauucagucucguuguann

SEQ ID NO: 1048 - RNA, 21 nt, Artificial Sequence
  Description of Artificial Sequence: Synthetic oligonucleotide
uccagguuuaugaacugaacc

SEQ ID NO: 1049 - RNA, 21 nt, Artificial Sequence
  Description of Artificial Sequence: Synthetic oligonucleotide
  misc_feature (20)..(21): nn= is a deoxythymidine dinucleotide
uccagguuuaugaacugaann

SEQ ID NO: 1050 - RNA, 21 nt, Artificial Sequence
  Description of Artificial Sequence: Synthetic oligonucleotide
gguuuaugaacugacguuacc

SEQ ID NO: 1051 - RNA, 21 nt, Artificial Sequence
  Description of Artificial Sequence: Synthetic oligonucleotide
ccacaauguugugacuggacc

SEQ ID NO: 1052 - RNA, 21 nt, Artificial Sequence
  Description of Artificial Sequence: Synthetic oligonucleotide
gucacaaagaaccguguaacc

SEQ ID NO: 1053 - RNA, 21 nt, Artificial Sequence
  Description of Artificial Sequence: Synthetic oligonucleotide
ugaaccucuuguuauaaaacc

SEQ ID NO: 1054 - RNA, 21 nt, Artificial Sequence
  Description of Artificial Sequence: Synthetic oligonucleotide
  misc_feature (20)..(21): nn= is a deoxythymidine dinucleotide
ugaaccucuuguuauaaaann

SEQ ID NO: 1055 - RNA, 21 nt, Artificial Sequence
  Description of Artificial Sequence: Synthetic oligonucleotide
ccgacaaccaguauuuggacc

SEQ ID NO: 1056 - RNA, 21 nt, Artificial Sequence
  Description of Artificial Sequence: Synthetic oligonucleotide
  misc_feature (20)..(21): nn= is a deoxythymidine dinucleotide
ccgacaaccaguauuuggann

SEQ ID NO: 1057 - RNA, 21 nt, Artificial Sequence
  Description of Artificial Sequence: Synthetic oligonucleotide
gcaauucagacucguuguacc

SEQ ID NO: 1058 - RNA, 21 nt, Artificial Sequence
  Description of Artificial Sequence: Synthetic oligonucleotide
uccagguuuuugaacugaacc

SEQ ID NO: 1059 - RNA, 21 nt, Artificial Sequence
  Description of Artificial Sequence: Synthetic oligonucleotide
gguuuaugaucugacguuacc

SEQ ID NO: 1060 - RNA, 21 nt, Artificial Sequence
  Description of Artificial Sequence: Synthetic oligonucleotide
ccacaauguagugacuggacc

SEQ ID NO: 1061 - RNA, 21 nt, Artificial Sequence
  Description of Artificial Sequence: Synthetic oligonucleotide
gucacaaaguaccguguaacc

SEQ ID NO: 1062 - RNA, 21 nt, Artificial Sequence
  Description of Artificial Sequence: Synthetic oligonucleotide
ugaaccucuaguuauaaaacc

SEQ ID NO: 1063 - RNA, 21 nt, Artificial Sequence
  Description of Artificial Sequence: Synthetic oligonucleotide
ccgacaaccuguauuuggacc

SEQ ID NO: 1064 - RNA, 21 nt, Artificial Sequence
  Description of Artificial Sequence: Synthetic oligonucleotide
cauuggaauuccuaaaauucc

SEQ ID NO: 1065 - RNA, 21 nt, Artificial Sequence
  Description of Artificial Sequence: Synthetic oligonucleotide
gaucauuggaauuccuaaucc

SEQ ID NO: 1066 - RNA, 21 nt, Artificial Sequence
  Description of Artificial Sequence: Synthetic oligonucleotide
cauuggaauuccuaaaaugcc

SEQ ID NO: 1067 - RNA, 21 nt, Artificial Sequence
  Description of Artificial Sequence: Synthetic oligonucleotide
gaucauuggaauuccuaagcc

SEQ ID NO: 1068 - RNA, 21 nt, Artificial Sequence
  Description of Artificial Sequence: Synthetic oligonucleotide
cauuggaauuccuaaaauacc

SEQ ID NO: 1069 - RNA, 21 nt, Artificial Sequence
  Description of Artificial Sequence: Synthetic oligonucleotide
  misc_feature (20)..(21): nn= is a deoxythymidine dinucleotide
cauuggaauuccuaaaauann

SEQ ID NO: 1070 - RNA, 21 nt, Artificial Sequence
  Description of Artificial Sequence: Synthetic oligonucleotide
gaucauuggaauuccuaaacc

SEQ ID NO: 1071 - RNA, 21 nt, Artificial Sequence
  Description of Artificial Sequence: Synthetic oligonucleotide
  misc_feature (20)..(21): nn= is a deoxythymidine dinucleotide
gaucauuggaauuccuaaann

SEQ ID NO: 1072 - RNA, 21 nt, Artificial Sequence
  Description of Artificial Sequence: Synthetic oligonucleotide
cauuggaauaccuaaaauacc

SEQ ID NO: 1073 - RNA, 21 nt, Artificial Sequence
  Description of Artificial Sequence: Synthetic oligonucleotide
gaucauugguauuccuaaacc

SEQ ID NO: 1074 - RNA, 21 nt, Artificial Sequence
  Description of Artificial Sequence: Synthetic oligonucleotide
  misc_feature (20)..(21): nn= is a deoxythymidine dinucleotide
guuuaugaacugacguuaann

SEQ ID NO: 1075 - RNA, 21 nt, Artificial Sequence
  Description of Artificial Sequence: Synthetic oligonucleotide
  misc_feature (20)..(21): nn= is a deoxythymidine dinucleotide
guguuagacgguaccgacann

SEQ ID NO: 1076 - RNA, 21 nt, Artificial Sequence
  Description of Artificial Sequence: Synthetic oligonucleotide
  misc_feature (20)..(21): nn= is a deoxythymidine dinucleotide
auaucaguaaagagauuaann

SEQ ID NO: 1077 - RNA, 21 nt, Artificial Sequence
  Description of Artificial Sequence: Synthetic oligonucleotide
  misc_feature (20)..(21): nn= is a deoxythymidine dinucleotide
gguuuaugaacugacguuann

SEQ ID NO: 1078 - RNA, 21 nt, Artificial Sequence
  Description of Artificial Sequence: Synthetic oligonucleotide
  misc_feature (20)..(21): nn= is a deoxythymidine dinucleotide
ccacaauguugugaccggann

SEQ ID NO: 1079 - RNA, 21 nt, Artificial Sequence
  Description of Artificial Sequence: Synthetic oligonucleotide
  misc_feature (20)..(21): nn= is a deoxythymidine dinucleotide
gucacaaagaaccgugcaann

SEQ ID NO: 1080 - RNA, 21 nt, Artificial Sequence
  Description of Artificial Sequence: Synthetic oligonucleotide
  misc_feature (20)..(21): nn= is a deoxythymidine dinucleotide
cauuggaauuccuaaaaucnn

SEQ ID NO: 1081 - RNA, 21 nt, Artificial Sequence
  Description of Artificial Sequence: Synthetic oligonucleotide
ccugcuagcuccaugcuugcu

SEQ ID NO: 1082 - RNA, 21 nt, Artificial Sequence
  Description of Artificial Sequence: Synthetic oligonucleotide
ccugcuagcuccaugcuugau

SEQ ID NO: 1083 - RNA, 21 nt, Artificial Sequence
  Description of Artificial Sequence: Synthetic oligonucleotide
ccugcuagcuccaugcuuauu

SEQ ID NO: 1084 - RNA, 21 nt, Artificial Sequence
  Description of Artificial Sequence: Synthetic oligonucleotide
ccugcuagcuccaugcuuguu

SEQ ID NO: 1085 - RNA, 20 nt, Artificial Sequence
  Description of Artificial Sequence: Synthetic oligonucleotide
uucgagucccucaaguagcu

SEQ ID NO: 1086 - RNA, 22 nt, Artificial Sequence
  Description of Artificial Sequence: Synthetic oligonucleotide
uucgagucccucaaguagcuuu

SEQ ID NO: 1087 - RNA, 22 nt, Artificial Sequence
  Description of Artificial Sequence: Synthetic oligonucleotide
ucgagucccucaaguccauucu

SEQ ID NO: 1088 - RNA, 21 nt, Artificial Sequence
  Description of Artificial Sequence: Synthetic oligonucleotide
uuccaguccaucaagucaauu

SEQ ID NO: 1089 - RNA, 22 nt, Artificial Sequence
  Description of Artificial Sequence: Synthetic oligonucleotide
uuccgagucuaaaaguccuugg

SEQ ID NO: 1090 - RNA, 23 nt, Artificial Sequence
  Description of Artificial Sequence: Synthetic oligonucleotide
uuccgagucuaaaaguccuuggc

SEQ ID NO: 1091 - RNA, 23 nt, Artificial Sequence
  Description of Artificial Sequence: Synthetic oligonucleotide
cuuccgagucuaaaaguccuugg

SEQ ID NO: 1092 - RNA, 23 nt, Artificial Sequence
  Description of Artificial Sequence: Synthetic oligonucleotide
uuccgagucuaaaaguccuuggu

SEQ ID NO: 1093 - RNA, 24 nt, Artificial Sequence
  Description of Artificial Sequence: Synthetic oligonucleotide
uuccgagucuaaaaguccuuggcu

SEQ ID NO: 1094 - RNA, 23 nt, Artificial Sequence
  Description of Artificial Sequence: Synthetic oligonucleotide
uccaaugugaaacuucaucggcu

SEQ ID NO: 1095 - RNA, 22 nt, Artificial Sequence
  Description of Artificial Sequence: Synthetic oligonucleotide
uccaaugugaaacuucaucggc

SEQ ID NO: 1096 - RNA, 22 nt, Artificial Sequence
  Description of Artificial Sequence: Synthetic oligonucleotide
auccaaugugaaacuucaucgu

SEQ ID NO: 1097 - RNA, 23 nt, Artificial Sequence
  Description of Artificial Sequence: Synthetic oligonucleotide
auccaaugugaaacuucaucggu

SEQ ID NO: 1098 - RNA, 22 nt, Artificial Sequence
  Description of Artificial Sequence: Synthetic oligonucleotide
uccaaugugaaacuucaucggu

SEQ ID NO: 1099 - RNA, 24 nt, Artificial Sequence
  Description of Artificial Sequence: Synthetic oligonucleotide
uccaaugugaaacuucaucggcuu

SEQ ID NO: 1100 - RNA, 22 nt, Artificial Sequence
  Description of Artificial Sequence: Synthetic oligonucleotide
aucuacugugaaaauucaucgg

SEQ ID NO: 1101 - RNA, 21 nt, Artificial Sequence
  Description of Artificial Sequence: Synthetic oligonucleotide
ucuacugugaaaauucaucgg

SEQ ID NO: 1102 - RNA, 22 nt, Artificial Sequence
  Description of Artificial Sequence: Synthetic oligonucleotide
ucuacugugaaaauucaucggc

SEQ ID NO: 1103 - RNA, 23 nt, Artificial Sequence
  Description of Artificial Sequence: Synthetic oligonucleotide
aucuacugugaaaauucaucggu

SEQ ID NO: 1104 - RNA, 22 nt, Artificial Sequence
  Description of Artificial Sequence: Synthetic oligonucleotide
ucuacugugaaaauucaucggu

SEQ ID NO: 1105 - RNA, 23 nt, Artificial Sequence
  Description of Artificial Sequence: Synthetic oligonucleotide
ucuacugugaaaauucaucggcu

SEQ ID NO: 1106 - RNA, 22 nt, Artificial Sequence
  Description of Artificial Sequence: Synthetic oligonucleotide
ccuucgguccucaaguccuuca

SEQ ID NO: 1107 - RNA, 24 nt, Artificial Sequence
  Description of Artificial Sequence: Synthetic oligonucleotide
uucgaguccaucaaauccuauagu

SEQ ID NO: 1108 - RNA, 21 nt, Artificial Sequence
  Description of Artificial Sequence: Synthetic oligonucleotide
uacaaugugugcacuucauau

SEQ ID NO: 1109 - RNA, 23 nt, Artificial Sequence
  Description of Artificial Sequence: Synthetic oligonucleotide
uauacugugugcaauucauuucu

SEQ ID NO: 1110 - RNA, 20 nt, Artificial Sequence
  Description of Artificial Sequence: Synthetic oligonucleotide
gcaauucagucucguugucc

SEQ ID NO: 1111 - RNA, 19 nt, Artificial Sequence
  Description of Artificial Sequence: Synthetic oligonucleotide
gcaauucagucucguuguc

SEQ ID NO: 1112 - RNA, 20 nt, Artificial Sequence
  Description of Artificial Sequence: Synthetic oligonucleotide
caauucagucucguuguccc

SEQ ID NO: 1113 - RNA, 19 nt, Artificial Sequence
  Description of Artificial Sequence: Synthetic oligonucleotide
caauucagucucguugucc

SEQ ID NO: 1114 - RNA, 20 nt, Artificial Sequence
  Description of Artificial Sequence: Synthetic oligonucleotide
gcaauucagucucguugugc

SEQ ID NO: 1115 - RNA, 20 nt, Artificial Sequence
  Description of Artificial Sequence: Synthetic oligonucleotide
caauucagucucguugugcc

SEQ ID NO: 1116 - RNA, 22 nt, Artificial Sequence
  Description of Artificial Sequence: Synthetic oligonucleotide
ccacaauguugugacugggccu

SEQ ID NO: 1117 - RNA, 20 nt, Artificial Sequence
  Description of Artificial Sequence: Synthetic oligonucleotide
ccacaauguugugacugggc

SEQ ID NO: 1118 - RNA, 20 nt, Artificial Sequence
  Description of Artificial Sequence: Synthetic oligonucleotide
cacaauguugugacugggcc

SEQ ID NO: 1119 - RNA, 22 nt, Artificial Sequence
  Description of Artificial Sequence: Synthetic oligonucleotide
ugaaccucuuguuauaaagccu

SEQ ID NO: 1120 - RNA, 20 nt, Artificial Sequence
  Description of Artificial Sequence: Synthetic oligonucleotide
ugaaccucuuguuauaaagc

SEQ ID NO: 1121 - RNA, 20 nt, Artificial Sequence
  Description of Artificial Sequence: Synthetic oligonucleotide
gaaccucuuguuauaaagcc

SEQ ID NO: 1122 - RNA, 22 nt, Artificial Sequence
  Description of Artificial Sequence: Synthetic oligonucleotide
ccugcuagcuccaugcuugccu

SEQ ID NO: 1123 - RNA, 20 nt, Artificial Sequence
  Description of Artificial Sequence: Synthetic oligonucleotide
ccugcuagcuccaugcuugc

SEQ ID NO: 1124 - RNA, 19 nt, Artificial Sequence
  Description of Artificial Sequence: Synthetic oligonucleotide
ccugcuagcuccaugcuug

SEQ ID NO: 1125 - RNA, 20 nt, Artificial Sequence
  Description of Artificial Sequence: Synthetic oligonucleotide
cugcuagcuccaugcuugcc

SEQ ID NO: 1126 - RNA, 22 nt, Artificial Sequence
  Description of Artificial Sequence: Synthetic oligonucleotide
ccgacaaccaguauuugggccu

SEQ ID NO: 1127 - RNA, 20 nt, Artificial Sequence
  Description of Artificial Sequence: Synthetic oligonucleotide
ccgacaaccaguauuugggc

SEQ ID NO: 1128 - RNA, 19 nt, Artificial Sequence
  Description of Artificial Sequence: Synthetic oligonucleotide
ccgacaaccaguauuuggg

SEQ ID NO: 1129 - RNA, 20 nt, Artificial Sequence
  Description of Artificial Sequence: Synthetic oligonucleotide
cgacaaccaguauuugggcc

SEQ ID NO: 1130 - RNA, 19 nt, Artificial Sequence
  Description of Artificial Sequence: Synthetic oligonucleotide
cgacaaccaguauuugggc

SEQ ID NO: 1131 - RNA, 22 nt, Artificial Sequence
  Description of Artificial Sequence: Synthetic oligonucleotide
gcaauucagucucguuguaccu

SEQ ID NO: 1132 - RNA, 20 nt, Artificial Sequence
  Description of Artificial Sequence: Synthetic oligonucleotide
gcaauucagucucguuguac

SEQ ID NO: 1133 - RNA, 19 nt, Artificial Sequence
  Description of Artificial Sequence: Synthetic oligonucleotide
gcaauucagucucguugua

SEQ ID NO: 1134 - RNA, 20 nt, Artificial Sequence
  Description of Artificial Sequence: Synthetic oligonucleotide
caauucagucucguuguacc

SEQ ID NO: 1135 - RNA, 22 nt, Artificial Sequence
  Description of Artificial Sequence: Synthetic oligonucleotide
gcaauucagacucguuguaccu

SEQ ID NO: 1136 - RNA, 20 nt, Artificial Sequence
  Description of Artificial Sequence: Synthetic oligonucleotide
gcaauucagacucguuguac

SEQ ID NO: 1137 - RNA, 19 nt, Artificial Sequence
  Description of Artificial Sequence: Synthetic oligonucleotide
gcaauucagacucguugua

SEQ ID NO: 1138 - RNA, 20 nt, Artificial Sequence
  Description of Artificial Sequence: Synthetic oligonucleotide
caauucagacucguuguacc

SEQ ID NO: 1139 - RNA, 22 nt, Artificial Sequence
  Description of Artificial Sequence: Synthetic oligonucleotide
agcaauucagucucguuguacc

SEQ ID NO: 1140 - RNA, 21 nt, Artificial Sequence
  Description of Artificial Sequence: Synthetic oligonucleotide
agcaauucagucucguuguac

SEQ ID NO: 1141 - RNA, 21 nt, Artificial Sequence
  Description of Artificial Sequence: Synthetic oligonucleotide
agguuuaugaacugacguuac

SEQ ID NO: 1142 - RNA, 22 nt, Artificial Sequence
  Description of Artificial Sequence: Synthetic oligonucleotide
agguuuaugaacugacguuacc

SEQ ID NO: 1143 - RNA, 21 nt, Artificial Sequence
  Description of Artificial Sequence: Synthetic oligonucleotide
accacaauguugugacuggac

SEQ ID NO: 1144 - RNA, 22 nt, Artificial Sequence
  Description of Artificial Sequence: Synthetic oligonucleotide
accacaauguugugacuggacc

SEQ ID NO: 1145 - RNA, 23 nt, Artificial Sequence
  Description of Artificial Sequence: Synthetic oligonucleotide
ccacaauguugugacuggaccgu

SEQ ID NO: 1146 - RNA, 22 nt, Artificial Sequence
  Description of Artificial Sequence: Synthetic oligonucleotide
ccacaauguugugacuggaccg

SEQ ID NO: 1147 - RNA, 20 nt, Artificial Sequence
  Description of Artificial Sequence: Synthetic oligonucleotide
ccacaauguugugacuggac

SEQ ID NO: 1148 - RNA, 20 nt, Artificial Sequence
  Description of Artificial Sequence: Synthetic oligonucleotide
cacaauguugugacuggacc

SEQ ID NO: 1149 - RNA, 22 nt, Artificial Sequence
  Description of Artificial Sequence: Synthetic oligonucleotide
accugcuagcuccaugcuuccc

SEQ ID NO: 1150 - RNA, 21 nt, Artificial Sequence
  Description of Artificial Sequence: Synthetic oligonucleotide
accugcuagcuccaugcuucc

SEQ ID NO: 1151 - RNA, 20 nt, Artificial Sequence
  Description of Artificial Sequence: Synthetic oligonucleotide
accugcuagcuccaugcuuc

SEQ ID NO: 1152 - RNA, 20 nt, Artificial Sequence
  Description of Artificial Sequence: Synthetic oligonucleotide
ccugcuagcuccaugcuucc

SEQ ID NO: 1153 - RNA, 19 nt, Artificial Sequence
  Description of Artificial Sequence: Synthetic oligonucleotide
ccugcuagcuccaugcuuc

SEQ ID NO: 1154 - RNA, 20 nt, Artificial Sequence
  Description of Artificial Sequence: Synthetic oligonucleotide
cugcuagcuccaugcuuccc

SEQ ID NO: 1155 - RNA, 19 nt, Artificial Sequence
  Description of Artificial Sequence: Synthetic oligonucleotide
cugcuagcuccaugcuucc

SEQ ID NO: 1156 - RNA, 22 nt, Artificial Sequence
  Description of Artificial Sequence: Synthetic oligonucleotide
accgacaaccaguauuuggacc

SEQ ID NO: 1157 - RNA, 21 nt, Artificial Sequence
  Description of Artificial Sequence: Synthetic oligonucleotide
accgacaaccaguauuuggac

SEQ ID NO: 1158 - RNA, 23 nt, Artificial Sequence
  Description of Artificial Sequence: Synthetic oligonucleotide
ccgacaaccaguauuuggaccgu

SEQ ID NO: 1159 - RNA, 23 nt, Artificial Sequence
  Description of Artificial Sequence: Synthetic oligonucleotide
ccgacaaccaguauuuggaccgu

SEQ ID NO: 1160 - RNA, 20 nt, Artificial Sequence
  Description of Artificial Sequence: Synthetic oligonucleotide
ccgacaaccaguauuuggac

SEQ ID NO: 1161 - RNA, 20 nt, Artificial Sequence
  Description of Artificial Sequence: Synthetic oligonucleotide
cgacaaccaguauuuggacc

SEQ ID NO: 1162 - RNA, 21 nt, Artificial Sequence
  Description of Artificial Sequence: Synthetic oligonucleotide
ccugcuagcaccgugcuuacc

SEQ ID NO: 1163 - DNA, 13669 bp, Homo sapiens
ttgctgtgtgaggcagaacctgcgggggcaggggcgggctggttccctggccagccattggcagagtccgcaggctagggctgtcaatcatgctggccggcgtggccccgcctccgccggcgcggccccgcctccgccggcgcagcgtctgggacgcaaggcgccgtgggggctgccgggacgggtccaagatggacggccgctcaggttctgcttttacctgcggcccagagccccattcattgccccggtgctgagcggcgccgcgagtcggcccgaggcctccggggactgccgtgccgggcgggagaccgccatggcgaccctggaaaagctgatgaaggccttcgagtccctcaagtccttccagcagcagcagcagcagcagcagcagcagcagcagcagcagcagcagcagcagcagcagcagcaacagccgccaccgccgccgccgccgccgccgcctcctcagcttcctcagccgccgccgcaggcacagccgctgctgcctcagccgcagccgcccccgccgccgcccccgccgccacccggcccggctgtggctgaggagccgctgcaccgaccaaagaaagaactttcagctaccaagaaagaccgtgtgaatcattgtctgacaatatgtgaaaacatagtggcacagtctgtcagaaattctccagaatttcagaaacttctgggcatcgctatggaactttttctgctgtgcagtgatgacgcagagtcagatgtcaggatggtggctgacgaatgcctcaacaaagttatcaaagctttgatggattctaatcttccaaggttacagctcgagctctataaggaaattaaaaagaatggtgcccctcggagtttgcgtgctgccctgtggaggtttgctgagctggctcacctggttcggcctcagaaatgcaggccttacctggtgaaccttctgccgtgcctgactcgaacaagcaagagacccgaagaatcagtccaggagaccttggctgcagctgttcccaaaattatggcttcttttggcaattttgcaaatgacaatgaaattaaggttttgttaaaggccttcatagcgaacctgaagtcaagctcccccaccattcggcggacagcggctggatcagcagtgagcatctgccagcactcaagaaggacacaatatttctatagttggctactaaatgtgctcttaggcttactcgttcctgtcgaggatgaacactccactctgctgattcttggcgtgctgctcaccctgaggtatttggtgcccttgctgcagcagcaggtcaaggacacaagcctgaaaggcagcttcggagtgacaaggaaagaaatggaagtctctccttctgcagagcagcttgtccaggtttatgaactgacgttacatcatacacagcaccaagaccacaatgttgtgaccggagccctggagctgttgcagcagctcttcagaacgcctccacccgagcttctgcaaaccctgaccgcagtcgggggcattgggcagctcaccgctgctaaggaggagtctggtggccgaagccgtagtgggagtattgtggaacttatagctggagggggttcctcatgcagccctgtcctttcaagaaaacaaaaaggcaaagtgctcttaggagaagaagaagccttggaggatgactctgaatcgagatcggatgtcagcagctctgccttaacagcctcagtgaaggatgagatcagtggagagctggctgcttcttcaggggtttccactccagggtcagcaggtcatgacatcatcacagaacagccacggtcacagcacacactgcaggcggactcagtggatctggccagctgtgacttgacaagctctgccactgatggggatgaggaggatatcttgagccacagctccagccaggtcagcgccgtcccatctgaccctgccatggacctgaatgatgggacccaggcctcgtcgcccatcagcgacagctcccagaccaccaccgaagggcctgattcagctgttaccccttcagacagttctgaaattgtgttagacggtaccgacaaccagtatttgggcctgcagattggacagccccaggatgaagatgaggaagccacaggtattcttcctgatgaagcctcggaggccttcaggaactcttccatggcccttcaacaggcacatttattgaaaaacatgagtcactgcaggcagccttctgacagcagtgttgataaatttgtgttgagagatgaagctactgaaccgggtgatcaagaaaacaagccttgccgcatcaaaggtgacattggacagtccactgatgatgactctgcacctcttgtccattgtgtccgccttttatctgcttcgtttttgctaacagggggaaaaaatgtgctggttccggacagggatgtgagggtcagcgtgaaggccctggccctcagctgtgtgggagcagctgtggccctccacccggaatctttcttcagcaaactctataaagttcctcttgacaccacggaataccctgaggaacagtatgtctcagacatcttgaactacatcgatcatggagacccacaggttcgaggagccactgccattctctgtgggaccctcatctgctccatcctcagcaggtcccgcttccacgtgggagattggatgggcaccattagaaccctcacaggaaatacattttctttggcggattgcattcctttgctgcggaaaacactgaaggatgagtcttctgttacttgcaagttagcttgtacagctgtgaggaactgtgtcatgagtctctgcagcagcagctacagtgagttaggactgcagctgatcatcgatgtgctgactctgaggaacagttcctattggctggtgaggacagagcttctggaaacccttgcagagattgacttcaggctggtgagctttttggaggcaaaagcagaaaacttacacagaggggctcatcattatacagggcttttaaaactgcaagaacgagtgctcaataatgttgtcatccatttgcttggagatgaagaccccagggtgcgacatgttgccgcagcatcactaattaggcttgtcccaaagctgttttataaatgtgaccaaggacaagctgatccagtagtggccgtggcaagagatcaaagcagtgtttacctgaaacttctcatgcatgagacgcagcctccatctcatttctccgtcagcacaataaccagaatatatagaggctataacctactaccaagcataacagacgtcactatggaaaataacctttcaagagttattgcagcagtttctcatgaactaatcacatcaaccaccagagcactcacatttggatgctgtgaagctttgtgtcttctttccactgccttcccagtttgcatttggagtttaggttggcactgtggagtgcctccactgagtgcctcagatgagtctaggaagagctgtaccgttgggatggccacaatgattctgaccctgctctcgtcagcttggttcccattggatctctcagcccatcaagatgctttgattttggccggaaacttgcttgcagccagtgctcccaaatctctgagaagttcatgggcctctgaagaagaagccaacccagcagccaccaagcaagaggaggtctggccagccctgggggaccgggccctggtgcccatggtggagcagctcttctctcacctgctgaaggtgattaacatttgtgcccacgtcctggatgacgtggctcctggacccgcaataaaggcagccttgccttctctaacaaaccccccttctctaagtcccatccgacgaaaggggaaggagaaagaaccaggagaacaagcatctgtaccgttgagtcccaagaaaggcagtgaggccagtgcagcttctagacaatctgatacctcaggtcctgttacaacaagtaaatcctcatcactggggagtttctatcatcttccttcatacctcaaactgcatgatgtcctgaaagctacacacgctaactacaaggtcacgctggatcttcagaacagcacggaaaagtttggagggtttctccgctcagccttggatgttctttctcagatactagagctggccacactgcaggacattgggaagtgtgttgaagagatcctaggatacctgaaatcctgctttagtcgagaaccaatgatggcaactgtttgtgttcaacaattgttgaagactctctttggcacaaacttggcctcccagtttgatggcttatcttccaaccccagcaagtcacaaggccgagcacagcgccttggctcctccagtgtgaggccaggcttgtaccactactgcttcatggccccgtacacccacttcacccaggccctcgctgacgccagcctgaggaacatggtgcaggcggagcaggagaacgacacctcgggatggtttgatgtcctccagaaagtgtctacccagttgaagacaaacctcacgagtgtcacaaagaaccgtgcagataagaatgctattcataatcacattcgtttgtttgaacctcttgttataaaagctttaaaacagtacacgactacaacatgtgtgcagttacagaagcaggttttagatttgctggcgcagctggttcagttacgggttaattactgtcttctggattcagatcaggtgtttattggctttgtattgaaacagtttgaatacattgaagtgggccagttcagggaatcagaggcaatcattccaaacatctttttcttcttggtattactatcttatgaacgctatcattcaaaacagatcattggaattcctaaaatcattcagctctgtgatggcatcatggccagtggaaggaaggctgtgacacatgccataccggctctgcagcccatagtccacgacctctttgtattaagaggaacaaataaagctgatgcaggaaaagagcttgaaacccaaaaagaggtggtggtgtcaatgttactgagactcatccagtaccatcaggtgttggagatgttcattcttgtcctgcagcagtgccacaaggagaatgaagacaagtggaagcgactgtctcgacagatagctgacatcatcctcccaatgttagccaaacagcagatgcacattgactctcatgaagcccttggagtgttaaatacattatttgagattttggccccttcctccctccgtccggtagacatgcttttacggagtatgttcgtcactccaaacacaatggcgtccgtgagcactgttcaactgtggatatcgggaattctggccattttgagggttctgatttcccagtcaactgaagatattgttctttctcgtattcaggagctctccttctctccgtatttaatctcctgtacagtaattaataggttaagagatggggacagtacttcaacgctagaagaacacagtgaagggaaacaaataaagaatttgccagaagaaacattttcaaggtttctattacaactggttggtattcttttagaagacattgttacaaaacagctgaaggtggaaatgagtgagcagcaacatactttctattgccaggaactaggcacactgctaatgtgtctgatccacatcttcaagtctggaatgttccggagaatcacagcagctgccactaggctgttccgcagtgatggctgtggcggcagtttctacaccctggacagcttgaacttgcgggctcgttccatgatcaccacccacccggccctggtgctgctctggtgtcagatactgctgcttgtcaaccacaccgactaccgctggtgggcagaagtgcagcagaccccgaaaagacacagtctgtccagcacaaagttacttagtccccagatgtctggagaagaggaggattctgacttggcagccaaacttggaatgtgcaatagagaaatagtacgaagaggggctctcattctcttctgtgattatgtctgtcagaacctccatgactccgagcacttaacgtggctcattgtaaatcacattcaagatctgatcagcctttcccacgagcctccagtacaggacttcatcagtgccgttcatcggaactctgctgccagcggcctgttcatccaggcaattcagtctcgttgtgaaaacctttcaactccaaccatgctgaagaaaactcttcagtgcttggaggggatccatctcagccagtcgggagctgtgctcacgctgtatgtggacaggcttctgtgcacccctttccgtgtgctggctcgcatggtcgacatccttgcttgtcgccgggtagaaatgcttctggctgcaaatttacagagcagcatggcccagttgccaatggaagaactcaacagaatccaggaataccttcagagcagcgggctcgctcagagacaccaaaggctctattccctgctggacaggtttcgtctctccaccatgcaagactcacttagtccctctcctccagtctcttcccacccgctggacggggatgggcacgtgtcactggaaacagtgagtccggacaaagactggtacgttcatcttgtcaaatcccagtgttggaccaggtcagattctgcactgctggaaggtgcagagctggtgaatcggattcctgctgaagatatgaatgccttcatgatgaactcggagttcaacctaagcctgctagctccatgcttaagcctagggatgagtgaaatttctggtggccagaagagtgccctttttgaagcagcccgtgaggtgactctggcccgtgtgagcggcaccgtgcagcagctccctgctgtccatcatgtcttccagcccgagctgcctgcagagccggcggcctactggagcaagttgaatgatctgtttggggatgctgcactgtatcagtccctgcccactctggcccgggccctggcacagtacctggtggtggtctccaaactgcccagtcatttgcaccttcctcctgagaaagagaaggacattgtgaaattcgtggtggcaacccttgaggccctgtcctggcatttgatccatgagcagatcccgctgagtctggatctccaggcagggctggactgctgctgcctggccctgcagctgcctggcctctggagcgtggtctcctccacagagtttgtgacccacgcctgctccctcatctactgtgtgcacttcatcctggaggccgttgcagtgcagcctggagagcagcttcttagtccagaaagaaggacaaataccccaaaagccatcagcgaggaggaggaggaagtagatccaaacacacagaatcctaagtatatcactgcagcctgtgagatggtggcagaaatggtggagtctctgcagtcggtgttggccttgggtcataaaaggaatagcggcgtgccggcgtttctcacgccattgctaaggaacatcatcatcagcctggcccgcctgccccttgtcaacagctacacacgtgtgcccccactggtgtggaagcttggatggtcacccaaaccgggaggggattttggcacagcattccctgagatccccgtggagttcctccaggaaaaggaagtctttaaggagttcatctaccgcatcaacacactaggctggaccagtcgtactcagtttgaagaaacttgggccaccctccttggtgtcctggtgacgcagcccctcgtgatggagcaggaggagagcccaccagaagaagacacagagaggacccagatcaacgtcctggccgtgcaggccatcacctcactggtgctcagtgcaatgactgtgcctgtggccggcaacccagctgtaagctgcttggagcagcagccccggaacaagcctctgaaagctctcgacaccaggtttgggaggaagctgagcattatcagagggattgtggagcaagagattcaagcaatggtttcaaagagagagaatattgccacccatcatttatatcaggcatgggatcctgtcccttctctgtctccggctactacaggtgccctcatcagccacgagaagctgctgctacagatcaaccccgagcgggagctggggagcatgagctacaaactcggccaggtgtccatacactccgtgtggctggggaacagcatcacacccctgagggaggaggaatgggacgaggaagaggaggaggaggccgacgcccctgcaccttcgtcaccacccacgtctccagtcaactccaggaaacaccgggctggagttgacatccactcctgttcgcagtttttgcttgagttgtacagccgctggatcctgccgtccagctcagccaggaggaccccggccatcctgatcagtgaggtggtcagatcccttctagtggtctcagacttgttcaccgagcgcaaccagtttgagctgatgtatgtgacgctgacagaactgcgaagggtgcacccttcagaagacgagatcctcgctcagtacctggtgcctgccacctgcaaggcagctgccgtccttgggatggacaaggccgtggcggagcctgtcagccgcctgctggagagcacgctcaggagcagccacctgcccagcagggttggagccctgcacggcgtcctctatgtgctggagtgcgacctgctggacgacactgccaagcagctcatcccggtcatcagcgactatctcctctccaacctgaaagggatcgcccactgcgtgaacattcacagccagcagcacgtactggtcatgtgtgccactgcgttttacctcattgagaactatcctctggacgtagggccggaattttcagcatcaataatacagatgtgtggggtgatgctgtctggaagtgaggagtccaccccctccatcatttaccactgtgccctcagaggcctggagcgcctcctgctctctgagcagctctcccgcctggatgcagaatcgctggtcaagctgagtgtggacagagtgaacgtgcacagcccgcaccgggccatggcggctctgggcctgatgctcacctgcatgtacacaggaaaggagaaagtcagtccgggtagaacttcagaccctaatcctgcagcccccgacagcgagtcagtgattgttgctatggagcgggtatctgttctttttgataggatcaggaaaggctttccttgtgaagccagagtggtggccaggatcctgccccagtttctagacgacttcttcccaccccaggacatcatgaacaaagtcatcggagagtttctgtccaaccagcagccatacccccagttcatggccaccgtggtgtataaggtgtttcagactctgcacagcaccgggcagtcgtccatggtccgggactgggtcatgctgtccctctccaacttcacgcagagggccccggtcgccatggccacgtggagcctctcctgcttctttgtcagcgcgtccaccagcccgtgggtcgcggcgatcctcccacatgtcatcagcaggatgggcaagctggagcaggtggacgtgaaccttttctgcctggtcgccacagacttctacagacaccagatagaggaggagctcgaccgcagggccttccagtctgtgcttgaggtggttgcagccccaggaagcccatatcaccggctgctgacttgtttacgaaatgtccacaaggtcaccacctgctgagcgccatggtgggagagactgtgaggcggcagctggggccggagcctttggaagtctgcgcccttgtgccctgcctccaccgagccagcttggtccctatgggcttccgcacatgccgcgggcggccaggcaacgtgcgtgtctctgccatgtggcagaagtgctctttgtggcagtggccaggcagggagtgtctgcagtcctggtggggctgagcctgaggccttccagaaagcaggagcagctgtgctgcaccccatgtgggtgaccaggtcctttctcctgatagtcacctgctggttgttgccaggttgcagctgctcttgcatctgggccagaagtcctccctcctgcaggctggctgttggcccctctgctgtcctgcagtagaaggtgccgtgagcaggctttgggaacactggcctgggtctccctggtggggtgtgcatgccacgccccgtgtctggatgcacagatgccatggcctgtgctgggccagtggctgggggtgctagacacccggcaccattctcccttctctcttttcttctcaggatttaaaatttaattatatcagtaaagagattaattttaacgtaactctttctatgcccgtgtaaagtatgtgaatcgcaaggcctgtgctgcatgcgacagcgtccggggtggtggacagggcccccggccacgctccctctcctgtagccactggcatagccctcctgagcacccgctgacatttccgttgtacatgttcctgtttatgcattcacaaggtgactgggatgtagagaggcgttagtgggcaggtggccacagcaggactgaggacaggcccccattatcctaggggtgcgctcacctgcagcccctcctcctcgggcacagacgactgtcgttctccacccaccagtcagggacagcagcctccctgtcactcagctgagaaggccagccctccctggctgtgagcagcctccactgtgtccagagacatgggcctcccactcctgttccttgctagccctggggtggcgtctgcctaggagctggctggcaggtgttgggacctgctgctccatggatgcatgccctaagagtgtcactgagctgtgttttgtctgagcctctctcggtcaacagcaaagcttggtgtcttggcactgttagtgacagagcccagcatcccttctgcccccgttccagctgacatcttgcacggtgaccccttttagtcaggagagtgcagatctgtgctcatcggagactgccccacggccctgtcagagccgccactcctatccccaggccaggtccctggaccagcctcctgtttgcaggcccagaggagccaagtcattaaaatggaagtggattctggatggccgggctgctgctgatgtaggagctggatttgggagctctgcttgccgactggctgtgagacgaggcaggggctctgcttcctcagccctagaggcgagccaggcaaggttggcgactgtcatgtggcttggtttggtcatgcccgtcgatgttttgggtattgaatgtggtaagtggaggaaatgttggaactctgtgcaggtgctgccttgagacccccaagcttccacctgtccctctcctatgtggcagctggggagcagctgagatgtggacttgtatgctgcccacatacgtgagggggagctgaaagggagcccctcctctgagcagcctctgccaggcctgtatgaggcttttcccaccagctcccaacagaggcctcccccagccaggaccacctcgtcctcgtggcggggcagcaggagcggtagaaaggggtccgatgtttgaggaggcccttaagggaagctactgaattataacacgtaagaaaatcaccattccgtattggttgggggctcctgtttctcatcctagctttttcctggaaagcccgctagaaggtttgggaacgaggggaaagttctcagaactgttggctgctccccacccgcctcccgcctcccccgcaggttatgtcagcagctctgagacagcagtatcacaggccagatgttgttcctggctagatgtttacatttgtaagaaataacactgtgaatgtaaaacagagccattcccttggaatgcatatcgctgggctcaacatagagtttgtcttcctcttgtttacgacgtgatctaaaccagtccttagcaaggggctcagaacaccccgctctggcagtaggtgtcccccacccccaaagacctgcctgtgtgctccggagatgaatatgagctcattagtaaaaatgacttcacccacgcatatacataaagtatccatgcatgtgcatatagacacatctataattttacacacacacctctcaagacggagatgcatggcctctaagagtgcccgtgtcggttcttcctggaagttgactttccttagacccgccaggtcaagttagccgcgtgacggacatccaggcgtgggacgtggtcagggcagggctcattcattgcccactaggatcccactggcgaagatggtctccatatcagctctctgcagaagggaggaagactttatcatgttcctaaaaatctgtggcaagcacccatcgtattatccaaattttgttgcaaatgtgattaatttggttgtcaagttttgggggtgggctgtggggagattgcttttgttttcctgctggtaatatcgggaaagattttaatgaaaccagggtagaattgtttggcaatgcactgaagcgtgtttctttcccaaaatgtgcctcccttccgctgcgggcccagctgagtctatgtaggtgatgtttccagctgccaagtgctctttgttactgtccaccctcatttctgccagcgcatgtgtcctttcaaggggaaaatgtgaagctgaaccccctccagacacccagaatgtagcatctgagaaggccctgtgccctaaaggacacccctcgcccccatcttcatggagggggtcatttcagagccctcggagccaatgaacagctcctcctcttggagctgagatgagccccacgtggagctcgggacggatagtagacagcaataactcggtgtgtggccgcctggcaggtggaacttcctcccgttgcggggtggagtgaggttagttctgtgtgtctggtgggtggagtcaggcttctcttgctacctgtgagcatccttcccagcagacatcctcatcgggctttgtccctcccccgcttcctccctctgcggggaggacccgggaccacagctgctggccagggtagacttggagctgtcctccagaggggtcacgtgtaggagtgagaagaaggaagatcttgagagctgctgagggaccttggagagctcaggatggctcagacgaggacactcgcttgccgggcctgggcctcctgggaaggagggagctgctcagaatgccgcatgacaactgaaggcaacctggaaggttcaggggccgctcttcccccatgtgcctgtcacgctctggtgcagtcaaaggaacgccttcccctcagttgtttctaagagcagagtctcccgctgcaatctgggtggtaactgccagccttggaggatcgtggccaacgtggacctgcctacggagggtgggctctgacccaagtggggcctccttgtccaggtctcactgctttgcaccgtggtcagagggactgtcagctgagcttgagctcccctggagccagcagggctgtgatgggcgagtcccggagccccacccagacctgaatgcttctgagagcaaagggaaggactgacgagagatgtatatttaattttttaactgctgcaaacattgtacatccaaattaaaggaaaaaaatggaaaccatcaaaaaaaaaaaaaaaaaa

SEQ ID NO: 1164 - RNA, 21 nt, Artificial Sequence
  Description of Artificial Sequence: Synthetic oligonucleotide
  misc_feature (20)..(21): nn= is a deoxythymidine dinucleotide
uuuauaggccagaccuccgnn

SEQ ID NO: 1165 - RNA, 21 nt, Artificial Sequence
  Description of Artificial Sequence: Synthetic oligonucleotide
  misc_feature (20)..(21): nn= is a deoxythymidine dinucleotide
uuuuauaggccagaccuccnn

SEQ ID NO: 1166 - RNA, 21 nt, Artificial Sequence
  Description of Artificial Sequence: Synthetic oligonucleotide
  misc_feature (20)..(21): nn= is a deoxythymidine dinucleotide
ucuuuauaggccagaccucnn

SEQ ID NO: 1167 - RNA, 21 nt, Artificial Sequence
  Description of Artificial Sequence: Synthetic oligonucleotide
  misc_feature (20)..(21): nn= is a deoxythymidine dinucleotide
uacuuuauaggccagaccunn

SEQ ID NO: 1168 - RNA, 21 nt, Artificial Sequence
  Description of Artificial Sequence: Synthetic oligonucleotide
  misc_feature (20)..(21): nn= is a deoxythymidine dinucleotide
uuacuuuauaggccagaccnn

SEQ ID NO: 1169 - RNA, 21 nt, Artificial Sequence
  Description of Artificial Sequence: Synthetic oligonucleotide
  misc_feature (20)..(21): nn= is a deoxythymidine dinucleotide
uacuacuuuauaggccagann

SEQ ID NO: 1170 - RNA, 21 nt, Artificial Sequence
  Description of Artificial Sequence: Synthetic oligonucleotide
  misc_feature (20)..(21): nn= is a deoxythymidine dinucleotide
ugacuacuuuauaggccagnn

SEQ ID NO: 1171 - RNA, 21 nt, Artificial Sequence
  Description of Artificial Sequence: Synthetic oligonucleotide
  misc_feature (20)..(21): nn= is a deoxythymidine dinucleotide
ucgacuacuuuauaggccann

SEQ ID NO: 1172 - RNA, 21 nt, Artificial Sequence
  Description of Artificial Sequence: Synthetic oligonucleotide
  misc_feature (20)..(21): nn= is a deoxythymidine dinucleotide
ugcgacuacuuuauaggccnn

SEQ ID NO: 1173 - RNA, 21 nt, Artificial Sequence
  Description of Artificial Sequence: Synthetic oligonucleotide
  misc_feature (20)..(21): nn= is a deoxythymidine dinucleotide
ucgcgacuacuuuauaggcnn

SEQ ID NO: 1174 - RNA, 21 nt, Artificial Sequence
  Description of Artificial Sequence: Synthetic oligonucleotide
  misc_feature (20)..(21): nn= is a deoxythymidine dinucleotide
uccgcgacuacuuuauaggnn

SEQ ID NO: 1175 - RNA, 21 nt, Artificial Sequence
  Description of Artificial Sequence: Synthetic oligonucleotide
  misc_feature (20)..(21): nn= is a deoxythymidine dinucleotide
ugcugcaggagacuacgacnn

SEQ ID NO: 1176 - RNA, 21 nt, Artificial Sequence
  Description of Artificial Sequence: Synthetic oligonucleotide
  misc_feature (20)..(21): nn= is a deoxythymidine dinucleotide
uacgcugcaggagacuacgnn

SEQ ID NO: 1177 - RNA, 21 nt, Artificial Sequence
  Description of Artificial Sequence: Synthetic oligonucleotide
  misc_feature (20)..(21): nn= is a deoxythymidine dinucleotide
ugacgcugcaggagacuacnn

SEQ ID NO: 1178 - RNA, 21 nt, Artificial Sequence
  Description of Artificial Sequence: Synthetic oligonucleotide
  misc_feature (20)..(21): nn= is a deoxythymidine dinucleotide
uagacgcugcaggagacuann

SEQ ID NO: 1179 - RNA, 21 nt, Artificial Sequence
  Description of Artificial Sequence: Synthetic oligonucleotide
  misc_feature (20)..(21): nn= is a deoxythymidine dinucleotide
ucacggccuucgucgccaunn

SEQ ID NO: 1180 - RNA, 21 nt, Artificial Sequence
  Description of Artificial Sequence: Synthetic oligonucleotide
  misc_feature (20)..(21): nn= is a deoxythymidine dinucleotide
ucgcacacggccuucgucgnn

SEQ ID NO: 1181 - RNA, 21 nt, Artificial Sequence
  Description of Artificial Sequence: Synthetic oligonucleotide
  misc_feature (20)..(21): nn= is a deoxythymidine dinucleotide
uagcacgcacacggccuucnn

SEQ ID NO: 1182 - RNA, 21 nt, Artificial Sequence
  Description of Artificial Sequence: Synthetic oligonucleotide
  misc_feature (20)..(21): nn= is a deoxythymidine dinucleotide
uuucagcacgcacacggccnn

SEQ ID NO: 1183 - RNA, 21 nt, Artificial Sequence
  Description of Artificial Sequence: Synthetic oligonucleotide
  misc_feature (20)..(21): nn= is a deoxythymidine dinucleotide
ugcacugggccgucgcccunn

SEQ ID NO: 1184 - RNA, 21 nt, Artificial Sequence
  Description of Artificial Sequence: Synthetic oligonucleotide
  misc_feature (20)..(21): nn= is a deoxythymidine dinucleotide
uaauugaugaugcccugcann

SEQ ID NO: 1185 - RNA, 21 nt, Artificial Sequence
  Description of Artificial Sequence: Synthetic oligonucleotide
  misc_feature (20)..(21): nn= is a deoxythymidine dinucleotide
uaaauugaugaugcccugcnn

SEQ ID NO: 1186 - RNA, 21 nt, Artificial Sequence
  Description of Artificial Sequence: Synthetic oligonucleotide
  misc_feature (20)..(21): nn= is a deoxythymidine dinucleotide
ucgaaauugaugaugcccunn

SEQ ID NO: 1187 - RNA, 21 nt, Artificial Sequence
  Description of Artificial Sequence: Synthetic oligonucleotide
  misc_feature (20)..(21): nn= is a deoxythymidine dinucleotide
uucgaaauugaugaugcccnn

SEQ ID NO: 1188 - RNA, 21 nt, Artificial Sequence
  Description of Artificial Sequence: Synthetic oligonucleotide
  misc_feature (20)..(21): nn= is a deoxythymidine dinucleotide
ucucgaaauugaugaugccnn

SEQ ID NO: 1189 - RNA, 21 nt, Artificial Sequence
  Description of Artificial Sequence: Synthetic oligonucleotide
  misc_feature (20)..(21): nn= is a deoxythymidine dinucleotide
ugcucgaaauugaugaugcnn

SEQ ID NO: 1190 - RNA, 21 nt, Artificial Sequence
  Description of Artificial Sequence: Synthetic oligonucleotide
  misc_feature (20)..(21): nn= is a deoxythymidine dinucleotide
uugcucgaaauugaugaugnn

SEQ ID NO: 1191 - RNA, 21 nt, Artificial Sequence
  Description of Artificial Sequence: Synthetic oligonucleotide
  misc_feature (20)..(21): nn= is a deoxythymidine dinucleotide
uuuccuucugcucgaaauunn

SEQ ID NO: 1192 - RNA, 21 nt, Artificial Sequence
  Description of Artificial Sequence: Synthetic oligonucleotide
  misc_feature (20)..(21): nn= is a deoxythymidine dinucleotide
uacuuuccuucugcucgaann

SEQ ID NO: 1193 - RNA, 21 nt, Artificial Sequence
  Description of Artificial Sequence: Synthetic oligonucleotide
  misc_feature (20)..(21): nn= is a deoxythymidine dinucleotide
uuacuuuccuucugcucgann

SEQ ID NO: 1194 - RNA, 21 nt, Artificial Sequence
  Description of Artificial Sequence: Synthetic oligonucleotide
  misc_feature (20)..(21): nn= is a deoxythymidine dinucleotide
uaaugcuuccccacaccuunn

SEQ ID NO: 1195 - RNA, 21 nt, Artificial Sequence
  Description of Artificial Sequence: Synthetic oligonucleotide
  misc_feature (20)..(21): nn= is a deoxythymidine dinucleotide
uuuaaugcuuccccacaccnn

SEQ ID NO: 1196 - RNA, 21 nt, Artificial Sequence
  Description of Artificial Sequence: Synthetic oligonucleotide
  misc_feature (20)..(21): nn= is a deoxythymidine dinucleotide
ugcaggccuucagucagucnn

SEQ ID NO: 1197 - RNA, 21 nt, Artificial Sequence
  Description of Artificial Sequence: Synthetic oligonucleotide
  misc_feature (20)..(21): nn= is a deoxythymidine dinucleotide
uaugcaggccuucagucagnn

SEQ ID NO: 1198 - RNA, 21 nt, Artificial Sequence
  Description of Artificial Sequence: Synthetic oligonucleotide
  misc_feature (20)..(21): nn= is a deoxythymidine dinucleotide
ucaugcaggccuucagucann

SEQ ID NO: 1199 - RNA, 21 nt, Artificial Sequence
  Description of Artificial Sequence: Synthetic oligonucleotide
  misc_feature (20)..(21): nn= is a deoxythymidine dinucleotide
uaauccaugcaggccuucann

SEQ ID NO: 1200 - RNA, 21 nt, Artificial Sequence
  Description of Artificial Sequence: Synthetic oligonucleotide
  misc_feature (20)..(21): nn= is a deoxythymidine dinucleotide
ugaauccaugcaggccuucnn

SEQ ID NO: 1201 - RNA, 21 nt, Artificial Sequence
  Description of Artificial Sequence: Synthetic oligonucleotide
  misc_feature (20)..(21): nn= is a deoxythymidine dinucleotide
ugaacauggaauccaugcann

SEQ ID NO: 1202 - RNA, 21 nt, Artificial Sequence
  Description of Artificial Sequence: Synthetic oligonucleotide
  misc_feature (20)..(21): nn= is a deoxythymidine dinucleotide
uaugaacauggaauccaugnn

SEQ ID NO: 1203 - RNA, 21 nt, Artificial Sequence
  Description of Artificial Sequence: Synthetic oligonucleotide
  misc_feature (20)..(21): nn= is a deoxythymidine dinucleotide
ucucaugaacauggaauccnn

SEQ ID NO: 1204 - RNA, 21 nt, Artificial Sequence
  Description of Artificial Sequence: Synthetic oligonucleotide
  misc_feature (20)..(21): nn= is a deoxythymidine dinucleotide
uaaacucaugaacauggaann

SEQ ID NO: 1205 - RNA, 21 nt, Artificial Sequence
  Description of Artificial Sequence: Synthetic oligonucleotide
  misc_feature (20)..(21): nn= is a deoxythymidine dinucleotide
uaucuccaaacucaugaacnn

SEQ ID NO: 1206 - RNA, 21 nt, Artificial Sequence
  Description of Artificial Sequence: Synthetic oligonucleotide
  misc_feature (20)..(21): nn= is a deoxythymidine dinucleotide
uuaucuccaaacucaugaann

SEQ ID NO: 1207 - RNA, 21 nt, Artificial Sequence
  Description of Artificial Sequence: Synthetic oligonucleotide
  misc_feature (20)..(21): nn= is a deoxythymidine dinucleotide
uguauuaucuccaaacucann

SEQ ID NO: 1208 - RNA, 21 nt, Artificial Sequence
  Description of Artificial Sequence: Synthetic oligonucleotide
  misc_feature (20)..(21): nn= is a deoxythymidine dinucleotide
uuguauuaucuccaaacucnn

SEQ ID NO: 1209 - RNA, 21 nt, Artificial Sequence
  Description of Artificial Sequence: Synthetic oligonucleotide
  misc_feature (20)..(21): nn= is a deoxythymidine dinucleotide
uccugcacugguacagccunn

SEQ ID NO: 1210 - RNA, 21 nt, Artificial Sequence
  Description of Artificial Sequence: Synthetic oligonucleotide
  misc_feature (20)..(21): nn= is a deoxythymidine dinucleotide
uaccugcacugguacagccnn

SEQ ID NO: 1211 - RNA, 21 nt, Artificial Sequence
  Description of Artificial Sequence: Synthetic oligonucleotide
  misc_feature (20)..(21): nn= is a deoxythymidine dinucleotide
uauuaaagugaggaccugcnn

SEQ ID NO: 1212 - RNA, 21 nt, Artificial Sequence
  Description of Artificial Sequence: Synthetic oligonucleotide
  misc_feature (20)..(21): nn= is a deoxythymidine dinucleotide
ugauuaaagugaggaccugnn

SEQ ID NO: 1213 - RNA, 21 nt, Artificial Sequence
  Description of Artificial Sequence: Synthetic oligonucleotide
  misc_feature (20)..(21): nn= is a deoxythymidine dinucleotide
ugauagaggauuaaagugann

SEQ ID NO: 1214 - RNA, 21 nt, Artificial Sequence
  Description of Artificial Sequence: Synthetic oligonucleotide
  misc_feature (20)..(21): nn= is a deoxythymidine dinucleotide
uaccguguuuucuggauagnn

SEQ ID NO: 1215 - RNA, 21 nt, Artificial Sequence
  Description of Artificial Sequence: Synthetic oligonucleotide
  misc_feature (20)..(21): nn= is a deoxythymidine dinucleotide
ucaccguguuuucuggauann

SEQ ID NO: 1216 - RNA, 21 nt, Artificial Sequence
  Description of Artificial Sequence: Synthetic oligonucleotide
  misc_feature (20)..(21): nn= is a deoxythymidine dinucleotide
uccaccguguuuucuggaunn

SEQ ID NO: 1217 - RNA, 21 nt, Artificial Sequence
  Description of Artificial Sequence: Synthetic oligonucleotide
  misc_feature (20)..(21): nn= is a deoxythymidine dinucleotide
ugcccaccguguuuucuggnn

SEQ ID NO: 1218 - RNA, 21 nt, Artificial Sequence
  Description of Artificial Sequence: Synthetic oligonucleotide
  misc_feature (20)..(21): nn= is a deoxythymidine dinucleotide
uuuggcccaccguguuuucnn

SEQ ID NO: 1219 - RNA, 21 nt, Artificial Sequence
  Description of Artificial Sequence: Synthetic oligonucleotide
  misc_feature (20)..(21): nn= is a deoxythymidine dinucleotide
uuuuggcccaccguguuuunn

SEQ ID NO: 1220 - RNA, 21 nt, Artificial Sequence
  Description of Artificial Sequence: Synthetic oligonucleotide
  misc_feature (20)..(21): nn= is a deoxythymidine dinucleotide
uucauccuuuggcccaccgnn

SEQ ID NO: 1221 - RNA, 21 nt, Artificial Sequence
  Description of Artificial Sequence: Synthetic oligonucleotide
  misc_feature (20)..(21): nn= is a deoxythymidine dinucleotide
ucaugccucucuucauccunn

SEQ ID NO: 1222 - RNA, 21 nt, Artificial Sequence
  Description of Artificial Sequence: Synthetic oligonucleotide
  misc_feature (20)..(21): nn= is a deoxythymidine dinucleotide
ucaacaugccucucuucaunn

SEQ ID NO: 1223 - RNA, 21 nt, Artificial Sequence
  Description of Artificial Sequence: Synthetic oligonucleotide
  misc_feature (20)..(21): nn= is a deoxythymidine dinucleotide
ugucuccaacaugccucucnn

SEQ ID NO: 1224 - RNA, 21 nt, Artificial Sequence
  Description of Artificial Sequence: Synthetic oligonucleotide
  misc_feature (20)..(21): nn= is a deoxythymidine dinucleotide
uagucuccaacaugccucunn

SEQ ID NO: 1225 - RNA, 21 nt, Artificial Sequence
  Description of Artificial Sequence: Synthetic oligonucleotide
  misc_feature (20)..(21): nn= is a deoxythymidine dinucleotide
uugcccaagucuccaacaunn

SEQ ID NO: 1226 - RNA, 21 nt, Artificial Sequence
  Description of Artificial Sequence: Synthetic oligonucleotide
  misc_feature (20)..(21): nn= is a deoxythymidine dinucleotide
uauugcccaagucuccaacnn

SEQ ID NO: 1227 - RNA, 21 nt, Artificial Sequence
  Description of Artificial Sequence: Synthetic oligonucleotide
  misc_feature (20)..(21): nn= is a deoxythymidine dinucleotide
ucacauugcccaagucuccnn

SEQ ID NO: 1228 - RNA, 21 nt, Artificial Sequence
  Description of Artificial Sequence: Synthetic oligonucleotide
  misc_feature (20)..(21): nn= is a deoxythymidine dinucleotide
ugucagcagucacauugccnn

SEQ ID NO: 1229 - RNA, 21 nt, Artificial Sequence
  Description of Artificial Sequence: Synthetic oligonucleotide
  misc_feature (20)..(21): nn= is a deoxythymidine dinucleotide
uuugucagcagucacauugnn

SEQ ID NO: 1230 - RNA, 21 nt, Artificial Sequence
  Description of Artificial Sequence: Synthetic oligonucleotide
  misc_feature (20)..(21): nn= is a deoxythymidine dinucleotide
uccacaccaucuuugucagnn

SEQ ID NO: 1231 - RNA, 21 nt, Artificial Sequence
  Description of Artificial Sequence: Synthetic oligonucleotide
  misc_feature (20)..(21): nn= is a deoxythymidine dinucleotide
ugccacaccaucuuugucann

SEQ ID NO: 1232 - RNA, 21 nt, Artificial Sequence
  Description of Artificial Sequence: Synthetic oligonucleotide
  misc_feature (20)..(21): nn= is a deoxythymidine dinucleotide
uaugcaauggucuccugagnn

SEQ ID NO: 1233 - RNA, 21 nt, Artificial Sequence
  Description of Artificial Sequence: Synthetic oligonucleotide
  misc_feature (20)..(21): nn= is a deoxythymidine dinucleotide
ugaugcaauggucuccugann

SEQ ID NO: 1234 - RNA, 21 nt, Artificial Sequence
  Description of Artificial Sequence: Synthetic oligonucleotide
  misc_feature (20)..(21): nn= is a deoxythymidine dinucleotide
uccaaugaugcaauggucunn

SEQ ID NO: 1235 - RNA, 21 nt, Artificial Sequence
  Description of Artificial Sequence: Synthetic oligonucleotide
  misc_feature (20)..(21): nn= is a deoxythymidine dinucleotide
ugccaaugaugcaauggucnn

SEQ ID NO: 1236 - RNA, 21 nt, Artificial Sequence
  Description of Artificial Sequence: Synthetic oligonucleotide
  misc_feature (20)..(21): n is a, c, g, or u
uugcggccaaugaugcaaunn

SEQ ID NO: 1237 - RNA, 21 nt, Artificial Sequence
  Description of Artificial Sequence: Synthetic oligonucleotide
  misc_feature (20)..(21): nn= is a deoxythymidine dinucleotide
uaccagugugcggccaaugnn

SEQ ID NO: 1238 - RNA, 21 nt, Artificial Sequence
  Description of Artificial Sequence: Synthetic oligonucleotide
  misc_feature (20)..(21): nn= is a deoxythymidine dinucleotide
uauggaccaccagugugcgnn

SEQ ID NO: 1239 - RNA, 21 nt, Artificial Sequence
  Description of Artificial Sequence: Synthetic oligonucleotide
  misc_feature (20)..(21): nn= is a deoxythymidine dinucleotide
uucauggaccaccagugugnn

SEQ ID NO: 1240 - RNA, 21 nt, Artificial Sequence
  Description of Artificial Sequence: Synthetic oligonucleotide
  misc_feature (20)..(21): nn= is a deoxythymidine dinucleotide
uuucauggaccaccagugunn

SEQ ID NO: 1241 - RNA, 21 nt, Artificial Sequence
  Description of Artificial Sequence: Synthetic oligonucleotide
  misc_feature (20)..(21): nn= is a deoxythymidine dinucleotide
ucuuuuucauggaccaccann

SEQ ID NO: 1242 - RNA, 21 nt, Artificial Sequence
  Description of Artificial Sequence: Synthetic oligonucleotide
  misc_feature (20)..(21): nn= is a deoxythymidine dinucleotide
ucugcuuuuucauggaccann

SEQ ID NO: 1243 - RNA, 21 nt, Artificial Sequence
  Description of Artificial Sequence: Synthetic oligonucleotide
  misc_feature (20)..(21): nn= is a deoxythymidine dinucleotide
ugcccaagucaucugcuuunn

SEQ ID NO: 1244 - RNA, 21 nt, Artificial Sequence
  Description of Artificial Sequence: Synthetic oligonucleotide
  misc_feature (20)..(21): nn= is a deoxythymidine dinucleotide
uuuugcccaagucaucugcnn

SEQ ID NO: 1245 - RNA, 21 nt, Artificial Sequence
  Description of Artificial Sequence: Synthetic oligonucleotide
  misc_feature (20)..(21): nn= is a deoxythymidine dinucleotide
ucaccuuugcccaagucaunn

SEQ ID NO: 1246 - RNA, 21 nt, Artificial Sequence
  Description of Artificial Sequence: Synthetic oligonucleotide
  misc_feature (20)..(21): nn= is a deoxythymidine dinucleotide
uccaccuuugcccaagucann

SEQ ID NO: 1247 - RNA, 21 nt, Artificial Sequence
  Description of Artificial Sequence: Synthetic oligonucleotide
  misc_feature (20)..(21): nn= is a deoxythymidine dinucleotide
uuccaccuuugcccaagucnn

SEQ ID NO: 1248 - RNA, 21 nt, Artificial Sequence
  Description of Artificial Sequence: Synthetic oligonucleotide
  misc_feature (20)..(21): nn= is a deoxythymidine dinucleotide
ucguuuccugucuuuguacnn

SEQ ID NO: 1249 - RNA, 21 nt, Artificial Sequence
  Description of Artificial Sequence: Synthetic oligonucleotide
  misc_feature (20)..(21): nn= is a deoxythymidine dinucleotide
uagcguuuccugucuuugunn

SEQ ID NO: 1250 - RNA, 21 nt, Artificial Sequence
  Description of Artificial Sequence: Synthetic oligonucleotide
  misc_feature (20)..(21): nn= is a deoxythymidine dinucleotide
ucagcguuuccugucuuugnn

SEQ ID NO: 1251 - RNA, 21 nt, Artificial Sequence
  Description of Artificial Sequence: Synthetic oligonucleotide
  misc_feature (20)..(21): nn= is a deoxythymidine dinucleotide
ucgacuuccagcguuuccunn

SEQ ID NO: 1252 - RNA, 21 nt, Artificial Sequence
  Description of Artificial Sequence: Synthetic oligonucleotide
  misc_feature (20)..(21): nn= is a deoxythymidine dinucleotide
ucaccacaagccaaacgacnn

SEQ ID NO: 1253 - RNA, 21 nt, Artificial Sequence
  Description of Artificial Sequence: Synthetic oligonucleotide
  misc_feature (20)..(21): nn= is a deoxythymidine dinucleotide
uacaccacaagccaaacgann

SEQ ID NO: 1254 - RNA, 21 nt, Artificial Sequence
  Description of Artificial Sequence: Synthetic oligonucleotide
  misc_feature (20)..(21): nn= is a deoxythymidine dinucleotide
uuacaccacaagccaaacgnn

SEQ ID NO: 1255 - RNA, 21 nt, Artificial Sequence
  Description of Artificial Sequence: Synthetic oligonucleotide
  misc_feature (20)..(21): nn= is a deoxythymidine dinucleotide
uuuacaccacaagccaaacnn

SEQ ID NO: 1256 - RNA, 21 nt, Artificial Sequence
  Description of Artificial Sequence: Synthetic oligonucleotide
  misc_feature (20)..(21): nn= is a deoxythymidine dinucleotide
uaauuacaccacaagccaann

SEQ ID NO: 1257 - RNA, 21 nt, Artificial Sequence
  Description of Artificial Sequence: Synthetic oligonucleotide
  misc_feature (20)..(21): nn= is a deoxythymidine dinucleotide
uccaauuacaccacaagccnn

SEQ ID NO: 1258 - RNA, 21 nt, Artificial Sequence
  Description of Artificial Sequence: Synthetic oligonucleotide
  misc_feature (20)..(21): nn= is a deoxythymidine dinucleotide
ucccaauuacaccacaagcnn

SEQ ID NO: 1259 - RNA, 21 nt, Artificial Sequence
  Description of Artificial Sequence: Synthetic oligonucleotide
  misc_feature (20)..(21): nn= is a deoxythymidine dinucleotide
uucccaauuacaccacaagnn

SEQ ID NO: 1260 - RNA, 21 nt, Artificial Sequence
  Description of Artificial Sequence: Synthetic oligonucleotide
  misc_feature (20)..(21): nn= is a deoxythymidine dinucleotide
ugaucccaauuacaccacann

SEQ ID NO: 1261 - RNA, 21 nt, Artificial Sequence
  Description of Artificial Sequence: Synthetic oligonucleotide
  misc_feature (20)..(21): nn= is a deoxythymidine dinucleotide
ucgaucccaauuacaccacnn

SEQ ID NO: 1262 - RNA, 21 nt, Artificial Sequence
  Description of Artificial Sequence: Synthetic oligonucleotide
  misc_feature (20)..(21): nn= is a deoxythymidine dinucleotide
ugcgaucccaauuacaccann

SEQ ID NO: 1263 - RNA, 21 nt, Artificial Sequence
  Description of Artificial Sequence: Synthetic oligonucleotide
  misc_feature (20)..(21): nn= is a deoxythymidine dinucleotide
uuugggcgaucccaauuacnn

SEQ ID NO: 1264 - RNA, 21 nt, Artificial Sequence
  Description of Artificial Sequence: Synthetic oligonucleotide
  misc_feature (20)..(21): nn= is a deoxythymidine dinucleotide
uauugggcgaucccaauuann

SEQ ID NO: 1265 - RNA, 21 nt, Artificial Sequence
  Description of Artificial Sequence: Synthetic oligonucleotide
  misc_feature (20)..(21): nn= is a deoxythymidine dinucleotide
uuauugggcgaucccaauunn

SEQ ID NO: 1266 - RNA, 21 nt, Artificial Sequence
  Description of Artificial Sequence: Synthetic oligonucleotide
  misc_feature (20)..(21): nn= is a deoxythymidine dinucleotide
uuuauugggcgaucccaaunn

SEQ ID NO: 1267 - RNA, 21 nt, Artificial Sequence
  Description of Artificial Sequence: Synthetic oligonucleotide
  misc_feature (20)..(21): nn= is a deoxythymidine dinucleotide
uuuuauugggcgaucccaann

SEQ ID NO: 1268 - RNA, 21 nt, Artificial Sequence
  Description of Artificial Sequence: Synthetic oligonucleotide
  misc_feature (20)..(21): nn= is a deoxythymidine dinucleotide
uguuuauugggcgaucccann

SEQ ID NO: 1269 - RNA, 21 nt, Artificial Sequence
  Description of Artificial Sequence: Synthetic oligonucleotide
  misc_feature (20)..(21): nn= is a deoxythymidine dinucleotide
uuguuuauugggcgaucccnn

SEQ ID NO: 1270 - RNA, 21 nt, Artificial Sequence
  Description of Artificial Sequence: Synthetic oligonucleotide
  misc_feature (20)..(21): nn= is a deoxythymidine dinucleotide
ugaauguuuauugggcgaunn

SEQ ID NO: 1271 - RNA, 21 nt, Artificial Sequence
  Description of Artificial Sequence: Synthetic oligonucleotide
  misc_feature (20)..(21): nn= is a deoxythymidine dinucleotide
ucaagggaauguuuauuggnn

SEQ ID NO: 1272 - RNA, 21 nt, Artificial Sequence
  Description of Artificial Sequence: Synthetic oligonucleotide
  misc_feature (20)..(21): nn= is a deoxythymidine dinucleotide
uccaagggaauguuuauugnn

SEQ ID NO: 1273 - RNA, 21 nt, Artificial Sequence
  Description of Artificial Sequence: Synthetic oligonucleotide
  misc_feature (20)..(21): nn= is a deoxythymidine dinucleotide
uuccaagggaauguuuauunn

SEQ ID NO: 1274 - RNA, 21 nt, Artificial Sequence
  Description of Artificial Sequence: Synthetic oligonucleotide
  misc_feature (20)..(21): nn= is a deoxythymidine dinucleotide
uauccaagggaauguuuaunn

SEQ ID NO: 1275 - RNA, 21 nt, Artificial Sequence
  Description of Artificial Sequence: Synthetic oligonucleotide
  misc_feature (20)..(21): nn= is a deoxythymidine dinucleotide
ucauccaagggaauguuuann

SEQ ID NO: 1276 - RNA, 21 nt, Artificial Sequence
  Description of Artificial Sequence: Synthetic oligonucleotide
  misc_feature (20)..(21): nn= is a deoxythymidine dinucleotide
uacauccaagggaauguuunn

SEQ ID NO: 1277 - RNA, 21 nt, Artificial Sequence
  Description of Artificial Sequence: Synthetic oligonucleotide
  misc_feature (20)..(21): nn= is a deoxythymidine dinucleotide
uuacauccaagggaauguunn

SEQ ID NO: 1278 - RNA, 21 nt, Artificial Sequence
  Description of Artificial Sequence: Synthetic oligonucleotide
  misc_feature (20)..(21): nn= is a deoxythymidine dinucleotide
ugacuacauccaagggaaunn

SEQ ID NO: 1279 - RNA, 21 nt, Artificial Sequence
  Description of Artificial Sequence: Synthetic oligonucleotide
  misc_feature (20)..(21): nn= is a deoxythymidine dinucleotide
uccucagacuacauccaagnn

SEQ ID NO: 1280 - RNA, 21 nt, Artificial Sequence
  Description of Artificial Sequence: Synthetic oligonucleotide
  misc_feature (20)..(21): nn= is a deoxythymidine dinucleotide
uugaguuaaggggccucagnn

SEQ ID NO: 1281 - RNA, 21 nt, Artificial Sequence
  Description of Artificial Sequence: Synthetic oligonucleotide
  misc_feature (20)..(21): nn= is a deoxythymidine dinucleotide
ugaugaguuaaggggccucnn

SEQ ID NO: 1282 - RNA, 21 nt, Artificial Sequence
  Description of Artificial Sequence: Synthetic oligonucleotide
  misc_feature (20)..(21): nn= is a deoxythymidine dinucleotide
uagaugaguuaaggggccunn

SEQ ID NO: 1283 - RNA, 21 nt, Artificial Sequence
  Description of Artificial Sequence: Synthetic oligonucleotide
  misc_feature (20)..(21): nn= is a deoxythymidine dinucleotide
uaacagaugaguuaaggggnn

SEQ ID NO: 1284 - RNA, 21 nt, Artificial Sequence
  Description of Artificial Sequence: Synthetic oligonucleotide
  misc_feature (20)..(21): nn= is a deoxythymidine dinucleotide
uuaacagaugaguuaagggnn

SEQ ID NO: 1285 - RNA, 21 nt, Artificial Sequence
  Description of Artificial Sequence: Synthetic oligonucleotide
  misc_feature (20)..(21): nn= is a deoxythymidine dinucleotide
uauaacagaugaguuaaggnn

SEQ ID NO: 1286 - RNA, 21 nt, Artificial Sequence
  Description of Artificial Sequence: Synthetic oligonucleotide
  misc_feature (20)..(21): nn= is a deoxythymidine dinucleotide
ugauaacagaugaguuaagnn

SEQ ID NO: 1287 - RNA, 21 nt, Artificial Sequence
  Description of Artificial Sequence: Synthetic oligonucleotide
  misc_feature (20)..(21): nn= is a deoxythymidine dinucleotide
uggauaacagaugaguuaann

SEQ ID NO: 1288 - RNA, 21 nt, Artificial Sequence
  Description of Artificial Sequence: Synthetic oligonucleotide
  misc_feature (20)..(21): nn= is a deoxythymidine dinucleotide
uaggauaacagaugaguuann

SEQ ID NO: 1289 - RNA, 21 nt, Artificial Sequence
  Description of Artificial Sequence: Synthetic oligonucleotide
  misc_feature (20)..(21): nn= is a deoxythymidine dinucleotide
ucaggauaacagaugaguunn

SEQ ID NO: 1290 - RNA, 21 nt, Artificial Sequence
  Description of Artificial Sequence: Synthetic oligonucleotide
  misc_feature (20)..(21): nn= is a deoxythymidine dinucleotide
uuacagcuagcaggauaacnn

SEQ ID NO: 1291 - RNA, 21 nt, Artificial Sequence
  Description of Artificial Sequence: Synthetic oligonucleotide
  misc_feature (20)..(21): nn= is a deoxythymidine dinucleotide
ucauuucuacagcuagcagnn

SEQ ID NO: 1292 - RNA, 21 nt, Artificial Sequence
  Description of Artificial Sequence: Synthetic oligonucleotide
  misc_feature (20)..(21): nn= is a deoxythymidine dinucleotide
uacauuucuacagcuagcann

SEQ ID NO: 1293 - RNA, 21 nt, Artificial Sequence
  Description of Artificial Sequence: Synthetic oligonucleotide
  misc_feature (20)..(21): nn= is a deoxythymidine dinucleotide
uaggauacauuucuacagcnn

SEQ ID NO: 1294 - RNA, 21 nt, Artificial Sequence
  Description of Artificial Sequence: Synthetic oligonucleotide
  misc_feature (20)..(21): nn= is a deoxythymidine dinucleotide
ucaggauacauuucuacagnn

SEQ ID NO: 1295 - RNA, 21 nt, Artificial Sequence
  Description of Artificial Sequence: Synthetic oligonucleotide
  misc_feature (20)..(21): nn= is a deoxythymidine dinucleotide
uucaggauacauuucuacann

SEQ ID NO: 1296 - RNA, 21 nt, Artificial Sequence
  Description of Artificial Sequence: Synthetic oligonucleotide
  misc_feature (20)..(21): nn= is a deoxythymidine dinucleotide
uaucaggauacauuucuacnn

SEQ ID NO: 1297 - RNA, 21 nt, Artificial Sequence
  Description of Artificial Sequence: Synthetic oligonucleotide
  misc_feature (20)..(21): nn= is a deoxythymidine dinucleotide
uguuuaucaggauacauuunn

SEQ ID NO: 1298 - RNA, 21 nt, Artificial Sequence
  Description of Artificial Sequence: Synthetic oligonucleotide
  misc_feature (20)..(21): nn= is a deoxythymidine dinucleotide
uuaauguuuaucaggauacnn

SEQ ID NO: 1299 - RNA, 21 nt, Artificial Sequence
  Description of Artificial Sequence: Synthetic oligonucleotide
  misc_feature (20)..(21): nn= is a deoxythymidine dinucleotide
uuaagauuacaguguuuaann

SEQ ID NO: 1300 - RNA, 21 nt, Artificial Sequence
  Description of Artificial Sequence: Synthetic oligonucleotide
  misc_feature (20)..(21): nn= is a deoxythymidine dinucleotide
ucacuuuuaagauuacagunn

SEQ ID NO: 1301 - RNA, 21 nt, Artificial Sequence
  Description of Artificial Sequence: Synthetic oligonucleotide
  misc_feature (20)..(21): nn= is a deoxythymidine dinucleotide
uacacuuuuaagauuacagnn

SEQ ID NO: 1302 - RNA, 21 nt, Artificial Sequence
  Description of Artificial Sequence: Synthetic oligonucleotide
  misc_feature (20)..(21): nn= is a deoxythymidine dinucleotide
uuacacuuuuaagauuacann

SEQ ID NO: 1303 - RNA, 21 nt, Artificial Sequence
  Description of Artificial Sequence: Synthetic oligonucleotide
  misc_feature (20)..(21): nn= is a deoxythymidine dinucleotide
uuuacacuuuuaagauuacnn

SEQ ID NO: 1304 - RNA, 21 nt, Artificial Sequence
  Description of Artificial Sequence: Synthetic oligonucleotide
  misc_feature (20)..(21): nn= is a deoxythymidine dinucleotide
ucacaauuacacuuuuaagnn

SEQ ID NO: 1305 - RNA, 21 nt, Artificial Sequence
  Description of Artificial Sequence: Synthetic oligonucleotide
  misc_feature (20)..(21): nn= is a deoxythymidine dinucleotide
uaguuucucacuacagguann

SEQ ID NO: 1306 - RNA, 21 nt, Artificial Sequence
  Description of Artificial Sequence: Synthetic oligonucleotide
  misc_feature (20)..(21): nn= is a deoxythymidine dinucleotide
uucuuccaagugaucauaann

SEQ ID NO: 1307 - RNA, 21 nt, Artificial Sequence
  Description of Artificial Sequence: Synthetic oligonucleotide
  misc_feature (20)..(21): nn= is a deoxythymidine dinucleotide
uaaucuuccaagugaucaunn

SEQ ID NO: 1308 - RNA, 21 nt, Artificial Sequence
  Description of Artificial Sequence: Synthetic oligonucleotide
  misc_feature (20)..(21): nn= is a deoxythymidine dinucleotide
uacaaaucuuccaagugaunn

SEQ ID NO: 1309 - RNA, 21 nt, Artificial Sequence
  Description of Artificial Sequence: Synthetic oligonucleotide
  misc_feature (20)..(21): nn= is a deoxythymidine dinucleotide
uaacuauacaaaucuuccann

SEQ ID NO: 1310 - RNA, 21 nt, Artificial Sequence
  Description of Artificial Sequence: Synthetic oligonucleotide
  misc_feature (20)..(21): nn= is a deoxythymidine dinucleotide
uuuuuaacugaguuuuauann

SEQ ID NO: 1311 - RNA, 21 nt, Artificial Sequence
  Description of Artificial Sequence: Synthetic oligonucleotide
  misc_feature (20)..(21): nn= is a deoxythymidine dinucleotide
ugacauuuuaacugaguuunn

SEQ ID NO: 1312 - RNA, 21 nt, Artificial Sequence
  Description of Artificial Sequence: Synthetic oligonucleotide
  misc_feature (20)..(21): nn= is a deoxythymidine dinucleotide
ucaggucauugaaacagacnn

SEQ ID NO: 1313 - RNA, 21 nt, Artificial Sequence
  Description of Artificial Sequence: Synthetic oligonucleotide
  misc_feature (20)..(21): nn= is a deoxythymidine dinucleotide
uuggcaaaauacaggucaunn

SEQ ID NO: 1314 - RNA, 21 nt, Artificial Sequence
  Description of Artificial Sequence: Synthetic oligonucleotide
  misc_feature (20)..(21): nn= is a deoxythymidine dinucleotide
ugucuggcaaaauacaggunn

SEQ ID NO: 1315 - RNA, 21 nt, Artificial Sequence
  Description of Artificial Sequence: Synthetic oligonucleotide
  misc_feature (20)..(21): nn= is a deoxythymidine dinucleotide
uagucuggcaaaauacaggnn

SEQ ID NO: 1316 - RNA, 21 nt, Artificial Sequence
  Description of Artificial Sequence: Synthetic oligonucleotide
  misc_feature (20)..(21): nn= is a deoxythymidine dinucleotide
uauacccaucugugauuuann

SEQ ID NO: 1317 - RNA, 21 nt, Artificial Sequence
  Description of Artificial Sequence: Synthetic oligonucleotide
  misc_feature (20)..(21): nn= is a deoxythymidine dinucleotide
uuuaauacccaucugugaunn

SEQ ID NO: 1318 - RNA, 21 nt, Artificial Sequence
  Description of Artificial Sequence: Synthetic oligonucleotide
  misc_feature (20)..(21): nn= is a deoxythymidine dinucleotide
uuuuaauacccaucugugann

SEQ ID NO: 1319 - RNA, 21 nt, Artificial Sequence
  Description of Artificial Sequence: Synthetic oligonucleotide
  misc_feature (20)..(21): nn= is a deoxythymidine dinucleotide
uaguuuaauacccaucugunn

SEQ ID NO: 1320 - RNA, 21 nt, Artificial Sequence
  Description of Artificial Sequence: Synthetic oligonucleotide
  misc_feature (20)..(21): nn= is a deoxythymidine dinucleotide
uaaguuuaauacccaucugnn

SEQ ID NO: 1321 - RNA, 21 nt, Artificial Sequence
  Description of Artificial Sequence: Synthetic oligonucleotide
  misc_feature (20)..(21): nn= is a deoxythymidine dinucleotide
ucaaguuuaauacccaucunn

SEQ ID NO: 1322 - RNA, 21 nt, Artificial Sequence
  Description of Artificial Sequence: Synthetic oligonucleotide
  misc_feature (20)..(21): nn= is a deoxythymidine dinucleotide
ugacaaguuuaauacccaunn

SEQ ID NO: 1323 - RNA, 21 nt, Artificial Sequence
  Description of Artificial Sequence: Synthetic oligonucleotide
  misc_feature (20)..(21): nn= is a deoxythymidine dinucleotide
ugaaauucugacaaguuuann

SEQ ID NO: 1324 - RNA, 21 nt, Artificial Sequence
  Description of Artificial Sequence: Synthetic oligonucleotide
  misc_feature (20)..(21): nn= is a deoxythymidine dinucleotide
uauucacaggcuugaaugann

SEQ ID NO: 1325 - RNA, 21 nt, Artificial Sequence
  Description of Artificial Sequence: Synthetic oligonucleotide
  misc_feature (20)..(21): nn= is a deoxythymidine dinucleotide
uuauucacaggcuugaaugnn

SEQ ID NO: 1326 - RNA, 21 nt, Artificial Sequence
  Description of Artificial Sequence: Synthetic oligonucleotide
  misc_feature (20)..(21): nn= is a deoxythymidine dinucleotide
uccauacaggguuuuuauunn

SEQ ID NO: 1327 - RNA, 21 nt, Artificial Sequence
  Description of Artificial Sequence: Synthetic oligonucleotide
  misc_feature (20)..(21): nn= is a deoxythymidine dinucleotide
ugccauacaggguuuuuaunn

SEQ ID NO: 1328 - RNA, 21 nt, Artificial Sequence
  Description of Artificial Sequence: Synthetic oligonucleotide
  misc_feature (20)..(21): nn= is a deoxythymidine dinucleotide
uuaagugccauacaggguunn

SEQ ID NO: 1329 - RNA, 21 nt, Artificial Sequence
  Description of Artificial Sequence: Synthetic oligonucleotide
  misc_feature (20)..(21): n is a, c, g, or u
uauaagugccauacagggunn

SEQ ID NO: 1330 - RNA, 21 nt, Artificial Sequence
  Description of Artificial Sequence: Synthetic oligonucleotide
  misc_feature (20)..(21): nn= is a deoxythymidine dinucleotide
ugauucuuuuaauagccucnn

SEQ ID NO: 1331 - RNA, 21 nt, Artificial Sequence
  Description of Artificial Sequence: Synthetic oligonucleotide
  misc_feature (20)..(21): nn= is a deoxythymidine dinucleotide
uuuugaauuuggauucuuunn

SEQ ID NO: 1332 - RNA, 21 nt, Artificial Sequence
  Description of Artificial Sequence: Synthetic oligonucleotide
  misc_feature (20)..(21): nn= is a deoxythymidine dinucleotide
uuaguuugaauuuggauucnn

SEQ ID NO: 1333 - RNA, 21 nt, Artificial Sequence
  Description of Artificial Sequence: Synthetic oligonucleotide
  misc_feature (20)..(21): nn= is a deoxythymidine dinucleotide
cggaggucuggccuauaacnn

SEQ ID NO: 1334 - RNA, 21 nt, Artificial Sequence
  Description of Artificial Sequence: Synthetic oligonucleotide
  misc_feature (20)..(21): nn= is a deoxythymidine dinucleotide
ggaggucuggccuauaaacnn

SEQ ID NO: 1335 - RNA, 21 nt, Artificial Sequence
  Description of Artificial Sequence: Synthetic oligonucleotide
  misc_feature (20)..(21): nn= is a deoxythymidine dinucleotide
gaggucuggccuauaaagcnn

SEQ ID NO: 1336 - RNA, 21 nt, Artificial Sequence
  Description of Artificial Sequence: Synthetic oligonucleotide
  misc_feature (20)..(21): nn= is a deoxythymidine dinucleotide
aggucuggccuauaaagucnn

SEQ ID NO: 1337 - RNA, 21 nt, Artificial Sequence
  Description of Artificial Sequence: Synthetic oligonucleotide
  misc_feature (20)..(21): nn= is a deoxythymidine dinucleotide
ggucuggccuauaaaguacnn

SEQ ID NO: 1338 - RNA, 21 nt, Artificial Sequence
  Description of Artificial Sequence: Synthetic oligonucleotide
  misc_feature (20)..(21): nn= is a deoxythymidine dinucleotide
ucuggccuauaaaguagucnn

SEQ ID NO: 1339 - RNA, 21 nt, Artificial Sequence
  Description of Artificial Sequence: Synthetic oligonucleotide
  misc_feature (20)..(21): nn= is a deoxythymidine dinucleotide
cuggccuauaaaguaguccnn

SEQ ID NO: 1340 - RNA, 21 nt, Artificial Sequence
  Description of Artificial Sequence: Synthetic oligonucleotide
  misc_feature (20)..(21): n is a, c, g, or u
uggccuauaaaguagucgcnn

SEQ ID NO: 1341 - RNA, 21 nt, Artificial Sequence
  Description of Artificial Sequence: Synthetic oligonucleotide
  misc_feature (20)..(21): nn= is a deoxythymidine dinucleotide
ggccuauaaaguagucgccnn

SEQ ID NO: 1342 - RNA, 21 nt, Artificial Sequence
  Description of Artificial Sequence: Synthetic oligonucleotide
  misc_feature (20)..(21): nn= is a deoxythymidine dinucleotide
gccuauaaaguagucgcgcnn

SEQ ID NO: 1343 - RNA, 21 nt, Artificial Sequence
  Description of Artificial Sequence: Synthetic oligonucleotide
  misc_feature (20)..(21): nn= is a deoxythymidine dinucleotide
ccuauaaaguagucgcggcnn

SEQ ID NO: 1344 - RNA, 21 nt, Artificial Sequence
  Description of Artificial Sequence: Synthetic oligonucleotide
  misc_feature (20)..(21): nn= is a deoxythymidine dinucleotide
gucguagucuccugcagccnn

SEQ ID NO: 1345 - RNA, 21 nt, Artificial Sequence
  Description of Artificial Sequence: Synthetic oligonucleotide
  misc_feature (20)..(21): nn= is a deoxythymidine dinucleotide
cguagucuccugcagcgucnn

SEQ ID NO: 1346 - RNA, 21 nt, Artificial Sequence
  Description of Artificial Sequence: Synthetic oligonucleotide
  misc_feature (20)..(21): nn= is a deoxythymidine dinucleotide
guagucuccugcagcguccnn

SEQ ID NO: 1347 - RNA, 21 nt, Artificial Sequence
  Description of Artificial Sequence: Synthetic oligonucleotide
  misc_feature (20)..(21): nn= is a deoxythymidine dinucleotide
uagucuccugcagcgucucnn

SEQ ID NO: 1348 - RNA, 21 nt, Artificial Sequence
  Description of Artificial Sequence: Synthetic oligonucleotide
  misc_feature (20)..(21): nn= is a deoxythymidine dinucleotide
auggcgacgaaggccgugcnn

SEQ ID NO: 1349 - RNA, 21 nt, Artificial Sequence
  Description of Artificial Sequence: Synthetic oligonucleotide
  misc_feature (20)..(21): nn= is a deoxythymidine dinucleotide
cgacgaaggccgugugcgcnn

SEQ ID NO: 1350 - RNA, 21 nt, Artificial Sequence
  Description of Artificial Sequence: Synthetic oligonucleotide
  misc_feature (20)..(21): nn= is a deoxythymidine dinucleotide
gaaggccgugugcgugcucnn

SEQ ID NO: 1351 - RNA, 21 nt, Artificial Sequence
  Description of Artificial Sequence: Synthetic oligonucleotide
  misc_feature (20)..(21): nn= is a deoxythymidine dinucleotide
ggccgugugcgugcugaacnn

SEQ ID NO: 1352 - RNA, 21 nt, Artificial Sequence
  Description of Artificial Sequence: Synthetic oligonucleotide
  misc_feature (20)..(21): nn= is a deoxythymidine dinucleotide
agggcgacggcccagugccnn

SEQ ID NO: 1353 - RNA, 21 nt, Artificial Sequence
  Description of Artificial Sequence: Synthetic oligonucleotide
  misc_feature (20)..(21): nn= is a deoxythymidine dinucleotide
ugcagggcaucaucaauucnn

SEQ ID NO: 1354 - RNA, 21 nt, Artificial Sequence
  Description of Artificial Sequence: Synthetic oligonucleotide
  misc_feature (20)..(21): nn= is a deoxythymidine dinucleotide
gcagggcaucaucaauuucnn

SEQ ID NO: 1355 - RNA, 21 nt, Artificial Sequence
  Description of Artificial Sequence: Synthetic oligonucleotide
  misc_feature (20)..(21): nn= is a deoxythymidine dinucleotide
agggcaucaucaauuucgcnn

SEQ ID NO: 1356 - RNA, 21 nt, Artificial Sequence
  Description of Artificial Sequence: Synthetic oligonucleotide
  misc_feature (20)..(21): nn= is a deoxythymidine dinucleotide
gggcaucaucaauuucgacnn

SEQ ID NO: 1357 - RNA, 21 nt, Artificial Sequence
  Description of Artificial Sequence: Synthetic oligonucleotide
  misc_feature (20)..(21): nn= is a deoxythymidine dinucleotide
ggcaucaucaauuucgagcnn

SEQ ID NO: 1358 - RNA, 21 nt, Artificial Sequence
  Description of Artificial Sequence: Synthetic oligonucleotide
  misc_feature (20)..(21): nn= is a deoxythymidine dinucleotide
gcaucaucaauuucgagccnn

SEQ ID NO: 1359 - RNA, 21 nt, Artificial Sequence
  Description of Artificial Sequence: Synthetic oligonucleotide
  misc_feature (20)..(21): nn= is a deoxythymidine dinucleotide
caucaucaauuucgagcacnn

SEQ ID NO: 1360 - RNA, 21 nt, Artificial Sequence
  Description of Artificial Sequence: Synthetic oligonucleotide
  misc_feature (20)..(21): nn= is a deoxythymidine dinucleotide
aauuucgagcagaaggaacnn

SEQ ID NO: 1361 - RNA, 21 nt, Artificial Sequence
  Description of Artificial Sequence: Synthetic oligonucleotide
  misc_feature (20)..(21): nn= is a deoxythymidine dinucleotide
uucgagcagaaggaaagucnn

SEQ ID NO: 1362 - RNA, 21 nt, Artificial Sequence
  Description of Artificial Sequence: Synthetic oligonucleotide
  misc_feature (20)..(21): nn= is a deoxythymidine dinucleotide
ucgagcagaaggaaaguacnn

SEQ ID NO: 1363 - RNA, 21 nt, Artificial Sequence
  Description of Artificial Sequence: Synthetic oligonucleotide
  misc_feature (20)..(21): nn= is a deoxythymidine dinucleotide
aagguguggggaagcauucnn

SEQ ID NO: 1364 - RNA, 21 nt, Artificial Sequence
  Description of Artificial Sequence: Synthetic oligonucleotide
  misc_feature (20)..(21): nn= is a deoxythymidine dinucleotide
gguguggggaagcauuaacnn

SEQ ID NO: 1365 - RNA, 21 nt, Artificial Sequence
  Description of Artificial Sequence: Synthetic oligonucleotide
  misc_feature (20)..(21): nn= is a deoxythymidine dinucleotide
gacugacugaaggccugccnn

SEQ ID NO: 1366 - RNA, 21 nt, Artificial Sequence
  Description of Artificial Sequence: Synthetic oligonucleotide
  misc_feature (20)..(21): nn= is a deoxythymidine dinucleotide
cugacugaaggccugcaucnn

SEQ ID NO: 1367 - RNA, 21 nt, Artificial Sequence
  Description of Artificial Sequence: Synthetic oligonucleotide
  misc_feature (20)..(21): nn= is a deoxythymidine dinucleotide
ugacugaaggccugcaugcnn

SEQ ID NO: 1368 - RNA, 21 nt, Artificial Sequence
  Description of Artificial Sequence: Synthetic oligonucleotide
  misc_feature (20)..(21): nn= is a deoxythymidine dinucleotide
ugaaggccugcauggauucnn

SEQ ID NO: 1369 - RNA, 21 nt, Artificial Sequence
  Description of Artificial Sequence: Synthetic oligonucleotide
  misc_feature (20)..(21): nn= is a deoxythymidine dinucleotide
gaaggccugcauggauuccnn

SEQ ID NO: 1370 - RNA, 21 nt, Artificial Sequence
  Description of Artificial Sequence: Synthetic oligonucleotide
  misc_feature (20)..(21): nn= is a deoxythymidine dinucleotide
ugcauggauuccauguuccnn

SEQ ID NO: 1371 - RNA, 21 nt, Artificial Sequence
  Description of Artificial Sequence: Synthetic oligonucleotide
  misc_feature (20)..(21): nn= is a deoxythymidine dinucleotide
cauggauuccauguucaucnn

SEQ ID NO: 1372 - RNA, 21 nt, Artificial Sequence
  Description of Artificial Sequence: Synthetic oligonucleotide
  misc_feature (20)..(21): nn= is a deoxythymidine dinucleotide
ggauuccauguucaugagcnn

SEQ ID NO: 1373 - RNA, 21 nt, Artificial Sequence
  Description of Artificial Sequence: Synthetic oligonucleotide
  misc_feature (20)..(21): nn= is a deoxythymidine dinucleotide
uuccauguucaugaguuucnn

SEQ ID NO: 1374 - RNA, 21 nt, Artificial Sequence
  Description of Artificial Sequence: Synthetic oligonucleotide
  misc_feature (20)..(21): nn= is a deoxythymidine dinucleotide
guucaugaguuuggagaucnn

SEQ ID NO: 1375 - RNA, 21 nt, Artificial Sequence
  Description of Artificial Sequence: Synthetic oligonucleotide
  misc_feature (20)..(21): nn= is a deoxythymidine dinucleotide
uucaugaguuuggagauacnn

SEQ ID NO: 1376 - RNA, 21 nt, Artificial Sequence
  Description of Artificial Sequence: Synthetic oligonucleotide
  misc_feature (20)..(21): nn= is a deoxythymidine dinucleotide
ugaguuuggagauaauaccnn

SEQ ID NO: 1377 - RNA, 21 nt, Artificial Sequence
  Description of Artificial Sequence: Synthetic oligonucleotide
  misc_feature (20)..(21): nn= is a deoxythymidine dinucleotide
gaguuuggagauaauacacnn

SEQ ID NO: 1378 - RNA, 21 nt, Artificial Sequence
  Description of Artificial Sequence: Synthetic oligonucleotide
  misc_feature (20)..(21): nn= is a deoxythymidine dinucleotide
aggcuguaccagugcaggcnn

SEQ ID NO: 1379 - RNA, 21 nt, Artificial Sequence
  Description of Artificial Sequence: Synthetic oligonucleotide
  misc_feature (20)..(21): nn= is a deoxythymidine dinucleotide
ggcuguaccagugcaggucnn

SEQ ID NO: 1380 - RNA, 21 nt, Artificial Sequence
  Description of Artificial Sequence: Synthetic oligonucleotide
  misc_feature (20)..(21): nn= is a deoxythymidine dinucleotide
gcagguccucacuuuaaucnn

SEQ ID NO: 1381 - RNA, 21 nt, Artificial Sequence
  Description of Artificial Sequence: Synthetic oligonucleotide
  misc_feature (20)..(21): nn= is a deoxythymidine dinucleotide
cagguccucacuuuaauccnn

SEQ ID NO: 1382 - RNA, 21 nt, Artificial Sequence
  Description of Artificial Sequence: Synthetic oligonucleotide
  misc_feature (20)..(21): nn= is a deoxythymidine dinucleotide
ucacuuuaauccucuauccnn

SEQ ID NO: 1383 - RNA, 21 nt, Artificial Sequence
  Description of Artificial Sequence: Synthetic oligonucleotide
  misc_feature (20)..(21): nn= is a deoxythymidine dinucleotide
cuauccagaaaacacggucnn

SEQ ID NO: 1384 - RNA, 21 nt, Artificial Sequence
  Description of Artificial Sequence: Synthetic oligonucleotide
  misc_feature (20)..(21): nn= is a deoxythymidine dinucleotide
uauccagaaaacacggugcnn

SEQ ID NO: 1385 - RNA, 21 nt, Artificial Sequence
  Description of Artificial Sequence: Synthetic oligonucleotide
  misc_feature (20)..(21): nn= is a deoxythymidine dinucleotide
auccagaaaacacgguggcnn

SEQ ID NO: 1386 - RNA, 21 nt, Artificial Sequence
  Description of Artificial Sequence: Synthetic oligonucleotide
  misc_feature (20)..(21): nn= is a deoxythymidine dinucleotide
ccagaaaacacggugggccnn

SEQ ID NO: 1387 - RNA, 21 nt, Artificial Sequence
  Description of Artificial Sequence: Synthetic oligonucleotide
  misc_feature (20)..(21): nn= is a deoxythymidine dinucleotide
gaaaacacggugggccaacnn

SEQ ID NO: 1388 - RNA, 21 nt, Artificial Sequence
  Description of Artificial Sequence: Synthetic oligonucleotide
  misc_feature (20)..(21): nn= is a deoxythymidine dinucleotide
aaaacacggugggccaaacnn

SEQ ID NO: 1389 - RNA, 21 nt, Artificial Sequence
  Description of Artificial Sequence: Synthetic oligonucleotide
  misc_feature (20)..(21): nn= is a deoxythymidine dinucleotide
cggugggccaaaggaugacnn

SEQ ID NO: 1390 - RNA, 21 nt, Artificial Sequence
  Description of Artificial Sequence: Synthetic oligonucleotide
  misc_feature (20)..(21): nn= is a deoxythymidine dinucleotide
aggaugaagagaggcaugcnn

SEQ ID NO: 1391 - RNA, 21 nt, Artificial Sequence
  Description of Artificial Sequence: Synthetic oligonucleotide
  misc_feature (20)..(21): nn= is a deoxythymidine dinucleotide
augaagagaggcauguugcnn

SEQ ID NO: 1392 - RNA, 21 nt, Artificial Sequence
  Description of Artificial Sequence: Synthetic oligonucleotide
  misc_feature (20)..(21): nn= is a deoxythymidine dinucleotide
gagaggcauguuggagaccnn

SEQ ID NO: 1393 - RNA, 21 nt, Artificial Sequence
  Description of Artificial Sequence: Synthetic oligonucleotide
  misc_feature (20)..(21): nn= is a deoxythymidine dinucleotide
agaggcauguuggagacucnn

SEQ ID NO: 1394 - RNA, 21 nt, Artificial Sequence
  Description of Artificial Sequence: Synthetic oligonucleotide
  misc_feature (20)..(21): nn= is a deoxythymidine dinucleotide
auguuggagacuugggcacnn

SEQ ID NO: 1395 - RNA, 21 nt, Artificial Sequence
  Description of Artificial Sequence: Synthetic oligonucleotide
  misc_feature (20)..(21): nn= is a deoxythymidine dinucleotide
guuggagacuugggcaaucnn

SEQ ID NO: 1396 - RNA, 21 nt, Artificial Sequence
  Description of Artificial Sequence: Synthetic oligonucleotide
  misc_feature (20)..(21): nn= is a deoxythymidine dinucleotide
ggagacuugggcaaugugcnn

SEQ ID NO: 1397 - RNA, 21 nt, Artificial Sequence
  Description of Artificial Sequence: Synthetic oligonucleotide
  misc_feature (20)..(21): nn= is a deoxythymidine dinucleotide
ggcaaugugacugcugaccnn

SEQ ID NO: 1398 - RNA, 21 nt, Artificial Sequence
  Description of Artificial Sequence: Synthetic oligonucleotide
  misc_feature (20)..(21): nn= is a deoxythymidine dinucleotide
caaugugacugcugacaacnn

SEQ ID NO: 1399 - RNA, 21 nt, Artificial Sequence
  Description of Artificial Sequence: Synthetic oligonucleotide
  misc_feature (20)..(21): nn= is a deoxythymidine dinucleotide
cugacaaagaugguguggcnn

SEQ ID NO: 1400 - RNA, 21 nt, Artificial Sequence
  Description of Artificial Sequence: Synthetic oligonucleotide
  misc_feature (20)..(21): nn= is a deoxythymidine dinucleotide
ugacaaagaugguguggccnn

SEQ ID NO: 1401 - RNA, 21 nt, Artificial Sequence
  Description of Artificial Sequence: Synthetic oligonucleotide
  misc_feature (20)..(21): nn= is a deoxythymidine dinucleotide
cucaggagaccauugcaucnn

SEQ ID NO: 1402 - RNA, 21 nt, Artificial Sequence
  Description of Artificial Sequence: Synthetic oligonucleotide
  misc_feature (20)..(21): nn= is a deoxythymidine dinucleotide
ucaggagaccauugcauccnn

SEQ ID NO: 1403 - RNA, 21 nt, Artificial Sequence
  Description of Artificial Sequence: Synthetic oligonucleotide
  misc_feature (20)..(21): nn= is a deoxythymidine dinucleotide
agaccauugcaucauuggcnn

SEQ ID NO: 1404 - RNA, 21 nt, Artificial Sequence
  Description of Artificial Sequence: Synthetic oligonucleotide
  misc_feature (20)..(21): nn= is a deoxythymidine dinucleotide
gaccauugcaucauuggccnn

SEQ ID NO: 1405 - RNA, 21 nt, Artificial Sequence
  Description of Artificial Sequence: Synthetic oligonucleotide
  misc_feature (20)..(21): nn= is a deoxythymidine dinucleotide
auugcaucauuggccgcacnn

SEQ ID NO: 1406 - RNA, 21 nt, Artificial Sequence
  Description of Artificial Sequence: Synthetic oligonucleotide
  misc_feature (20)..(21): nn= is a deoxythymidine dinucleotide
cauuggccgcacacuggucnn

SEQ ID NO: 1407 - RNA, 21 nt, Artificial Sequence
  Description of Artificial Sequence: Synthetic oligonucleotide
  misc_feature (20)..(21): nn= is a deoxythymidine dinucleotide
cgcacacuggugguccaucnn

SEQ ID NO: 1408 - RNA, 21 nt, Artificial Sequence
  Description of Artificial Sequence: Synthetic oligonucleotide
  misc_feature (20)..(21): nn= is a deoxythymidine dinucleotide
cacacuggugguccaugacnn

SEQ ID NO: 1409 - RNA, 21 nt, Artificial Sequence
  Description of Artificial Sequence: Synthetic oligonucleotide
  misc_feature (20)..(21): nn= is a deoxythymidine dinucleotide
acacuggugguccaugaacnn

SEQ ID NO: 1410 - RNA, 21 nt, Artificial Sequence
  Description of Artificial Sequence: Synthetic oligonucleotide
  misc_feature (20)..(21): nn= is a deoxythymidine dinucleotide
uggugguccaugaaaaagcnn

SEQ ID NO: 1411 - RNA, 21 nt, Artificial Sequence
  Description of Artificial Sequence: Synthetic oligonucleotide
  misc_feature (20)..(21): nn= is a deoxythymidine dinucleotide
ugguccaugaaaaagcagcnn

SEQ ID NO: 1412 - RNA, 21 nt, Artificial Sequence
  Description of Artificial Sequence: Synthetic oligonucleotide
  misc_feature (20)..(21): nn= is a deoxythymidine dinucleotide
aaagcagaugacuugggccnn

SEQ ID NO: 1413 - RNA, 21 nt, Artificial Sequence
  Description of Artificial Sequence: Synthetic oligonucleotide
  misc_feature (20)..(21): nn= is a deoxythymidine dinucleotide
gcagaugacuugggcaaacnn

SEQ ID NO: 1414 - RNA, 21 nt, Artificial Sequence
  Description of Artificial Sequence: Synthetic oligonucleotide
  misc_feature (20)..(21): nn= is a deoxythymidine dinucleotide
augacuugggcaaaggugcnn

SEQ ID NO: 1415 - RNA, 21 nt, Artificial Sequence
  Description of Artificial Sequence: Synthetic oligonucleotide
  misc_feature (20)..(21): nn= is a deoxythymidine dinucleotide
ugacuugggcaaagguggcnn

SEQ ID NO: 1416 - RNA, 21 nt, Artificial Sequence
  Description of Artificial Sequence: Synthetic oligonucleotide
  misc_feature (20)..(21): nn= is a deoxythymidine dinucleotide
gacuugggcaaagguggacnn

SEQ ID NO: 1417 - RNA, 21 nt, Artificial Sequence
  Description of Artificial Sequence: Synthetic oligonucleotide
  misc_feature (20)..(21): nn= is a deoxythymidine dinucleotide
guacaaagacaggaaacgcnn

SEQ ID NO: 1418 - RNA, 21 nt, Artificial Sequence
  Description of Artificial Sequence: Synthetic oligonucleotide
  misc_feature (20)..(21): nn= is a deoxythymidine dinucleotide
acaaagacaggaaacgcucnn

SEQ ID NO: 1419 - RNA, 21 nt, Artificial Sequence
  Description of Artificial Sequence: Synthetic oligonucleotide
  misc_feature (20)..(21): nn= is a deoxythymidine dinucleotide
caaagacaggaaacgcugcnn

SEQ ID NO: 1420 - RNA, 21 nt, Artificial Sequence
  Description of Artificial Sequence: Synthetic oligonucleotide
  misc_feature (20)..(21): nn= is a deoxythymidine dinucleotide
aggaaacgcuggaagucgcnn

SEQ ID NO: 1421 - RNA, 21 nt, Artificial Sequence
  Description of Artificial Sequence: Synthetic oligonucleotide
  misc_feature (20)..(21): nn= is a deoxythymidine dinucleotide
gucguuuggcuuguggugcnn

SEQ ID NO: 1422 - RNA, 21 nt, Artificial Sequence
  Description of Artificial Sequence: Synthetic oligonucleotide
  misc_feature (20)..(21): nn= is a deoxythymidine dinucleotide
ucguuuggcuuguggugucnn

SEQ ID NO: 1423 - RNA, 21 nt, Artificial Sequence
  Description of Artificial Sequence: Synthetic oligonucleotide
  misc_feature (20)..(21): nn= is a deoxythymidine dinucleotide
cguuuggcuugugguguacnn

SEQ ID NO: 1424 - RNA, 21 nt, Artificial Sequence
  Description of Artificial Sequence: Synthetic oligonucleotide
  misc_feature (20)..(21): nn= is a deoxythymidine dinucleotide
guuuggcuugugguguaacnn

SEQ ID NO: 1425 - RNA, 21 nt, Artificial Sequence
  Description of Artificial Sequence: Synthetic oligonucleotide
  misc_feature (20)..(21): nn= is a deoxythymidine dinucleotide
uuggcuugugguguaauucnn

SEQ ID NO: 1426 - RNA, 21 nt, Artificial Sequence
  Description of Artificial Sequence: Synthetic oligonucleotide
  misc_feature (20)..(21): nn= is a deoxythymidine dinucleotide
ggcuugugguguaauuggcnn

SEQ ID NO: 1427 - RNA, 21 nt, Artificial Sequence
  Description of Artificial Sequence: Synthetic oligonucleotide
  misc_feature (20)..(21): nn= is a deoxythymidine dinucleotide
gcuugugguguaauugggcnn

SEQ ID NO: 1428 - RNA, 21 nt, Artificial Sequence
  Description of Artificial Sequence: Synthetic oligonucleotide
  misc_feature (20)..(21): nn= is a deoxythymidine dinucleotide
cuugugguguaauugggacnn

SEQ ID NO: 1429 - RNA, 21 nt, Artificial Sequence
  Description of Artificial Sequence: Synthetic oligonucleotide
  misc_feature (20)..(21): nn= is a deoxythymidine dinucleotide
ugugguguaauugggauccnn

SEQ ID NO: 1430 - RNA, 21 nt, Artificial Sequence
  Description of Artificial Sequence: Synthetic oligonucleotide
  misc_feature (20)..(21): nn= is a deoxythymidine dinucleotide
gugguguaauugggaucgcnn

SEQ ID NO: 1431 - RNA, 21 nt, Artificial Sequence
  Description of Artificial Sequence: Synthetic oligonucleotide
  misc_feature (20)..(21): nn= is a deoxythymidine dinucleotide
ugguguaauugggaucgccnn

SEQ ID NO: 1432 - RNA, 21 nt, Artificial Sequence
  Description of Artificial Sequence: Synthetic oligonucleotide
  misc_feature (20)..(21): nn= is a deoxythymidine dinucleotide
guaauugggaucgcccaacnn

SEQ ID NO: 1433 - RNA, 21 nt, Artificial Sequence
  Description of Artificial Sequence: Synthetic oligonucleotide
  misc_feature (20)..(21): nn= is a deoxythymidine dinucleotide
uaauugggaucgcccaaucnn

SEQ ID NO: 1434 - RNA, 21 nt, Artificial Sequence
  Description of Artificial Sequence: Synthetic oligonucleotide
  misc_feature (20)..(21): nn= is a deoxythymidine dinucleotide
aauugggaucgcccaauacnn

SEQ ID NO: 1435 - RNA, 21 nt, Artificial Sequence
  Description of Artificial Sequence: Synthetic oligonucleotide
  misc_feature (20)..(21): nn= is a deoxythymidine dinucleotide
auugggaucgcccaauaacnn

SEQ ID NO: 1436 - RNA, 21 nt, Artificial Sequence
  Description of Artificial Sequence: Synthetic oligonucleotide
  misc_feature (20)..(21): nn= is a deoxythymidine dinucleotide
uugggaucgcccaauaaacnn

SEQ ID NO: 1437 - RNA, 21 nt, Artificial Sequence
  Description of Artificial Sequence: Synthetic oligonucleotide
  misc_feature (20)..(21): nn= is a deoxythymidine dinucleotide
ugggaucgcccaauaaaccnn

SEQ ID NO: 1438 - RNA, 21 nt, Artificial Sequence
  Description of Artificial Sequence: Synthetic oligonucleotide
  misc_feature (20)..(21): nn= is a deoxythymidine dinucleotide
gggaucgcccaauaaacacnn

SEQ ID NO: 1439 - RNA, 21 nt, Artificial Sequence
  Description of Artificial Sequence: Synthetic oligonucleotide
  misc_feature (20)..(21): nn= is a deoxythymidine dinucleotide
aucgcccaauaaacauuccnn

SEQ ID NO: 1440 - RNA, 21 nt, Artificial Sequence
  Description of Artificial Sequence: Synthetic oligonucleotide
  misc_feature (20)..(21): nn= is a deoxythymidine dinucleotide
ccaauaaacauucccuugcnn

SEQ ID NO: 1441 - RNA, 21 nt, Artificial Sequence
  Description of Artificial Sequence: Synthetic oligonucleotide
  misc_feature (20)..(21): nn= is a deoxythymidine dinucleotide
caauaaacauucccuuggcnn

SEQ ID NO: 1442 - RNA, 21 nt, Artificial Sequence
  Description of Artificial Sequence: Synthetic oligonucleotide
  misc_feature (20)..(21): nn= is a deoxythymidine dinucleotide
aauaaacauucccuuggacnn

SEQ ID NO: 1443 - RNA, 21 nt, Artificial Sequence
  Description of Artificial Sequence: Synthetic oligonucleotide
  misc_feature (20)..(21): nn= is a deoxythymidine dinucleotide
auaaacauucccuuggaucnn

SEQ ID NO: 1444 - RNA, 21 nt, Artificial Sequence
  Description of Artificial Sequence: Synthetic oligonucleotide
  misc_feature (20)..(21): nn= is a deoxythymidine dinucleotide
uaaacauucccuuggaugcnn

SEQ ID NO: 1445 - RNA, 21 nt, Artificial Sequence
  Description of Artificial Sequence: Synthetic oligonucleotide
  misc_feature (20)..(21): nn= is a deoxythymidine dinucleotide
aaacauucccuuggaugucnn

SEQ ID NO: 1446 - RNA, 21 nt, Artificial Sequence
  Description of Artificial Sequence: Synthetic oligonucleotide
  misc_feature (20)..(21): nn= is a deoxythymidine dinucleotide
aacauucccuuggauguacnn

SEQ ID NO: 1447 - RNA, 21 nt, Artificial Sequence
  Description of Artificial Sequence: Synthetic oligonucleotide
  misc_feature (20)..(21): nn= is a deoxythymidine dinucleotide
auucccuuggauguaguccnn

SEQ ID NO: 1448 - RNA, 21 nt, Artificial Sequence
  Description of Artificial Sequence: Synthetic oligonucleotide
  misc_feature (20)..(21): nn= is a deoxythymidine dinucleotide
cuuggauguagucugaggcnn

SEQ ID NO: 1449 - RNA, 21 nt, Artificial Sequence
  Description of Artificial Sequence: Synthetic oligonucleotide
  misc_feature (20)..(21): nn= is a deoxythymidine dinucleotide
cugaggccccuuaacucacnn

SEQ ID NO: 1450 - RNA, 21 nt, Artificial Sequence
  Description of Artificial Sequence: Synthetic oligonucleotide
  misc_feature (20)..(21): nn= is a deoxythymidine dinucleotide
gaggccccuuaacucauccnn

SEQ ID NO: 1451 - RNA, 21 nt, Artificial Sequence
  Description of Artificial Sequence: Synthetic oligonucleotide
  misc_feature (20)..(21): nn= is a deoxythymidine dinucleotide
aggccccuuaacucaucucnn

SEQ ID NO: 1452 - RNA, 21 nt, Artificial Sequence
  Description of Artificial Sequence: Synthetic oligonucleotide
  misc_feature (20)..(21): nn= is a deoxythymidine dinucleotide
ccccuuaacucaucuguucnn

SEQ ID NO: 1453 - RNA, 21 nt, Artificial Sequence
  Description of Artificial Sequence: Synthetic oligonucleotide
  misc_feature (20)..(21): nn= is a deoxythymidine dinucleotide
cccuuaacucaucuguuacnn

SEQ ID NO: 1454 - RNA, 21 nt, Artificial Sequence
  Description of Artificial Sequence: Synthetic oligonucleotide
  misc_feature (20)..(21): nn= is a deoxythymidine dinucleotide
ccuuaacucaucuguuaucnn

SEQ ID NO: 1455 - RNA, 21 nt, Artificial Sequence
  Description of Artificial Sequence: Synthetic oligonucleotide
  misc_feature (20)..(21): nn= is a deoxythymidine dinucleotide
cuuaacucaucuguuauccnn

SEQ ID NO: 1456 - RNA, 21 nt, Artificial Sequence
  Description of Artificial Sequence: Synthetic oligonucleotide
  misc_feature (20)..(21): nn= is a deoxythymidine dinucleotide
uuaacucaucuguuaucccnn

SEQ ID NO: 1457 - RNA, 21 nt, Artificial Sequence
  Description of Artificial Sequence: Synthetic oligonucleotide
  misc_feature (20)..(21): nn= is a deoxythymidine dinucleotide
uaacucaucuguuauccucnn

SEQ ID NO: 1458 - RNA, 21 nt, Artificial Sequence
  Description of Artificial Sequence: Synthetic oligonucleotide
  misc_feature (20)..(21): nn= is a deoxythymidine dinucleotide
aacucaucuguuauccugcnn

SEQ ID NO: 1459 - RNA, 21 nt, Artificial Sequence
  Description of Artificial Sequence: Synthetic oligonucleotide
  misc_feature (20)..(21): nn= is a deoxythymidine dinucleotide
guuauccugcuagcuguacnn

SEQ ID NO: 1460 - RNA, 21 nt, Artificial Sequence
  Description of Artificial Sequence: Synthetic oligonucleotide
  misc_feature (20)..(21): nn= is a deoxythymidine dinucleotide
cugcuagcuguagaaaugcnn

SEQ ID NO: 1461 - RNA, 21 nt, Artificial Sequence
  Description of Artificial Sequence: Synthetic oligonucleotide
  misc_feature (20)..(21): nn= is a deoxythymidine dinucleotide
ugcuagcuguagaaaugucnn

SEQ ID NO: 1462 - RNA, 21 nt, Artificial Sequence
  Description of Artificial Sequence: Synthetic oligonucleotide
  misc_feature (20)..(21): nn= is a deoxythymidine dinucleotide
gcuguagaaauguauccucnn

SEQ ID NO: 1463 - RNA, 21 nt, Artificial Sequence
  Description of Artificial Sequence: Synthetic oligonucleotide
  misc_feature (20)..(21): nn= is a deoxythymidine dinucleotide
cuguagaaauguauccugcnn

SEQ ID NO: 1464 - RNA, 21 nt, Artificial Sequence
  Description of Artificial Sequence: Synthetic oligonucleotide
  misc_feature (20)..(21): nn= is a deoxythymidine dinucleotide
uguagaaauguauccugacnn

SEQ ID NO: 1465 - RNA, 21 nt, Artificial Sequence
  Description of Artificial Sequence: Synthetic oligonucleotide
  misc_feature (20)..(21): nn= is a deoxythymidine dinucleotide
guagaaauguauccugaucnn

SEQ ID NO: 1466 - RNA, 21 nt, Artificial Sequence
  Description of Artificial Sequence: Synthetic oligonucleotide
  misc_feature (20)..(21): nn= is a deoxythymidine dinucleotide
aaauguauccugauaaaccnn

SEQ ID NO: 1467 - RNA, 21 nt, Artificial Sequence
  Description of Artificial Sequence: Synthetic oligonucleotide
  misc_feature (20)..(21): nn= is a deoxythymidine dinucleotide
guauccugauaaacauuacnn

SEQ ID NO: 1468 - RNA, 21 nt, Artificial Sequence
  Description of Artificial Sequence: Synthetic oligonucleotide
  misc_feature (20)..(21): nn= is a deoxythymidine dinucleotide
uuaaacacuguaaucuuacnn

SEQ ID NO: 1469 - RNA, 21 nt, Artificial Sequence
  Description of Artificial Sequence: Synthetic oligonucleotide
  misc_feature (20)..(21): nn= is a deoxythymidine dinucleotide
acuguaaucuuaaaagugcnn

SEQ ID NO: 1470 - RNA, 21 nt, Artificial Sequence
  Description of Artificial Sequence: Synthetic oligonucleotide
  misc_feature (20)..(21): nn= is a deoxythymidine dinucleotide
cuguaaucuuaaaagugucnn

SEQ ID NO: 1471 - RNA, 21 nt, Artificial Sequence
  Description of Artificial Sequence: Synthetic oligonucleotide
  misc_feature (20)..(21): nn= is a deoxythymidine dinucleotide
uguaaucuuaaaaguguacnn

SEQ ID NO: 1472 - RNA, 21 nt, Artificial Sequence
  Description of Artificial Sequence: Synthetic oligonucleotide
  misc_feature (20)..(21): nn= is a deoxythymidine dinucleotide
guaaucuuaaaaguguaacnn

SEQ ID NO: 1473 - RNA, 21 nt, Artificial Sequence
  Description of Artificial Sequence: Synthetic oligonucleotide
  misc_feature (20)..(21): nn= is a deoxythymidine dinucleotide
cuuaaaaguguaauugugcnn

SEQ ID NO: 1474 - RNA, 21 nt, Artificial Sequence
  Description of Artificial Sequence: Synthetic oligonucleotide
  misc_feature (20)..(21): nn= is a deoxythymidine dinucleotide
uaccuguagugagaaacucnn

SEQ ID NO: 1475 - RNA, 21 nt, Artificial Sequence
  Description of Artificial Sequence: Synthetic oligonucleotide
  misc_feature (20)..(21): nn= is a deoxythymidine dinucleotide
uuaugaucacuuggaagacnn

SEQ ID NO: 1476 - RNA, 21 nt, Artificial Sequence
  Description of Artificial Sequence: Synthetic oligonucleotide
  misc_feature (20)..(21): nn= is a deoxythymidine dinucleotide
augaucacuuggaagauucnn

SEQ ID NO: 1477 - RNA, 21 nt, Artificial Sequence
  Description of Artificial Sequence: Synthetic oligonucleotide
  misc_feature (20)..(21): nn= is a deoxythymidine dinucleotide
aucacuuggaagauuugucnn

SEQ ID NO: 1478 - RNA, 21 nt, Artificial Sequence
  Description of Artificial Sequence: Synthetic oligonucleotide
  misc_feature (20)..(21): nn= is a deoxythymidine dinucleotide
uggaagauuuguauaguucnn

SEQ ID NO: 1479 - RNA, 21 nt, Artificial Sequence
  Description of Artificial Sequence: Synthetic oligonucleotide
  misc_feature (20)..(21): nn= is a deoxythymidine dinucleotide
uauaaaacucaguuaaaacnn

SEQ ID NO: 1480 - RNA, 21 nt, Artificial Sequence
  Description of Artificial Sequence: Synthetic oligonucleotide
  misc_feature (20)..(21): nn= is a deoxythymidine dinucleotide
aaacucaguuaaaauguccnn

SEQ ID NO: 1481 - RNA, 21 nt, Artificial Sequence
  Description of Artificial Sequence: Synthetic oligonucleotide
  misc_feature (20)..(21): nn= is a deoxythymidine dinucleotide
gucuguuucaaugaccugcnn

SEQ ID NO: 1482 - RNA, 21 nt, Artificial Sequence
  Description of Artificial Sequence: Synthetic oligonucleotide
  misc_feature (20)..(21): nn= is a deoxythymidine dinucleotide
augaccuguauuuugccacnn

SEQ ID NO: 1483 - RNA, 21 nt, Artificial Sequence
  Description of Artificial Sequence: Synthetic oligonucleotide
  misc_feature (20)..(21): nn= is a deoxythymidine dinucleotide
accuguauuuugccagaccnn

SEQ ID NO: 1484 - RNA, 21 nt, Artificial Sequence
  Description of Artificial Sequence: Synthetic oligonucleotide
  misc_feature (20)..(21): nn= is a deoxythymidine dinucleotide
ccuguauuuugccagacucnn

SEQ ID NO: 1485 - RNA, 21 nt, Artificial Sequence
  Description of Artificial Sequence: Synthetic oligonucleotide
  misc_feature (20)..(21): nn= is a deoxythymidine dinucleotide
uaaaucacagauggguaucnn

SEQ ID NO: 1486 - RNA, 21 nt, Artificial Sequence
  Description of Artificial Sequence: Synthetic oligonucleotide
  misc_feature (20)..(21): nn= is a deoxythymidine dinucleotide
aucacagauggguauuaacnn

SEQ ID NO: 1487 - RNA, 21 nt, Artificial Sequence
  Description of Artificial Sequence: Synthetic oligonucleotide
  misc_feature (20)..(21): nn= is a deoxythymidine dinucleotide
ucacagauggguauuaaacnn

SEQ ID NO: 1488 - RNA, 21 nt, Artificial Sequence
  Description of Artificial Sequence: Synthetic oligonucleotide
  misc_feature (20)..(21): nn= is a deoxythymidine dinucleotide
acagauggguauuaaacucnn

SEQ ID NO: 1489 - RNA, 21 nt, Artificial Sequence
  Description of Artificial Sequence: Synthetic oligonucleotide
  misc_feature (20)..(21): nn= is a deoxythymidine dinucleotide
cagauggguauuaaacuucnn

SEQ ID NO: 1490 - RNA, 21 nt, Artificial Sequence
  Description of Artificial Sequence: Synthetic oligonucleotide
  misc_feature (20)..(21): nn= is a deoxythymidine dinucleotide
agauggguauuaaacuugcnn

SEQ ID NO: 1491 - RNA, 21 nt, Artificial Sequence
  Description of Artificial Sequence: Synthetic oligonucleotide
  misc_feature (20)..(21): nn= is a deoxythymidine dinucleotide
auggguauuaaacuuguccnn

SEQ ID NO: 1492 - RNA, 21 nt, Artificial Sequence
  Description of Artificial Sequence: Synthetic oligonucleotide
  misc_feature (20)..(21): n is a, c, g, or u
uaaacuugucagaauuuccnn

SEQ ID NO: 1493 - RNA, 21 nt, Artificial Sequence
  Description of Artificial Sequence: Synthetic oligonucleotide
  misc_feature (20)..(21): nn= is a deoxythymidine dinucleotide
ucauucaagccugugaaucnn

SEQ ID NO: 1494 - RNA, 21 nt, Artificial Sequence
  Description of Artificial Sequence: Synthetic oligonucleotide
  misc_feature (20)..(21): nn= is a deoxythymidine dinucleotide
cauucaagccugugaauacnn

SEQ ID NO: 1495 - RNA, 21 nt, Artificial Sequence
  Description of Artificial Sequence: Synthetic oligonucleotide
  misc_feature (20)..(21): nn= is a deoxythymidine dinucleotide
aauaaaaacccuguauggcnn

SEQ ID NO: 1496 - RNA, 21 nt, Artificial Sequence
  Description of Artificial Sequence: Synthetic oligonucleotide
  misc_feature (20)..(21): nn= is a deoxythymidine dinucleotide
auaaaaacccuguauggccnn

SEQ ID NO: 1497 - RNA, 21 nt, Artificial Sequence
  Description of Artificial Sequence: Synthetic oligonucleotide
  misc_feature (20)..(21): nn= is a deoxythymidine dinucleotide
aacccuguauggcacuuacnn

SEQ ID NO: 1498 - RNA, 21 nt, Artificial Sequence
  Description of Artificial Sequence: Synthetic oligonucleotide
  misc_feature (20)..(21): nn= is a deoxythymidine dinucleotide
acccuguauggcacuuaucnn

SEQ ID NO: 1499 - RNA, 21 nt, Artificial Sequence
  Description of Artificial Sequence: Synthetic oligonucleotide
  misc_feature (20)..(21): nn= is a deoxythymidine dinucleotide
gaggcuauuaaaagaauccnn

SEQ ID NO: 1500 - RNA, 21 nt, Artificial Sequence
  Description of Artificial Sequence: Synthetic oligonucleotide
  misc_feature (20)..(21): nn= is a deoxythymidine dinucleotide
aaagaauccaaauucaaacnn

SEQ ID NO: 1501 - RNA, 21 nt, Artificial Sequence
  Description of Artificial Sequence: Synthetic oligonucleotide
  misc_feature (20)..(21): nn= is a deoxythymidine dinucleotide
gaauccaaauucaaacuacnn

SEQ ID NO: 1502 - DNA, 981 bp, Homo sapiens
gtttggggccagagtgggcgaggcgcggaggtctggcctataaagtagtcgcggagacggggtgctggtttgcgtcgtagtctcctgcagcgtctggggtttccgttgcagtcctcggaaccaggacctcggcgtggcctagcgagttatggcgacgaaggccgtgtgcgtgctgaagggcgacggcccagtgcagggcatcatcaatttcgagcagaaggaaagtaatggaccagtgaaggtgtggggaagcattaaaggactgactgaaggcctgcatggattccatgttcatgagtttggagataatacagcaggctgtaccagtgcaggtcctcactttaatcctctatccagaaaacacggtgggccaaaggatgaagagaggcatgttggagacttgggcaatgtgactgctgacaaagatggtgtggccgatgtgtctattgaagattctgtgatctcactctcaggagaccattgcatcattggccgcacactggtggtccatgaaaaagcagatgacttgggcaaaggtggaaatgaagaaagtacaaagacaggaaacgctggaagtcgtttggcttgtggtgtaattgggatcgcccaataaacattcccttggatgtagtctgaggccccttaactcatctgttatcctgctagctgtagaaatgtatcctgataaacattaaacactgtaatcttaaaagtgtaattgtgtgactttttcagagttgctttaaagtacctgtagtgagaaactgatttatgatcacttggaagatttgtatagttttataaaactcagttaaaatgtctgtttcaatgacctgtattttgccagacttaaatcacagatgggtattaaacttgtcagaatttctttgtcattcaagcctgtgaataaaaaccctgtatggcacttattatgaggctattaaaagaatccaaattcaaactaaaaaaaaaaaaaaaaaa

SEQ ID NO: 1503 - DNA, 54 bp, Artificial Sequence
  Description of Artificial Sequence: Synthetic oligonucleotide
gtgctgggcggggggcggcgggccctcccgcagaacaccatgcgctccacggaa

SEQ ID NO: 1504 - DNA, 54 bp, Artificial Sequence
  Description of Artificial Sequence: Synthetic oligonucleotide
gtgctgggcggggggcggcgggccctcccgcagaacaccatgcgctcttcggaa

SEQ ID NO: 1505 - DNA, 100 bp, Artificial Sequence
  Description of Artificial Sequence: Synthetic oligonucleotide
gaagcaaagaaggggcagagggagcccgtgagctgagtgggccagggactgggagaaggagtgaggaggcagggccggcatgcctctgctgctggccaga

SEQ ID NO: 1506 - DNA, 35 bp, Artificial Sequence
  Description of Artificial Sequence: Synthetic oligonucleotide
gggccctcccgcagaacaccatgcgctccacggaa

SEQ ID NO: 1507 - DNA, 30 bp, Artificial Sequence
  Description of Artificial Sequence: Synthetic oligonucleotide
ctcccgcagaacaccatgcgctccacggaa

SEQ ID NO: 1508 - DNA, 55 bp, Artificial Sequence
  Description of Artificial Sequence: Synthetic oligonucleotide
gtgctgggcggggggcggcgggccctcccgcagaacaccatgcgctccacggaag

SEQ ID NO: 1509 - DNA, 54 bp, Artificial Sequence
  Description of Artificial Sequence: Synthetic oligonucleotide
gtgctgggcggggggcggcgggccctcccgcagaacaccatgcgctcctcggaa

SEQ ID NO: 1510 - DNA, 15 bp, Artificial Sequence
  Description of Artificial Sequence: Synthetic oligonucleotide
gtggccactgagaag

SEQ ID NO: 1511 - DNA, 10 bp, Artificial Sequence
  Description of Artificial Sequence: Synthetic oligonucleotide
tgtgacctgg

SEQ ID NO: 1512 - DNA, 10 bp, Artificial Sequence
  Description of Artificial Sequence: Synthetic oligonucleotide
tgtgatttgg

SEQ ID NO: 1513 - DNA, 18 bp, Artificial Sequence
  Description of Artificial Sequence: Synthetic oligonucleotide
gtctgcacctgtcactag

SEQ ID NO: 1514 - DNA, 10 bp, Artificial Sequence
  Description of Artificial Sequence: Synthetic oligonucleotide
gtgacccaag

SEQ ID NO: 1515 - DNA, 10 bp, Artificial Sequence
  Description of Artificial Sequence: Synthetic oligonucleotide
gtgacccaat

SEQ ID NO: 1516 - DNA, 10 bp, Artificial Sequence
  Description of Artificial Sequence: Synthetic oligonucleotide
gtgacccaac

SEQ ID NO: 1517 - DNA, 15 bp, Artificial Sequence
  Description of Artificial Sequence: Synthetic oligonucleotide
gtggccactgagaaa

SEQ ID NO: 1518 - DNA, 52 bp, Artificial Sequence
  Description of Artificial Sequence: Synthetic oligonucleotide
ctgaggagcgccttgacagcagccatgggagggccgccccctacctcagtga

SEQ ID NO: 1519 - DNA, 52 bp, Artificial Sequence
  Description of Artificial Sequence: Synthetic oligonucleotide
ctgtggagcgccttgacagcagccatgggagggccgccccctacctcagtga

SEQ ID NO: 1520 - DNA, 100 bp, Artificial Sequence
  Description of Artificial Sequence: Synthetic oligonucleotide
tggccgtgtagtgctacccagcgctggctgcctcctcagcattgcaattcctctcccatctgggcaccagtcagctaccctggtgggaatctgggtagcc

SEQ ID NO: 1521 - DNA, 35 bp, Artificial Sequence
  Description of Artificial Sequence: Synthetic oligonucleotide
ctgaggagcgccttgacagcagccatgggagggcc

SEQ ID NO: 1522 - DNA, 52 bp, Artificial Sequence
  Description of Artificial Sequence: Synthetic oligonucleotide
ctgcggagcgccttgacagcagccatgggagggccgccccctacctcagtga

SEQ ID NO: 1523 - DNA, 158 bp, Artificial Sequence
  Description of Artificial Sequence: Synthetic oligonucleotide
gtgctgggcggggggcggcgggccctcccgcagaacaccatgcgctcttcggaatccaggtttatgaactgaccctgtgacctggttcagttcataaacctggattctgaggagcgccttgacagcagccatgggagggccgccccctacctcagtga

SEQ ID NO: 1524 - DNA, 158 bp, Artificial Sequence
  Description of Artificial Sequence: Synthetic oligonucleotide
gtgctgggcggggggcggcgggccctcccgcagaacaccatgcgctcttcggaatccaggtttatgaactgagcctgtgacctggttcagttcataaacctggattctgaggagcgccttgacagcagccatgggagggccgccccctacctcagtga

SEQ ID NO: 1525 - DNA, 158 bp, Artificial Sequence
  Description of Artificial Sequence: Synthetic oligonucleotide
gtgctgggcggggggcggcgggccctcccgcagaacaccatgcgctcttcggaatccaggtttatgaactgaacctgtgatttggttcagttcataaacctggattctgaggagcgccttgacagcagccatgggagggccgccccctacctcagtga

SEQ ID NO: 1526 - DNA, 158 bp, Artificial Sequence
  Description of Artificial Sequence: Synthetic oligonucleotide
gtgctgggcggggggcggcgggccctcccgcagaacaccatgcgctcttcggaatccaggtttttgaactgaacctgtgacctggttcagttcataaacctggattctgtggagcgccttgacagcagccatgggagggccgccccctacctcagtga

SEQ ID NO: 1527 - DNA, 158 bp, Artificial Sequence
  Description of Artificial Sequence: Synthetic oligonucleotide
gtgctgggcggggggcggcgggccctcccgcagaacaccatgcgctcttcggaatccaggtttatgaactgaacctgtgacctggttcagttcataaacctggattctgtggagcgccttgacagcagccatgggagggccgccccctacctcagtga

SEQ ID NO: 1528 - DNA, 260 bp, Artificial Sequence
  Description of Artificial Sequence: Synthetic oligonucleotide
gaagcaaagaaggggcagagggagcccgtgagctgagtgggccagggactgggagaaggagtgaggaggcagggccggcatgcctctgctgctggccagatccaggtttatgaactgaaccgtctgcacctgtcactagtgtcggtaccgtctaacactttggccgtgtagtgctacccagcgctggctgcctcctcagcattgcaattcctctcccatctgggcaccagtcagctaccctggtgggaatctgggtagcc

SEQ ID NO: 1529 - DNA, 158 bp, Artificial Sequence
  Description of Artificial Sequence: Synthetic oligonucleotide
gtgctgggcggggggcggcgggccctcccgcagaacaccatgcgctcttcggaaggtttatgaactgacgttccctgtgacctggtaacgtcagttcataaaccttctgaggagcgccttgacagcagccatgggagggccgccccctacctcagtga

SEQ ID NO: 1530 - DNA, 158 bp, Artificial Sequence
  Description of Artificial Sequence: Synthetic oligonucleotide
gtgctgggcggggggcggcgggccctcccgcagaacaccatgcgctcttcggaaggtttatgaactgacgttgcctgtgacctggtaacgtcagttcataaaccttctgaggagcgccttgacagcagccatgggagggccgccccctacctcagtga

SEQ ID NO: 1531 - DNA, 158 bp, Artificial Sequence
  Description of Artificial Sequence: Synthetic oligonucleotide
gtgctgggcggggggcggcgggccctcccgcagaacaccatgcgctcttcggaaggtttatgaactgacgttacctgtgatttggtaacgtcagttcataaaccttctgaggagcgccttgacagcagccatgggagggccgccccctacctcagtga

SEQ ID NO: 1532 - DNA, 158 bp, Artificial Sequence
  Description of Artificial Sequence: Synthetic oligonucleotide
gtgctgggcggggggcggcgggccctcccgcagaacaccatgcgctcttcggaaggtttatgatctgacgttacctgtgacctggtaacgtcagttcataaaccttctgtggagcgccttgacagcagccatgggagggccgccccctacctcagtga

SEQ ID NO: 1533 - DNA, 158 bp, Artificial Sequence
  Description of Artificial Sequence: Synthetic oligonucleotide
gtgctgggcggggggcggcgggccctcccgcagaacaccatgcgctcttcggaaggtttatgaactgacgttacctgtgacctggtaacgtcagttcataaaccttctgtggagcgccttgacagcagccatgggagggccgccccctacctcagtga

SEQ ID NO: 1534 - DNA, 260 bp, Artificial Sequence
  Description of Artificial Sequence: Synthetic oligonucleotide
gaagcaaagaaggggcagagggagcccgtgagctgagtgggccagggactgggagaaggagtgaggaggcagggccggcatgcctctgctgctggccagaggtttatgaactgacgttaccgtctgcacctgtcactagtaacgtcagttcataaacctttggccgtgtagtgctacccagcgctggctgcctcctcagcattgcaattcctctcccatctgggcaccagtcagctaccctggtgggaatctgggtagcc

SEQ ID NO: 1535 - DNA, 158 bp, Artificial Sequence
  Description of Artificial Sequence: Synthetic oligonucleotide
gtgctgggcggggggcggcgggccctcccgcagaacaccatgcgctcttcggaagtttatgaactgatcttaccctgtgacctggttaacgtcagttcataaacttctgaggagcgccttgacagcagccatgggagggccgccccctacctcagtga

SEQ ID NO: 1536 - DNA, 158 bp, Artificial Sequence
  Description of Artificial Sequence: Synthetic oligonucleotide
gtgctgggcggggggcggcgggccctcccgcagaacaccatgcgctcttcggaagtttatgaactgatcttagcctgtgacctggttaacgtcagttcataaacttctgaggagcgccttgacagcagccatgggagggccgccccctacctcagtga

SEQ ID NO: 1537 - DNA, 158 bp, Artificial Sequence
  Description of Artificial Sequence: Synthetic oligonucleotide
gtgctgggcggggggcggcgggccctcccgcagaacaccatgcgctcttcggaagtttatgaactgatcttaccctgtgatttggttaacgtcagttcataaacttctgaggagcgccttgacagcagccatgggagggccgccccctacctcagtga

SEQ ID NO: 1538 - DNA, 158 bp, Artificial Sequence
  Description of Artificial Sequence: Synthetic oligonucleotide
gtgctgggcggggggcggcgggccctcccgcagaacaccatgcgctcttcggaagtttatgaagtgatcttaacctgtgacctggttaacgtcagttcataaacttctgtggagcgccttgacagcagccatgggagggccgccccctacctcagtga

SEQ ID NO: 1539 - DNA, 158 bp, Artificial Sequence
  Description of Artificial Sequence: Synthetic oligonucleotide
gtgctgggcggggggcggcgggccctcccgcagaacaccatgcgctcttcggaagtttatgaactgatcttaacctgtgacctggttaacgtcagttcataaacttctgtggagcgccttgacagcagccatgggagggccgccccctacctcagtga

SEQ ID NO: 1540 - DNA, 260 bp, Artificial Sequence
  Description of Artificial Sequence: Synthetic oligonucleotide
gaagcaaagaaggggcagagggagcccgtgagctgagtgggccagggactgggagaaggagtgaggaggcagggccggcatgcctctgctgctggccagagtttatgaactgatcttacccgtctgcacctgtcactagttaacgtcagttcataaactttggccgtgtagtgctacccagcgctggctgcctcctcagcattgcaattcctctcccatctgggcaccagtcagctaccctggtgggaatctgggtagcc

SEQ ID NO: 1541 - DNA, 158 bp, Artificial Sequence
  Description of Artificial Sequence: Synthetic oligonucleotide
gtgctgggcggggggcggcgggccctcccgcagaacaccatgcgctcttcggaagtttatgaactgatcttgccctgtgacctggttaacgtcagttcataaacttctgaggagcgccttgacagcagccatgggagggccgccccctacctcagtga

SEQ ID NO: 1542 - DNA, 158 bp, Artificial Sequence
  Description of Artificial Sequence: Synthetic oligonucleotide
gtgctgggcggggggcggcgggccctcccgcagaacaccatgcgctcttcggaagtttatgaactgatcttggcctgtgacctggttaacgtcagttcataaacttctgaggagcgccttgacagcagccatgggagggccgccccctacctcagtga

SEQ ID NO: 1543 - DNA, 158 bp, Artificial Sequence
  Description of Artificial Sequence: Synthetic oligonucleotide
gtgctgggcggggggcggcgggccctcccgcagaacaccatgcgctcttcggaagtttatgaactgatcttgccctgtgatttggttaacgtcagttcataaacttctgaggagcgccttgacagcagccatgggagggccgccccctacctcagtga

SEQ ID NO: 1544 - DNA, 158 bp, Artificial Sequence
  Description of Artificial Sequence: Synthetic oligonucleotide
gtgctgggcggggggcggcgggccctcccgcagaacaccatgcgctcttcggaagtttatgaactgatcttgacctgtgacctggttaacgtcagttcataaacttctgtggagcgccttgacagcagccatgggagggccgccccctacctcagtga

SEQ ID NO: 1545 - DNA, 260 bp, Artificial Sequence
  Description of Artificial Sequence: Synthetic oligonucleotide
gaagcaaagaaggggcagagggagcccgtgagctgagtgggccagggactgggagaaggagtgaggaggcagggccggcatgcctctgctgctggccagagtttatgaactgatcttgcccgtctgcacctgtcactagttaacgtcagttcataaactttggccgtgtagtgctacccagcgctggctgcctcctcagcattgcaattcctctcccatctgggcaccagtcagctaccctggtgggaatctgggtagcc

SEQ ID NO: 1546 - DNA, 158 bp, Artificial Sequence
  Description of Artificial Sequence: Synthetic oligonucleotide
gtgctgggcggggggcggcgggccctcccgcagaacaccatgcgctcttcggaaccacaatgttgtgactggccctgtgacctggtccggtcacaacattgtggttctgaggagcgccttgacagcagccatgggagggccgccccctacctcagtga

SEQ ID NO: 1547 - DNA, 158 bp, Artificial Sequence
  Description of Artificial Sequence: Synthetic oligonucleotide
gtgctgggcggggggcggcgggccctcccgcagaacaccatgcgctcttcggaaccacaatgttgtgactgggcctgtgacctggtccggtcacaacattgtggttctgaggagcgccttgacagcagccatgggagggccgccccctacctcagtga

SEQ ID NO: 1548 - DNA, 158 bp, Artificial Sequence
  Description of Artificial Sequence: Synthetic oligonucleotide
gtgctgggcggggggcggcgggccctcccgcagaacaccatgcgctcttcggaaccacaatgttgtgactggacctgtgatttggtccggtcacaacattgtggttctgaggagcgccttgacagcagccatgggagggccgccccctacctcagtga

SEQ ID NO: 1549 - DNA, 158 bp, Artificial Sequence
  Description of Artificial Sequence: Synthetic oligonucleotide
gtgctgggcggggggcggcgggccctcccgcagaacaccatgcgctcttcggaaccacaatgtagtgactggacctgtgacctggtccggtcacaacattgtggttctgtggagcgccttgacagcagccatgggagggccgccccctacctcagtga

SEQ ID NO: 1550 - DNA, 158 bp, Artificial Sequence
  Description of Artificial Sequence: Synthetic oligonucleotide
gtgctgggcggggggcggcgggccctcccgcagaacaccatgcgctcttcggaaccacaatgttgtgactggacctgtgacctggtccggtcacaacattgtggttctgtggagcgccttgacagcagccatgggagggccgccccctacctcagtga

SEQ ID NO: 1551 - DNA, 260 bp, Artificial Sequence
  Description of Artificial Sequence: Synthetic oligonucleotide
gaagcaaagaaggggcagagggagcccgtgagctgagtgggccagggactgggagaaggagtgaggaggcagggccggcatgcctctgctgctggccagaccacaatgttgtgactggaccgtctgcacctgtcactagtccggtcacaacattgtggtttggccgtgtagtgctacccagcgctggctgcctcctcagcattgcaattcctctcccatctgggcaccagtcagctaccctggtgggaatctgggtagcc

SEQ ID NO: 1552 - DNA, 158 bp, Artificial Sequence
  Description of Artificial Sequence: Synthetic oligonucleotide
gtgctgggcggggggcggcgggccctcccgcagaacaccatgcgctcttcggaagtgttagacggtactgatccctgtgacctggtgtcggtaccgtctaacacttctgaggagcgccttgacagcagccatgggagggccgccccctacctcagtga

SEQ ID NO: 1553 - DNA, 158 bp, Artificial Sequence
  Description of Artificial Sequence: Synthetic oligonucleotide
gtgctgggcggggggcggcgggccctcccgcagaacaccatgcgctcttcggaagtgttagacggtactgatgcctgtgacctggtgtcggtaccgtctaacacttctgaggagcgccttgacagcagccatgggagggccgccccctacctcagtga

SEQ ID NO: 1554 - DNA, 158 bp, Artificial Sequence
  Description of Artificial Sequence: Synthetic oligonucleotide
gtgctgggcggggggcggcgggccctcccgcagaacaccatgcgctcttcggaagtgttagacggtactgatccctgtgatttggtgtcggtaccgtctaacacttctgaggagcgccttgacagcagccatgggagggccgccccctacctcagtga

SEQ ID NO: 1555 - DNA, 158 bp, Artificial Sequence
  Description of Artificial Sequence: Synthetic oligonucleotide
gtgctgggcggggggcggcgggccctcccgcagaacaccatgcgctcttcggaagtgttagaccgtactgatacctgtgacctggtgtcggtaccgtctaacacttctgtggagcgccttgacagcagccatgggagggccgccccctacctcagtga

SEQ ID NO: 1556 - DNA, 158 bp, Artificial Sequence
  Description of Artificial Sequence: Synthetic oligonucleotide
gtgctgggcggggggcggcgggccctcccgcagaacaccatgcgctcttcggaagtgttagacggtactgatacctgtgacctggtgtcggtaccgtctaacacttctgtggagcgccttgacagcagccatgggagggccgccccctacctcagtga

SEQ ID NO: 1557 - DNA, 260 bp, Artificial Sequence
  Description of Artificial Sequence: Synthetic oligonucleotide
gaagcaaagaaggggcagagggagcccgtgagctgagtgggccagggactgggagaaggagtgaggaggcagggccggcatgcctctgctgctggccagagtgttagacggtactgatcccgtctgcacctgtcactagtgtcggtaccgtctaacactttggccgtgtagtgctacccagcgctggctgcctcctcagcattgcaattcctctcccatctgggcaccagtcagctaccctggtgggaatctgggtagcc

SEQ ID NO: 1558 - DNA, 158 bp, Artificial Sequence
  Description of Artificial Sequence: Synthetic oligonucleotide
gtgctgggcggggggcggcgggccctcccgcagaacaccatgcgctcttcggaaccgacaaccagtatttggccctgtgacctggtccaaatactggttgtcggttctgaggagcgccttgacagcagccatgggagggccgccccctacctcagtga

SEQ ID NO: 1559 - DNA, 158 bp, Artificial Sequence
  Description of Artificial Sequence: Synthetic oligonucleotide
gtgctgggcggggggcggcgggccctcccgcagaacaccatgcgctcttcggaaccgacaaccagtatttgggcctgtgacctggtccaaatactggttgtcggttctgaggagcgccttgacagcagccatgggagggccgccccctacctcagtga

SEQ ID NO: 1560 - DNA, 158 bp, Artificial Sequence
  Description of Artificial Sequence: Synthetic oligonucleotide
gtgctgggcggggggcggcgggccctcccgcagaacaccatgcgctcttcggaaccgacaaccagtatttggacctgtgatttggtccaaatactggttgtcggttctgaggagcgccttgacagcagccatgggagggccgccccctacctcagtga

SEQ ID NO: 1561 - DNA, 158 bp, Artificial Sequence
  Description of Artificial Sequence: Synthetic oligonucleotide
gtgctgggcggggggcggcgggccctcccgcagaacaccatgcgctcttcggaaccgacaacctgtatttggacctgtgacctggtccaaatactggttgtcggttctgtggagcgccttgacagcagccatgggagggccgccccctacctcagtga

SEQ ID NO: 1562 - DNA, 158 bp, Artificial Sequence
  Description of Artificial Sequence: Synthetic oligonucleotide
gtgctgggcggggggcggcgggccctcccgcagaacaccatgcgctcttcggaaccgacaaccagtatttggacctgtgacctggtccaaatactggttgtcggttctgtggagcgccttgacagcagccatgggagggccgccccctacctcagtga

SEQ ID NO: 1563 - DNA, 260 bp, Artificial Sequence
  Description of Artificial Sequence: Synthetic oligonucleotide
gaagcaaagaaggggcagagggagcccgtgagctgagtgggccagggactgggagaaggagtgaggaggcagggccggcatgcctctgctgctggccagaccgacaaccagtatttggaccgtctgcacctgtcactagtccaaatactggttgtcggtttggccgtgtagtgctacccagcgctggctgcctcctcagcattgcaattcctctcccatctgggcaccagtcagctaccctggtgggaatctgggtagcc

SEQ ID NO: 1564 - DNA, 158 bp, Artificial Sequence
  Description of Artificial Sequence: Synthetic oligonucleotide
gtgctgggcggggggcggcgggccctcccgcagaacaccatgcgctcttcggaagtcacaaagaaccgtgtaccctgtgacctggttgcacggttctttgtgacttctgaggagcgccttgacagcagccatgggagggccgccccctacctcagtga

SEQ ID NO: 1565 - DNA, 158 bp, Artificial Sequence
  Description of Artificial Sequence: Synthetic oligonucleotide
gtgctgggcggggggcggcgggccctcccgcagaacaccatgcgctcttcggaagtcacaaagaaccgtgtagcctgtgacctggttgcacggttctttgtgacttctgaggagcgccttgacagcagccatgggagggccgccccctacctcagtga

SEQ ID NO: 1566 - DNA, 158 bp, Artificial Sequence
  Description of Artificial Sequence: Synthetic oligonucleotide
gtgctgggcggggggcggcgggccctcccgcagaacaccatgcgctcttcggaagtcacaaagaaccgtgtaacctgtgatttggttgcacggttctttgtgacttctgaggagcgccttgacagcagccatgggagggccgccccctacctcagtga

SEQ ID NO: 1567 - DNA, 158 bp, Artificial Sequence
  Description of Artificial Sequence: Synthetic oligonucleotide
gtgctgggcggggggcggcgggccctcccgcagaacaccatgcgctcttcggaagtcacaaagtaccgtgtaacctgtgacctggttgcacggttctttgtgacttctgtggagcgccttgacagcagccatgggagggccgccccctacctcagtga

SEQ ID NO: 1568 - DNA, 158 bp, Artificial Sequence
  Description of Artificial Sequence: Synthetic oligonucleotide
gtgctgggcggggggcggcgggccctcccgcagaacaccatgcgctcttcggaagtcacaaagaaccgtgtaacctgtgacctggttgcacggttctttgtgacttctgtggagcgccttgacagcagccatgggagggccgccccctacctcagtga

SEQ ID NO: 1569 - DNA, 260 bp, Artificial Sequence
  Description of Artificial Sequence: Synthetic oligonucleotide
gaagcaaagaaggggcagagggagcccgtgagctgagtgggccagggactgggagaaggagtgaggaggcagggccggcatgcctctgctgctggccagagtcacaaagaaccgtgtaaccgtctgcacctgtcactagttgcacggttctttgtgactttggccgtgtagtgctacccagcgctggctgcctcctcagcattgcaattcctctcccatctgggcaccagtcagctaccctggtgggaatctgggtagcc

SEQ ID NO: 1570 - DNA, 158 bp, Artificial Sequence
  Description of Artificial Sequence: Synthetic oligonucleotide
gtgctgggcggggggcggcgggccctcccgcagaacaccatgcgctcttcggaatgaacctcttgttataaaccctgtgacctggttttataacaagaggttcattctgaggagcgccttgacagcagccatgggagggccgccccctacctcagtga

SEQ ID NO: 1571 - DNA, 158 bp, Artificial Sequence
  Description of Artificial Sequence: Synthetic oligonucleotide
gtgctgggcggggggcggcgggccctcccgcagaacaccatgcgctcttcggaatgaacctcttgttataaagcctgtgacctggttttataacaagaggttcattctgaggagcgccttgacagcagccatgggagggccgccccctacctcagtga

SEQ ID NO: 1572 - DNA, 158 bp, Artificial Sequence
  Description of Artificial Sequence: Synthetic oligonucleotide
gtgctgggcggggggcggcgggccctcccgcagaacaccatgcgctcttcggaatgaacctcttgttataaaacctgtgatttggttttataacaagaggttcattctgaggagcgccttgacagcagccatgggagggccgccccctacctcagtga

SEQ ID NO: 1573 - DNA, 158 bp, Artificial Sequence
  Description of Artificial Sequence: Synthetic oligonucleotide
gtgctgggcggggggcggcgggccctcccgcagaacaccatgcgctcttcggaatgaacctctagttataaaacctgtgacctggttttataacaagaggttcattctgtggagcgccttgacagcagccatgggagggccgccccctacctcagtga

SEQ ID NO: 1574 - DNA, 158 bp, Artificial Sequence
  Description of Artificial Sequence: Synthetic oligonucleotide
gtgctgggcggggggcggcgggccctcccgcagaacaccatgcgctcttcggaatgaacctcttgttataaaacctgtgacctggttttataacaagaggttcattctgtggagcgccttgacagcagccatgggagggccgccccctacctcagtga

SEQ ID NO: 1575 - DNA, 260 bp, Artificial Sequence
  Description of Artificial Sequence: Synthetic oligonucleotide
gaagcaaagaaggggcagagggagcccgtgagctgagtgggccagggactgggagaaggagtgaggaggcagggccggcatgcctctgctgctggccagatgaacctcttgttataaaaccgtctgcacctgtcactagttttataacaagaggttcatttggccgtgtagtgctacccagcgctggctgcctcctcagcattgcaattcctctcccatctgggcaccagtcagctaccctggtgggaatctgggtagcc

SEQ ID NO: 1576 - DNA, 158 bp, Artificial Sequence
  Description of Artificial Sequence: Synthetic oligonucleotide
gtgctgggcggggggcggcgggccctcccgcagaacaccatgcgctcttcggaagatcattggaattcctaatcctgtgacctggtttaggaattccaatgatcttctgaggagcgccttgacagcagccatgggagggccgccccctacctcagtga

SEQ ID NO: 1577 - DNA, 158 bp, Artificial Sequence
  Description of Artificial Sequence: Synthetic oligonucleotide
gtgctgggcggggggcggcgggccctcccgcagaacaccatgcgctcttcggaagatcattggaattcctaagcctgtgacctggtttaggaattccaatgatcttctgaggagcgccttgacagcagccatgggagggccgccccctacctcagtga

SEQ ID NO: 1578 - DNA, 158 bp, Artificial Sequence
  Description of Artificial Sequence: Synthetic oligonucleotide
gtgctgggcggggggcggcgggccctcccgcagaacaccatgcgctcttcggaagatcattggaattcctaaacctgtgatttggtttaggaattccaatgatcttctgaggagcgccttgacagcagccatgggagggccgccccctacctcagtga

SEQ ID NO: 1579 - DNA, 158 bp, Artificial Sequence
  Description of Artificial Sequence: Synthetic oligonucleotide
gtgctgggcggggggcggcgggccctcccgcagaacaccatgcgctcttcggaagatcattggtattcctaaacctgtgacctggtttaggaattccaatgatcttctgtggagcgccttgacagcagccatgggagggccgccccctacctcagtga

SEQ ID NO: 1580 - DNA, 158 bp, Artificial Sequence
  Description of Artificial Sequence: Synthetic oligonucleotide
gtgctgggcggggggcggcgggccctcccgcagaacaccatgcgctcttcggaagatcattggaattcctaaacctgtgacctggtttaggaattccaatgatcttctgtggagcgccttgacagcagccatgggagggccgccccctacctcagtga

SEQ ID NO: 1581 - DNA, 260 bp, Artificial Sequence
  Description of Artificial Sequence: Synthetic oligonucleotide
gaagcaaagaaggggcagagggagcccgtgagctgagtgggccagggactgggagaaggagtgaggaggcagggccggcatgcctctgctgctggccagagatcattggaattcctaaaccgtctgcacctgtcactagtttaggaattccaatgatctttggccgtgtagtgctacccagcgctggctgcctcctcagcattgcaattcctctcccatctgggcaccagtcagctaccctggtgggaatctgggtagcc

SEQ ID NO: 1582 - DNA, 158 bp, Artificial Sequence
  Description of Artificial Sequence: Synthetic oligonucleotide
gtgctgggcggggggcggcgggccctcccgcagaacaccatgcgctcttcggaacattggaattcctaaaattcctgtgacctggtattttaggaattccaatgttctgaggagcgccttgacagcagccatgggagggccgccccctacctcagtga

SEQ ID NO: 1583 - DNA, 158 bp, Artificial Sequence
  Description of Artificial Sequence: Synthetic oligonucleotide
gtgctgggcggggggcggcgggccctcccgcagaacaccatgcgctcttcggaacattggaattcctaaaatgcctgtgacctggtattttaggaattccaatgttctgaggagcgccttgacagcagccatgggagggccgccccctacctcagtga

SEQ ID NO: 1584 - DNA, 158 bp, Artificial Sequence
  Description of Artificial Sequence: Synthetic oligonucleotide
gtgctgggcggggggcggcgggccctcccgcagaacaccatgcgctcttcggaacattggaattcctaaaatacctgtgatttggtattttaggaattccaatgttctgaggagcgccttgacagcagccatgggagggccgccccctacctcagtga

SEQ ID NO: 1585 - DNA, 158 bp, Artificial Sequence
  Description of Artificial Sequence: Synthetic oligonucleotide
gtgctgggcggggggcggcgggccctcccgcagaacaccatgcgctcttcggaacattggaatacctaaaatacctgtgacctggtattttaggaattccaatgttctgtggagcgccttgacagcagccatgggagggccgccccctacctcagtga

SEQ ID NO: 1586 - DNA, 158 bp, Artificial Sequence
  Description of Artificial Sequence: Synthetic oligonucleotide
gtgctgggcggggggcggcgggccctcccgcagaacaccatgcgctcttcggaacattggaattcctaaaatacctgtgacctggtattttaggaattccaatgttctgtggagcgccttgacagcagccatgggagggccgccccctacctcagtga

SEQ ID NO: 1587 - DNA, 260 bp, Artificial Sequence
  Description of Artificial Sequence: Synthetic oligonucleotide
gaagcaaagaaggggcagagggagcccgtgagctgagtgggccagggactgggagaaggagtgaggaggcagggccggcatgcctctgctgctggccagacattggaattcctaaaataccgtctgcacctgtcactagtattttaggaattccaatgtttggccgtgtagtgctacccagcgctggctgcctcctcagcattgcaattcctctcccatctgggcaccagtcagctaccctggtgggaatctgggtagcc

SEQ ID NO: 1588 - DNA, 158 bp, Artificial Sequence
  Description of Artificial Sequence: Synthetic oligonucleotide
gtgctgggcggggggcggcgggccctcccgcagaacaccatgcgctcttcggaagcaattcagtctcgttgtccctgtgacctggtacaacgagactgaattgcttctgaggagcgccttgacagcagccatgggagggccgccccctacctcagtga

SEQ ID NO: 1589 - DNA, 158 bp, Artificial Sequence
  Description of Artificial Sequence: Synthetic oligonucleotide
gtgctgggcggggggcggcgggccctcccgcagaacaccatgcgctcttcggaagcaattcagtctcgttgtgcctgtgacctggtacaacgagactgaattgcttctgaggagcgccttgacagcagccatgggagggccgccccctacctcagtga

SEQ ID NO: 1590 - DNA, 158 bp, Artificial Sequence
  Description of Artificial Sequence: Synthetic oligonucleotide
gtgctgggcggggggcggcgggccctcccgcagaacaccatgcgctcttcggaagcaattcagtctcgttgtacctgtgatttggtacaacgagactgaattgcttctgaggagcgccttgacagcagccatgggagggccgccccctacctcagtga

SEQ ID NO: 1591 - DNA, 158 bp, Artificial Sequence
  Description of Artificial Sequence: Synthetic oligonucleotide
gtgctgggcggggggcggcgggccctcccgcagaacaccatgcgctcttcggaagcaattcagactcgttgtacctgtgacctggtacaacgagactgaattgcttctgtggagcgccttgacagcagccatgggagggccgccccctacctcagtga

SEQ ID NO: 1592 - DNA, 158 bp, Artificial Sequence
  Description of Artificial Sequence: Synthetic oligonucleotide
gtgctgggcggggggcggcgggccctcccgcagaacaccatgcgctcttcggaagcaattcagtctcgttgtacctgtgacctggtacaacgagactgaattgcttctgtggagcgccttgacagcagccatgggagggccgccccctacctcagtga

SEQ ID NO: 1593 - DNA, 260 bp, Artificial Sequence
  Description of Artificial Sequence: Synthetic oligonucleotide
gaagcaaagaaggggcagagggagcccgtgagctgagtgggccagggactgggagaaggagtgaggaggcagggccggcatgcctctgctgctggccagagcaattcagtctcgttgtaccgtctgcacctgtcactagtacaacgagactgaattgctttggccgtgtagtgctacccagcgctggctgcctcctcagcattgcaattcctctcccatctgggcaccagtcagctaccctggtgggaatctgggtagcc

SEQ ID NO: 1594 - DNA, 158 bp, Artificial Sequence
  Description of Artificial Sequence: Synthetic oligonucleotide
gtgctgggcggggggcggcgggccctcccgcagaacaccatgcgctcttcggaacctgctagctccatgcttccctgtgacctggtaagcatggagctagcaggttctgaggagcgccttgacagcagccatgggagggccgccccctacctcagtga

SEQ ID NO: 1595 - DNA, 158 bp, Artificial Sequence
  Description of Artificial Sequence: Synthetic oligonucleotide
gtgctgggcggggggcggcgggccctcccgcagaacaccatgcgctcttcggaacctgctagctccatgcttgcctgtgacctggtaagcatggagctagcaggttctgaggagcgccttgacagcagccatgggagggccgccccctacctcagtga

SEQ ID NO: 1596 - DNA, 158 bp, Artificial Sequence
  Description of Artificial Sequence: Synthetic oligonucleotide
gtgctgggcggggggcggcgggccctcccgcagaacaccatgcgctcttcggaacctgctagctccatgcttccctgtgatttggtaagcatggagctagcaggttctgaggagcgccttgacagcagccatgggagggccgccccctacctcagtga

SEQ ID NO: 1597 - DNA, 158 bp, Artificial Sequence
  Description of Artificial Sequence: Synthetic oligonucleotide
gtgctgggcggggggcggcgggccctcccgcagaacaccatgcgctcttcggaacctgctagcaccatgcttacctgtgacctggtaagcatggagctagcaggttctgtggagcgccttgacagcagccatgggagggccgccccctacctcagtga

SEQ ID NO: 1598 - DNA, 158 bp, Artificial Sequence
  Description of Artificial Sequence: Synthetic oligonucleotide
gtgctgggcggggggcggcgggccctcccgcagaacaccatgcgctcttcggaacctgctagctccatgcttacctgtgacctggtaagcatggagctagcaggttctgtggagcgccttgacagcagccatgggagggccgccccctacctcagtga

SEQ ID NO: 1599 - DNA, 260 bp, Artificial Sequence
  Description of Artificial Sequence: Synthetic oligonucleotide
gaagcaaagaaggggcagagggagcccgtgagctgagtgggccagggactgggagaaggagtgaggaggcagggccggcatgcctctgctgctggccagacctgctagctccatgcttcccgtctgcacctgtcactagtaagcatggagctagcaggtttggccgtgtagtgctacccagcgctggctgcctcctcagcattgcaattcctctcccatctgggcaccagtcagctaccctggtgggaatctgggtagcc

SEQ ID NO: 1600 - DNA, 158 bp, Artificial Sequence
  Description of Artificial Sequence: Synthetic oligonucleotide
gtgctgggcggggggcggcgggccctcccgcagaacaccatgcgctcttcggaacctgctagctccatgcttgctgtgacccaagtaagcatggagctagcaggttctgaggagcgccttgacagcagccatgggagggccgccccctacctcagtga

SEQ ID NO: 1601 - DNA, 158 bp, Artificial Sequence
  Description of Artificial Sequence: Synthetic oligonucleotide
gtgctgggcggggggcggcgggccctcccgcagaacaccatgcgctccacggaacctgctagctccatgcttgctgtgacccaagtaagcatggagctagcaggttctgaggagcgccttgacagcagccatgggagggccgccccctacctcagtga

SEQ ID NO: 1602 - DNA, 163 bp, Artificial Sequence
  Description of Artificial Sequence: Synthetic oligonucleotide
gtgctgggcggggggcggcgggccctcccgcagaacaccatgcgctccacggaacctgctagctccatgcttgctgtggccactgagaagtaagcatggagctagcaggttctgaggagcgccttgacagcagccatgggagggccgccccctacctcagtga

SEQ ID NO: 1603 - DNA, 122 bp, Artificial Sequence
  Description of Artificial Sequence: Synthetic oligonucleotide
gggccctcccgcagaacaccatgcgctccacggaacctgctagctccatgcttgctgtgacccaagtaagcatggagctagcaggttctgaggagcgccttgacagcagccatgggagggcc

SEQ ID NO: 1604 - DNA, 117 bp, Artificial Sequence
  Description of Artificial Sequence: Synthetic oligonucleotide
ctcccgcagaacaccatgcgctccacggaacctgctagctccatgcttgctgtgacccaagtaagcatggagctagcaggttctgaggagcgccttgacagcagccatgggagggcc

SEQ ID NO: 1605 - DNA, 160 bp, Artificial Sequence
  Description of Artificial Sequence: Synthetic oligonucleotide
gtgctgggcggggggcggcgggccctcccgcagaacaccatgcgctccacggaagcctgctagctccatgcttgctgtgacccaagtaagcatggagctagcaggcttctgaggagcgccttgacagcagccatgggagggccgccccctacctcagtga

SEQ ID NO: 1606 - DNA, 158 bp, Artificial Sequence
  Description of Artificial Sequence: Synthetic oligonucleotide
gtgctgggcggggggcggcgggccctcccgcagaacaccatgcgctccacggaacctgctagctccatgcttgatgtgacccaattaagcatggagctagcaggttctgaggagcgccttgacagcagccatgggagggccgccccctacctcagtga

SEQ ID NO: 1607 - DNA, 158 bp, Artificial Sequence
  Description of Artificial Sequence: Synthetic oligonucleotide
gtgctgggcggggggcggcgggccctcccgcagaacaccatgcgctcctcggaacctgctagctccatgcttgctgtgacccaagtaagcatggagctagcaggttctgcggagcgccttgacagcagccatgggagggccgccccctacctcagtga

SEQ ID NO: 1608 - DNA, 158 bp, Artificial Sequence; identical to SEQ ID NO: 1582
  Description of Artificial Sequence: Synthetic oligonucleotide

SEQ ID NO: 1609 - DNA, 158 bp, Artificial Sequence; identical to SEQ ID NO: 1576
  Description of Artificial Sequence: Synthetic oligonucleotide

SEQ ID NO: 1610 - DNA, 158 bp, Artificial Sequence; identical to SEQ ID NO: 1583
  Description of Artificial Sequence: Synthetic oligonucleotide

SEQ ID NO: 1611 - DNA, 158 bp, Artificial Sequence; identical to SEQ ID NO: 1577
  Description of Artificial Sequence: Synthetic oligonucleotide

SEQ ID NO: 1612 - DNA, 158 bp, Artificial Sequence; identical to SEQ ID NO: 1584
  Description of Artificial Sequence: Synthetic oligonucleotide

SEQ ID NO: 1613 - DNA, 158 bp, Artificial Sequence; identical to SEQ ID NO: 1578
  Description of Artificial Sequence: Synthetic oligonucleotide

SEQ ID NO: 1614 - DNA, 158 bp, Artificial Sequence; identical to SEQ ID NO: 1585
  Description of Artificial Sequence: Synthetic oligonucleotide

SEQ ID NO: 1615 - DNA, 158 bp, Artificial Sequence; identical to SEQ ID NO: 1579
  Description of Artificial Sequence: Synthetic oligonucleotide

SEQ ID NO: 1616 - DNA, 158 bp, Artificial Sequence; identical to SEQ ID NO: 1586
  Description of Artificial Sequence: Synthetic oligonucleotide

SEQ ID NO: 1617 - DNA, 158 bp, Artificial Sequence; identical to SEQ ID NO: 1580
  Description of Artificial Sequence: Synthetic oligonucleotide

SEQ ID NO: 1618 - DNA, 260 bp, Artificial Sequence; identical to SEQ ID NO: 1587
  Description of Artificial Sequence: Synthetic oligonucleotide

SEQ ID NO: 1619 - DNA, 260 bp, Artificial Sequence; identical to SEQ ID NO: 1581
  Description of Artificial Sequence: Synthetic oligonucleotide

SEQ ID NO: 1620 - DNA, 21 bp, Artificial Sequence
  Description of Artificial Sequence: Synthetic oligonucleotide
gtttatgaactgatcttaccc

SEQ ID NO: 1621 - DNA, 21 bp, Artificial Sequence
  Description of Artificial Sequence: Synthetic oligonucleotide
gtgttagacggtactgatccc

SEQ ID NO: 1622 - DNA, 21 bp, Artificial Sequence
  Description of Artificial Sequence: Synthetic oligonucleotide
cctgctagctccatgcttccc

SEQ ID NO: 1623 - DNA, 21 bp, Artificial Sequence
  Description of Artificial Sequence: Synthetic oligonucleotide
gtttatgaactgatcttagcc

SEQ ID NO: 1624 - DNA, 21 bp, Artificial Sequence
  Description of Artificial Sequence: Synthetic oligonucleotide
gtgttagacggtactgatgcc

SEQ ID NO: 1625 - DNA, 21 bp, Artificial Sequence
  Description of Artificial Sequence: Synthetic oligonucleotide
cctgctagctccatgcttgcc

SEQ ID NO: 1626 - DNA, 21 bp, Artificial Sequence
  Description of Artificial Sequence: Synthetic oligonucleotide
gtttatgaagtgatcttaacc

SEQ ID NO: 1627 - DNA, 21 bp, Artificial Sequence
  Description of Artificial Sequence: Synthetic oligonucleotide
gtgttagaccgtactgatacc

SEQ ID NO: 1628 - DNA, 21 bp, Artificial Sequence
  Description of Artificial Sequence: Synthetic oligonucleotide
cctgctagcaccatgcttacc

SEQ ID NO: 1629 - DNA, 21 bp, Artificial Sequence
  Description of Artificial Sequence: Synthetic oligonucleotide
gtttatgaactgatcttaacc

SEQ ID NO: 1630 - DNA, 21 bp, Artificial Sequence
  Description of Artificial Sequence: Synthetic oligonucleotide
gtgttagacggtactgatacc

SEQ ID NO: 1631 - DNA, 21 bp, Artificial Sequence
  Description of Artificial Sequence: Synthetic oligonucleotide
cctgctagctccatgcttacc

SEQ ID NO: 1632 - DNA, 21 bp, Artificial Sequence
  Description of Artificial Sequence: Synthetic oligonucleotide
gtttatgaactgatcttgccc

SEQ ID NO: 1633 - DNA, 21 bp, Artificial Sequence
  Description of Artificial Sequence: Synthetic oligonucleotide
gtttatgaactgatcttggcc

SEQ ID NO: 1634 - DNA, 21 bp, Artificial Sequence
  Description of Artificial Sequence: Synthetic oligonucleotide
gtttatgaactgatcttgacc

SEQ ID NO: 1635 - DNA, 21 bp, Artificial Sequence
  Description of Artificial Sequence: Synthetic oligonucleotide
gcaattcagtctcgttgtccc

SEQ ID NO: 1636 - DNA, 21 bp, Artificial Sequence
  Description of Artificial Sequence: Synthetic oligonucleotide
tccaggtttatgaactgaccc

SEQ ID NO: 1637 - DNA, 21 bp, Artificial Sequence
  Description of Artificial Sequence: Synthetic oligonucleotide
ggtttatgaactgacgttccc

SEQ ID NO: 1638 - DNA, 21 bp, Artificial Sequence
  Description of Artificial Sequence: Synthetic oligonucleotide
ccacaatgttgtgactggccc

SEQ ID NO: 1639 - DNA, 21 bp, Artificial Sequence
  Description of Artificial Sequence: Synthetic oligonucleotide
gtcacaaagaaccgtgtaccc

SEQ ID NO: 1640 - DNA, 21 bp, Artificial Sequence
  Description of Artificial Sequence: Synthetic oligonucleotide
tgaacctcttgttataaaccc

SEQ ID NO: 1641 - DNA, 21 bp, Artificial Sequence
  Description of Artificial Sequence: Synthetic oligonucleotide
ccgacaaccagtatttggccc

SEQ ID NO: 1642 - DNA, 21 bp, Artificial Sequence
  Description of Artificial Sequence: Synthetic oligonucleotide
gcaattcagtctcgttgtgcc

SEQ ID NO: 1643 - DNA, 21 bp, Artificial Sequence
  Description of Artificial Sequence: Synthetic oligonucleotide
tccaggtttatgaactgagcc

SEQ ID NO: 1644 - DNA, 21 bp, Artificial Sequence
  Description of Artificial Sequence: Synthetic oligonucleotide
ggtttatgaactgacgttgcc

SEQ ID NO: 1645 - DNA, 21 bp, Artificial Sequence
  Description of Artificial Sequence: Synthetic oligonucleotide
ccacaatgttgtgactgggcc

SEQ ID NO: 1646 - DNA, 21 bp, Artificial Sequence
  Description of Artificial Sequence: Synthetic oligonucleotide
gtcacaaagaaccgtgtagcc

SEQ ID NO: 1647 - DNA, 21 bp, Artificial Sequence
  Description of Artificial Sequence: Synthetic oligonucleotide
tgaacctcttgttataaagcc

SEQ ID NO: 1648 - DNA, 21 bp, Artificial Sequence
  Description of Artificial Sequence: Synthetic oligonucleotide
ccgacaaccagtatttgggcc

SEQ ID NO: 1649 - DNA, 21 bp, Artificial Sequence
  Description of Artificial Sequence: Synthetic oligonucleotide
gcaattcagtctcgttgtacc

SEQ ID NO: 1650 - DNA, 21 bp, Artificial Sequence
  Description of Artificial Sequence: Synthetic oligonucleotide
tccaggtttatgaactgaacc

SEQ ID NO: 1651 - DNA, 21 bp, Artificial Sequence
  Description of Artificial Sequence: Synthetic oligonucleotide
ggtttatgaactgacgttacc

SEQ ID NO: 1652 - DNA, 21 bp, Artificial Sequence
  Description of Artificial Sequence: Synthetic oligonucleotide
ccacaatgttgtgactggacc

SEQ ID NO: 1653 - DNA, 21 bp, Artificial Sequence
  Description of Artificial Sequence: Synthetic oligonucleotide
gtcacaaagaaccgtgtaacc

SEQ ID NO: 1654 - DNA, 21 bp, Artificial Sequence
  Description of Artificial Sequence: Synthetic oligonucleotide
tgaacctcttgttataaaacc

SEQ ID NO: 1655 - DNA, 21 bp, Artificial Sequence
  Description of Artificial Sequence: Synthetic oligonucleotide
ccgacaaccagtatttggacc

SEQ ID NO: 1656 - DNA, 21 bp, Artificial Sequence
  Description of Artificial Sequence: Synthetic oligonucleotide
gcaattcagactcgttgtacc

SEQ ID NO: 1657 - DNA, 21 bp, Artificial Sequence
  Description of Artificial Sequence: Synthetic oligonucleotide
tccaggtttttgaactgaacc

SEQ ID NO: 1658 - DNA, 21 bp, Artificial Sequence
  Description of Artificial Sequence: Synthetic oligonucleotide
ggtttatgatctgacgttacc

SEQ ID NO: 1659 - DNA, 21 bp, Artificial Sequence
  Description of Artificial Sequence: Synthetic oligonucleotide
ccacaatgtagtgactggacc

SEQ ID NO: 1660 - DNA, 21 bp, Artificial Sequence
  Description of Artificial Sequence: Synthetic oligonucleotide
gtcacaaagtaccgtgtaacc

SEQ ID NO: 1661 - DNA, 21 bp, Artificial Sequence
  Description of Artificial Sequence: Synthetic oligonucleotide
tgaacctctagttataaaacc

SEQ ID NO: 1662 - DNA, 21 bp, Artificial Sequence
  Description of Artificial Sequence: Synthetic oligonucleotide
ccgacaacctgtatttggacc

SEQ ID NO: 1663 - DNA, 21 bp, Artificial Sequence
  Description of Artificial Sequence: Synthetic oligonucleotide
cattggaattcctaaaattcc

SEQ ID NO: 1664 - DNA, 21 bp, Artificial Sequence
  Description of Artificial Sequence: Synthetic oligonucleotide
gatcattggaattcctaatcc

SEQ ID NO: 1665 - DNA, 21 bp, Artificial Sequence
  Description of Artificial Sequence: Synthetic oligonucleotide
cattggaattcctaaaatgcc

SEQ ID NO: 1666 - DNA, 21 bp, Artificial Sequence
  Description of Artificial Sequence: Synthetic oligonucleotide
gatcattggaattcctaagcc

SEQ ID NO: 1667 - DNA, 21 bp, Artificial Sequence
  Description of Artificial Sequence: Synthetic oligonucleotide
cattggaattcctaaaatacc

SEQ ID NO: 1668 - DNA, 21 bp, Artificial Sequence
  Description of Artificial Sequence: Synthetic oligonucleotide
gatcattggaattcctaaacc

SEQ ID NO: 1669 - DNA, 21 bp, Artificial Sequence
  Description of Artificial Sequence: Synthetic oligonucleotide
cattggaatacctaaaatacc

SEQ ID NO: 1670 - DNA, 21 bp, Artificial Sequence
  Description of Artificial Sequence: Synthetic oligonucleotide
gatcattggtattcctaaacc

SEQ ID NO: 1671 - DNA, 21 bp, Artificial Sequence
  Description of Artificial Sequence: Synthetic oligonucleotide
cctgctagctccatgcttgct

SEQ ID NO: 1672 - DNA, 21 bp, Artificial Sequence
  Description of Artificial Sequence: Synthetic oligonucleotide
cctgctagctccatgcttgat

SEQ ID NO: 1673 - DNA, 21 bp, Artificial Sequence
  Description of Artificial Sequence: Synthetic oligonucleotide
ttaacgtcagttcataaactt

SEQ ID NO: 1674 - DNA, 21 bp, Artificial Sequence
  Description of Artificial Sequence: Synthetic oligonucleotide
tgtcggtaccgtctaacactt

SEQ ID NO: 1675 - DNA, 21 bp, Artificial Sequence
  Description of Artificial Sequence: Synthetic oligonucleotide
taagcatggagctagcaggtt

SEQ ID NO: 1676 - DNA, 21 bp, Artificial Sequence
  Description of Artificial Sequence: Synthetic oligonucleotide
tacaacgagactgaattgctt

SEQ ID NO: 1677 - DNA, 21 bp, Artificial Sequence
  Description of Artificial Sequence: Synthetic oligonucleotide
ttcagttcataaacctggatt

SEQ ID NO: 1678 - DNA, 21 bp, Artificial Sequence
  Description of Artificial Sequence: Synthetic oligonucleotide
taacgtcagttcataaacctt

SEQ ID NO: 1679 - DNA, 21 bp, Artificial Sequence
  Description of Artificial Sequence: Synthetic oligonucleotide
tccggtcacaacattgtggtt

SEQ ID NO: 1680 - DNA, 21 bp, Artificial Sequence
  Description of Artificial Sequence: Synthetic oligonucleotide
ttgcacggttctttgtgactt

SEQ ID NO: 1681 - DNA, 21 bp, Artificial Sequence
  Description of Artificial Sequence: Synthetic oligonucleotide
ttttataacaagaggttcatt

SEQ ID NO: 1682 - DNA, 21 bp, Artificial Sequence
  Description of Artificial Sequence: Synthetic oligonucleotide
tccaaatactggttgtcggtt

SEQ ID NO: 1683 - DNA, 21 bp, Artificial Sequence
  Description of Artificial Sequence: Synthetic oligonucleotide
tattttaggaattccaatgtt

SEQ ID NO: 1684 - DNA, 21 bp, Artificial Sequence
  Description of Artificial Sequence: Synthetic oligonucleotide
tttaggaattccaatgatctt

SEQ ID NO: 1685 - DNA, 22 bp, Artificial Sequence
  Description of Artificial Sequence: Synthetic oligonucleotide
taagcatggagctagcaggctt

SEQ ID NO: 1686 - DNA, 158 bp, Artificial Sequence
  Description of Artificial Sequence: Synthetic oligonucleotide
gtgctgggcggggggcggcgggccctcccgcagaacaccatgcgctccacggaataagcatggagctagcagggtgtgacccaaccctgctagctccatgcttattctgaggagcgccttgacagcagccatgggagggccgccccctacctcagtga

SEQ ID NO: 1687 - DNA, 163 bp, Artificial Sequence
  Description of Artificial Sequence: Synthetic oligonucleotide
gtgctgggcggggggcggcgggccctcccgcagaacaccatgcgctcctcggaataagcatggagctagcaggttgtggccactgagaaacctgctagctccatgcttgttctgcggagcgccttgacagcagccatgggagggccgccccctacctcagtga

SEQ ID NO: 1688 - DNA, 21 bp, Artificial Sequence
  Description of Artificial Sequence: Synthetic oligonucleotide
cctgctagctccatgcttatt

SEQ ID NO: 1689 - DNA, 21 bp, Artificial Sequence
  Description of Artificial Sequence: Synthetic oligonucleotide
cctgctagctccatgcttgtt

SEQ ID NO: 1690 - DNA, 21 bp, Artificial Sequence
  Description of Artificial Sequence: Synthetic oligonucleotide
taagcatggagctagcagggt

SEQ ID NO: 1691 - DNA, 21 bp, Artificial Sequence
  Description of Artificial Sequence: Synthetic oligonucleotide
taagcatggagctagcaggtt

SEQ ID NO: 1692 - DNA, 50 bp, Artificial Sequence
  Description of Artificial Sequence: Synthetic oligonucleotide
tttatgcctcatcctctgagtgctgaaggcttgctgtaggctgtatgctg

SEQ ID NO: 1693 - DNA, 10 bp, Artificial Sequence
  Description of Artificial Sequence: Synthetic oligonucleotide
tataatttgg

SEQ ID NO: 1694 - DNA, 11 bp, Artificial Sequence
  Description of Artificial Sequence: Synthetic oligonucleotide
cctgacccagt

SEQ ID NO: 1695 - DNA, 50 bp, Artificial Sequence
  Description of Artificial Sequence: Synthetic oligonucleotide
agtgtatgatgcctgttactagcattcacatggaacaaattgctgccgtg

SEQ ID NO: 1696 - DNA, 152 bp, Artificial Sequence
  Description of Artificial Sequence: Synthetic oligonucleotide
tttatgcctcatcctctgagtgctgaaggcttgctgtaggctgtatgctgcaatgtgactgctgacaaccctgtgacctggtttgtcagcagtcacattgttagtgtatgatgcctgttactagcattcacatggaacaaattgctgccgtg

SEQ ID NO: 1697 - DNA, 158 bp, Artificial Sequence
  Description of Artificial Sequence: Synthetic oligonucleotide
gtgctgggcggggggcggcgggccctcccgcagaacaccatgcgctcttcggaacaatgtgactgctgacaaccctgtgacctggtttgtcagcagtcacattgttctgaggagcgccttgacagcagccatgggagggccgccccctacctcagtga

SEQ ID NO: 1698 - DNA, 158 bp, Artificial Sequence
  Description of Artificial Sequence: Synthetic oligonucleotide
gtgctgggcggggggcggcgggccctcccgcagaacaccatgcgctcttcggaacaatgtgactgctgacaatcctgtgacctggtttgtcagcagtcacattgttctgaggagcgccttgacagcagccatgggagggccgccccctacctcagtga

SEQ ID NO: 1699 - DNA, 158 bp, Artificial Sequence
  Description of Artificial Sequence: Synthetic oligonucleotide
gtgctgggcggggggcggcgggccctcccgcagaacaccatgcgctcttcggaacaatgtgactgctgacaagcctgtgacctggtttgtcagcagtcacattgttctgaggagcgccttgacagcagccatgggagggccgccccctacctcagtga

SEQ ID NO: 1700 - DNA, 158 bp, Artificial Sequence
  Description of Artificial Sequence: Synthetic oligonucleotide
gtgctgggcggggggcggcgggccctcccgcagaacaccatgcgctcttcggaacaatgtgactgctgacaaacctgtgacctggtttgtcagcagtcacattgttctgaggagcgccttgacagcagccatgggagggccgccccctacctcagtga

SEQ ID NO: 1701 - DNA, 158 bp, Artificial Sequence
  Description of Artificial Sequence: Synthetic oligonucleotide
gtgctgggcggggggcggcgggccctcccgcagaacaccatgcgctcttcggaacaatgtgacagctgacaaacctgtgacctggtttgtcagcagtcacattgttctgaggagcgccttgacagcagccatgggagggccgccccctacctcagtga

SEQ ID NO: 1702 - DNA, 157 bp, Artificial Sequence
  Description of Artificial Sequence: Synthetic oligonucleotide
gtgctgggcggggggcggcgggccctcccgcagaacaccatgcgctcttcggaacaatgtgactgctgacaacctgtgacctggtttgtcagcagtcacattgttctgaggagcgccttgacagcagccatgggagggccgccccctacctcagtga

SEQ ID NO: 1703 - DNA, 159 bp, Artificial Sequence
  Description of Artificial Sequence: Synthetic oligonucleotide
gtgctgggcggggggcggcgggccctcccgcagaacaccatgcgctcttcggaacaatgtgactgctgacaatccctgtgacctggtttgtcagcagtcacattgttctgaggagcgccttgacagcagccatgggagggccgccccctacctcagtga

SEQ ID NO: 1704 - DNA, 158 bp, Artificial Sequence
  Description of Artificial Sequence: Synthetic oligonucleotide
gtgctgggcggggggcggcgggccctcccgcagaacaccatgcgctcttcggaacaatgtgactgctgacaaccctgtgatttggtttgtcagcagtcacattgttctgaggagcgccttgacagcagccatgggagggccgccccctacctcagtga

SEQ ID NO: 1705 - DNA, 158 bp, Artificial Sequence
  Description of Artificial Sequence: Synthetic oligonucleotide
gtgctgggcggggggcggcgggccctcccgcagaacaccatgcgctcttcggaacaatgtgactgctgacaaccctataatttggtttgtcagcagtcacattgttctgaggagcgccttgacagcagccatgggagggccgccccctacctcagtga

SEQ ID NO: 1706 - DNA, 159 bp, Artificial Sequence
  Description of Artificial Sequence: Synthetic oligonucleotide
gtgctgggcggggggcggcgggccctcccgcagaacaccatgcgctcttcggaacaatgtgactgctgacaacaccctgacccagttttgtcagcagtcacattgttctgaggagcgccttgacagcagccatgggagggccgccccctacctcagtga

SEQ ID NO: 1707 - DNA, 158 bp, Artificial Sequence
  Description of Artificial Sequence: Synthetic oligonucleotide
gtgctgggcggggggcggcgggccctcccgcagaacaccatgcgctcttcggaacaatgtgactgctgacaaccctgtgacctggtttgtcagcagtcacattgttctgtggagcgccttgacagcagccatgggagggccgccccctacctcagtga

SEQ ID NO: 1708 - DNA, 158 bp, Artificial Sequence
  Description of Artificial Sequence: Synthetic oligonucleotide
gtgctgggcggggggcggcgggccctcccgcagaacaccatgcgctcttcggaacaatgtgactgctgacaatcctgtgacctggtttgtcagcagtcacattgttctgtggagcgccttgacagcagccatgggagggccgccccctacctcagtga

SEQ ID NO: 1709 - DNA, 158 bp, Artificial Sequence
  Description of Artificial Sequence: Synthetic oligonucleotide
gtgctgggcggggggcggcgggccctcccgcagaacaccatgcgctcttcggaacaatgtgacagctgacaaacctgtgacctggtttgtcagcagtcacattgttctgtggagcgccttgacagcagccatgggagggccgccccctacctcagtga

SEQ ID NO: 1710 - DNA, 159 bp, Artificial Sequence
  Description of Artificial Sequence: Synthetic oligonucleotide
gtgctgggcggggggcggcgggccctcccgcagaacaccatgcgctcttcggaacaatgtgactgctgacaacaccctgacccagttttgtcagcagtcacattgttctgtggagcgccttgacagcagccatgggagggccgccccctacctcagtga

SEQ ID NO: 1711 - DNA, 158 bp, Artificial Sequence
  Description of Artificial Sequence: Synthetic oligonucleotide
gtgctgggcggggggcggcgggccctcccgcagaacaccatgcgctcttcggaacaatgtgactgctgacaagcctgtgacctggtttgtcagcagtcacattgttctgtggagcgccttgacagcagccatgggagggccgccccctacctcagtga

SEQ ID NO: 1712 - DNA, 158 bp, Artificial Sequence
  Description of Artificial Sequence: Synthetic oligonucleotide
gtgctgggcggggggcggcgggccctcccgcagaacaccatgcgctcttcggaacgacgaaggccgtgtgcgccctgtgacctggtcgcacacggccttcgtcgttctgaggagcgccttgacagcagccatgggagggccgccccctacctcagtga

SEQ ID NO: 1713 - DNA, 158 bp, Artificial Sequence
  Description of Artificial Sequence: Synthetic oligonucleotide
gtgctgggcggggggcggcgggccctcccgcagaacaccatgcgctcttcggaatgacttgggcaaaggtggccctgtgacctggtccacctttgcccaagtcattctgaggagcgccttgacagcagccatgggagggccgccccctacctcagtga

SEQ ID NO: 1714 - DNA, 158 bp, Artificial Sequence
  Description of Artificial Sequence: Synthetic oligonucleotide
gtgctgggcggggggcggcgggccctcccgcagaacaccatgcgctcttcggaaaactcatctgttatcctgccctgtgacctggtcaggataacagatgagttttctgaggagcgccttgacagcagccatgggagggccgccccctacctcagtga

SEQ ID NO: 1715 - DNA, 260 bp, Artificial Sequence
  Description of Artificial Sequence: Synthetic oligonucleotide
gaagcaaagaaggggcagagggagcccgtgagctgagtgggccagggactgggagaaggagtgaggaggcagggccggcatgcctctgctgctggccagacaatgtgactgctgacaacccgtctgcacctgtcactagtttgtcagcagtcacattgtttggccgtgtagtgctacccagcgctggctgcctcctcagcattgcaattcctctcccatctgggcaccagtcagctaccctggtgggaatctgggtagcc

SEQ ID NO: 1716 - DNA, 158 bp, Artificial Sequence
  Description of Artificial Sequence: Synthetic oligonucleotide
gtgctgggcggggggcggcgggccctcccgcagaacaccatgcgctcttcggaaccccttaactcatctgttccctgtgacctggtaacagatgagttaaggggttctgaggagcgccttgacagcagccatgggagggccgccccctacctcagtga

SEQ ID NO: 1717 - DNA, 158 bp, Artificial Sequence
  Description of Artificial Sequence: Synthetic oligonucleotide
gtgctgggcggggggcggcgggccctcccgcagaacaccatgcgctcttcggaacccttaactcatctgttaccctgtgacctggttaacagatgagttaagggttctgaggagcgccttgacagcagccatgggagggccgccccctacctcagtga

SEQ ID NO: 1718 - DNA, 158 bp, Artificial Sequence
  Description of Artificial Sequence: Synthetic oligonucleotide
gtgctgggcggggggcggcgggccctcccgcagaacaccatgcgctcttcggaaaactcatctgttatcttgccctgtgacctggtcaggataacagatgagttttctgaggagcgccttgacagcagccatgggagggccgccccctacctcagtga

SEQ ID NO: 1719 - DNA, 158 bp, Artificial Sequence
  Description of Artificial Sequence: Synthetic oligonucleotide
gtgctgggcggggggcggcgggccctcccgcagaacaccatgcgctcttcggaagctgtggaaatgtatcttccctgtgacctggtaggatacatttctacagcttctgaggagcgccttgacagcagccatgggagggccgccccctacctcagtga

SEQ ID NO: 1720 - DNA, 158 bp, Artificial Sequence
  Description of Artificial Sequence: Synthetic oligonucleotide
gtgctgggcggggggcggcgggccctcccgcagaacaccatgcgctcttcggaatgacttgggcaaaggtgagcctgtgacctggtccacctttgcccaagtcattctgaggagcgccttgacagcagccatgggagggccgccccctacctcagtga

SEQ ID NO: 1721 - DNA, 158 bp, Artificial Sequence
  Description of Artificial Sequence: Synthetic oligonucleotide
gtgctgggcggggggcggcgggccctcccgcagaacaccatgcgctcttcggaaccccttaactcatctgttgcctgtgacctggtaacagatgagttaaggggttctgaggagcgccttgacagcagccatgggagggccgccccctacctcagtga

SEQ ID NO: 1722 - DNA, 158 bp, Artificial Sequence
  Description of Artificial Sequence: Synthetic oligonucleotide
gtgctgggcggggggcggcgggccctcccgcagaacaccatgcgctcttcggaacccttaactcatctgttagcctgtgacctggttaacagatgagttaagggttctgaggagcgccttgacagcagccatgggagggccgccccctacctcagtga

SEQ ID NO: 1723 - DNA, 158 bp, Artificial Sequence
  Description of Artificial Sequence: Synthetic oligonucleotide
gtgctgggcggggggcggcgggccctcccgcagaacaccatgcgctcttcggaaaactcatctgttatcttagcctgtgacctggtcaggataacagatgagttttctgaggagcgccttgacagcagccatgggagggccgccccctacctcagtga

SEQ ID NO: 1724 - DNA, 158 bp, Artificial Sequence
  Description of Artificial Sequence: Synthetic oligonucleotide
gtgctgggcggggggcggcgggccctcccgcagaacaccatgcgctcttcggaagctgtggaaatgtatcttgcctgtgacctggtaggatacatttctacagcttctgaggagcgccttgacagcagccatgggagggccgccccctacctcagtga

SEQ ID NO: 1725 - DNA, 158 bp, Artificial Sequence
  Description of Artificial Sequence: Synthetic oligonucleotide
gtgctgggcggggggcggcgggccctcccgcagaacaccatgcgctcttcggaatgacttgggcaaaggtaggcctgtgacctggtccacctttgcccaagtcattctgaggagcgccttgacagcagccatgggagggccgccccctacctcagtga

SEQ ID NO: 1726 - DNA, 158 bp, Artificial Sequence
  Description of Artificial Sequence: Synthetic oligonucleotide
gtgctgggcggggggcggcgggccctcccgcagaacaccatgcgctcttcggaaccccttaactcatctgttccctgtgatttggtaacagatgagttaaggggttctgaggagcgccttgacagcagccatgggagggccgccccctacctcagtga

SEQ ID NO: 1727 - DNA, 158 bp, Artificial Sequence
  Description of Artificial Sequence: Synthetic oligonucleotide
gtgctgggcggggggcggcgggccctcccgcagaacaccatgcgctcttcggaacccttaactcatctgttaccctgtgatttggttaacagatgagttaagggttctgaggagcgccttgacagcagccatgggagggccgccccctacctcagtga

SEQ ID NO: 1728 - DNA, 158 bp, Artificial Sequence
  Description of Artificial Sequence: Synthetic oligonucleotide
gtgctgggcggggggcggcgggccctcccgcagaacaccatgcgctcttcggaaaactcatctgttatcttgccctgtgatttggtcaggataacagatgagttttctgaggagcgccttgacagcagccatgggagggccgccccctacctcagtga

SEQ ID NO: 1729 - DNA, 158 bp, Artificial Sequence
  Description of Artificial Sequence: Synthetic oligonucleotide
gtgctgggcggggggcggcgggccctcccgcagaacaccatgcgctcttcggaagctgtggaaatgtatcttccctgtgatttggtaggatacatttctacagcttctgaggagcgccttgacagcagccatgggagggccgccccctacctcagtga

SEQ ID NO: 1730 - DNA, 158 bp, Artificial Sequence
  Description of Artificial Sequence: Synthetic oligonucleotide
gtgctgggcggggggcggcgggccctcccgcagaacaccatgcgctcttcggaatgacttgggcaaaggtgagcctgtgatttggtccacctttgcccaagtcattctgaggagcgccttgacagcagccatgggagggccgccccctacctcagtga

SEQ ID NO: 1731 - DNA, 158 bp, Artificial Sequence
  Description of Artificial Sequence: Synthetic oligonucleotide
gtgctgggcggggggcggcgggccctcccgcagaacaccatgcgctcttcggaaccccttaacacatctgttacctgtgacctggtaacagatgagttaaggggttctgtggagcgccttgacagcagccatgggagggccgccccctacctcagtga

SEQ ID NO: 1732 - DNA, 158 bp, Artificial Sequence
  Description of Artificial Sequence: Synthetic oligonucleotide
gtgctgggcggggggcggcgggccctcccgcagaacaccatgcgctcttcggaacccttaactgatctgttaacctgtgacctggttaacagatgagttaagggttctgtggagcgccttgacagcagccatgggagggccgccccctacctcagtga

SEQ ID NO: 1733 - DNA, 158 bp, Artificial Sequence
  Description of Artificial Sequence: Synthetic oligonucleotide
gtgctgggcggggggcggcgggccctcccgcagaacaccatgcgctcttcggaaaactcatctcttatcttgccctgtgacctggtcaggataacagatgagttttctgtggagcgccttgacagcagccatgggagggccgccccctacctcagtga

SEQ ID NO: 1734 - DNA, 158 bp, Artificial Sequence
  Description of Artificial Sequence: Synthetic oligonucleotide
gtgctgggcggggggcggcgggccctcccgcagaacaccatgcgctcttcggaagctgtggaattgtatcttgcctgtgacctggtaggatacatttctacagcttctgtggagcgccttgacagcagccatgggagggccgccccctacctcagtga

SEQ ID NO: 1735 - DNA, 158 bp, Artificial Sequence
  Description of Artificial Sequence: Synthetic oligonucleotide
gtgctgggcggggggcggcgggccctcccgcagaacaccatgcgctcttcggaatgacttggggaaaggtgagcctgtgacctggtccacctttgcccaagtcattctgtggagcgccttgacagcagccatgggagggccgccccctacctcagtga

SEQ ID NO: 1736 - DNA, 158 bp, Artificial Sequence
  Description of Artificial Sequence: Synthetic oligonucleotide
gtgctgggcggggggcggcgggccctcccgcagaacaccatgcgctcttcggaaccccttaactcatctgttgcctgtgacctggtaacagatgagttaaggggttctgtggagcgccttgacagcagccatgggagggccgccccctacctcagtga

SEQ ID NO: 1737 - DNA, 158 bp, Artificial Sequence
  Description of Artificial Sequence: Synthetic oligonucleotide
gtgctgggcggggggcggcgggccctcccgcagaacaccatgcgctcttcggaacccttaactcatctgttagcctgtgacctggttaacagatgagttaagggttctgtggagcgccttgacagcagccatgggagggccgccccctacctcagtga

SEQ ID NO: 1738 - DNA, 158 bp, Artificial Sequence
  Description of Artificial Sequence: Synthetic oligonucleotide
gtgctgggcggggggcggcgggccctcccgcagaacaccatgcgctcttcggaaaactcatctgttatcttggcctgtgacctggtcaggataacagatgagttttctgtggagcgccttgacagcagccatgggagggccgccccctacctcagtga

SEQ ID NO: 1739 - DNA, 158 bp, Artificial Sequence
  Description of Artificial Sequence: Synthetic oligonucleotide
gtgctgggcggggggcggcgggccctcccgcagaacaccatgcgctcttcggaagctgtggaaatgtatcttgcctgtgacctggtaggatacatttctacagcttctgtggagcgccttgacagcagccatgggagggccgccccctacctcagtga

SEQ ID NO: 1740 - DNA, 158 bp, Artificial Sequence
  Description of Artificial Sequence: Synthetic oligonucleotide
gtgctgggcggggggcggcgggccctcccgcagaacaccatgcgctcttcggaatgacttgggcaaaggtaggcctgtgacctggtccacctttgcccaagtcattctgtggagcgccttgacagcagccatgggagggccgccccctacctcagtga

SEQ ID NO: 1741 - DNA, 260 bp, Artificial Sequence
  Description of Artificial Sequence: Synthetic oligonucleotide
gaagcaaagaaggggcagagggagcccgtgagctgagtgggccagggactgggagaaggagtgaggaggcagggccggcatgcctctgctgctggccagaccccttaactcatttgttcccgtctgcacctgtcactagtaacagatgagttaaggggtttggccgtgtagtgctacccagcgctggctgcctcctcagcattgcaattcctctcccatctgggcaccagtcagctaccctggtgggaatctgggtagcc

SEQ ID NO: 1742 - DNA, 260 bp, Artificial Sequence
  Description of Artificial Sequence: Synthetic oligonucleotide
gaagcaaagaaggggcagagggagcccgtgagctgagtgggccagggactgggagaaggagtgaggaggcagggccggcatgcctctgctgctggccagacccttaactcatctgttacccgtctgcacctgtcactagttaacagatgagttaagggtttggccgtgtagtgctacccagcgctggctgcctcctcagcattgcaattcctctcccatctgggcaccagtcagctaccctggtgggaatctgggtagcc

SEQ ID NO: 1743 - DNA, 260 bp, Artificial Sequence
  Description of Artificial Sequence: Synthetic oligonucleotide
gaagcaaagaaggggcagagggagcccgtgagctgagtgggccagggactgggagaaggagtgaggaggcagggccggcatgcctctgctgctggccagaaactcatctgttatcttgcccgtctgcacctgtcactagtcaggataacagatgagtttttggccgtgtagtgctacccagcgctggctgcctcctcagcattgcaattcctctcccatctgggcaccagtcagctaccctggtgggaatctgggtagcc

SEQ ID NO: 1744 - DNA, 260 bp, Artificial Sequence
  Description of Artificial Sequence: Synthetic oligonucleotide
gaagcaaagaaggggcagagggagcccgtgagctgagtgggccagggactgggagaaggagtgaggaggcagggccggcatgcctctgctgctggccagagctgtggaaatgtatcttcccgtctgcacctgtcactagtaggatacatttctacagctttggccgtgtagtgctacccagcgctggctgcctcctcagcattgcaattcctctcccatctgggcaccagtcagctaccctggtgggaatctgggtagcc

SEQ ID NO: 1745 - DNA, 260 bp, Artificial Sequence
  Description of Artificial Sequence: Synthetic oligonucleotide
gaagcaaagaaggggcagagggagcccgtgagctgagtgggccagggactgggagaaggagtgaggaggcagggccggcatgcctctgctgctggccagatgacttgggcaaaggtagcccgtctgcacctgtcactagtccacctttgcccaagtcatttggccgtgtagtgctacccagcgctggctgcctcctcagcattgcaattcctctcccatctgggcaccagtcagctaccctggtgggaatctgggtagcc

SEQ ID NO: 1746 - DNA, 21 bp, Artificial Sequence
  Description of Artificial Sequence: Synthetic oligonucleotide
caatgtgactgctgacaaccc

SEQ ID NO: 1747 - DNA, 21 bp, Artificial Sequence
  Description of Artificial Sequence: Synthetic oligonucleotide
tttgtcagcagtcacattgtt

SEQ ID NO: 1748 - DNA, 21 bp, Artificial Sequence
  Description of Artificial Sequence: Synthetic oligonucleotide
caatgtgactgctgacaatcc

SEQ ID NO: 1749 - DNA, 21 bp, Artificial Sequence
  Description of Artificial Sequence: Synthetic oligonucleotide
caatgtgactgctgacaagcc

SEQ ID NO: 1750 - DNA, 21 bp, Artificial Sequence
  Description of Artificial Sequence: Synthetic oligonucleotide
caatgtgactgctgacaaacc

SEQ ID NO: 1751 - DNA, 21 bp, Artificial Sequence
  Description of Artificial Sequence: Synthetic oligonucleotide
caatgtgacagctgacaaacc

SEQ ID NO: 1752 - DNA, 20 bp, Artificial Sequence
  Description of Artificial Sequence: Synthetic oligonucleotide
caatgtgactgctgacaacc

SEQ ID NO: 1753 - DNA, 21 bp, Artificial Sequence
  Description of Artificial Sequence: Synthetic oligonucleotide
caatgtgactgctgacaacac

SEQ ID NO: 1754 - DNA, 22 bp, Artificial Sequence
  Description of Artificial Sequence: Synthetic oligonucleotide
caatgtgactgctgacaatccc

SEQ ID NO: 1755 - DNA, 21 bp, Artificial Sequence
  Description of Artificial Sequence: Synthetic oligonucleotide
cgacgaaggccgtgtgcgccc

SEQ ID NO: 1756 - DNA, 21 bp, Artificial Sequence
  Description of Artificial Sequence: Synthetic oligonucleotide
tcgcacacggccttcgtcgtt

SEQ ID NO: 1757 - DNA, 21 bp, Artificial Sequence
  Description of Artificial Sequence: Synthetic oligonucleotide
tgacttgggcaaaggtggccc

SEQ ID NO: 1758 - DNA, 21 bp, Artificial Sequence
  Description of Artificial Sequence: Synthetic oligonucleotide
tccacctttgcccaagtcatt

SEQ ID NO: 1759 - DNA, 21 bp, Artificial Sequence
  Description of Artificial Sequence: Synthetic oligonucleotide
aactcatctgttatcctgccc

SEQ ID NO: 1760 - DNA, 21 bp, Artificial Sequence
  Description of Artificial Sequence: Synthetic oligonucleotide
tcaggataacagatgagtttt

SEQ ID NO: 1761 - DNA, 21 bp, Artificial Sequence
  Description of Artificial Sequence: Synthetic oligonucleotide
ccccttaactcatctgttccc

SEQ ID NO: 1762 - DNA, 21 bp, Artificial Sequence
  Description of Artificial Sequence: Synthetic oligonucleotide
taacagatgagttaaggggtt

SEQ ID NO: 1763 - DNA, 21 bp, Artificial Sequence
  Description of Artificial Sequence: Synthetic oligonucleotide
cccttaactcatctgttaccc

SEQ ID NO: 1764 - DNA, 21 bp, Artificial Sequence
  Description of Artificial Sequence: Synthetic oligonucleotide
ttaacagatgagttaagggtt

SEQ ID NO: 1765 - DNA, 21 bp, Artificial Sequence
  Description of Artificial Sequence: Synthetic oligonucleotide
aactcatctgttatcttgccc

SEQ ID NO: 1766 - DNA, 21 bp, Artificial Sequence
  Description of Artificial Sequence: Synthetic oligonucleotide
gctgtggaaatgtatcttccc

SEQ ID NO: 1767 - DNA, 21 bp, Artificial Sequence
  Description of Artificial Sequence: Synthetic oligonucleotide
taggatacatttctacagctt

SEQ ID NO: 1768 - DNA, 21 bp, Artificial Sequence
  Description of Artificial Sequence: Synthetic oligonucleotide
tgacttgggcaaaggtgagcc

SEQ ID NO: 1769 - DNA, 21 bp, Artificial Sequence
  Description of Artificial Sequence: Synthetic oligonucleotide
ccccttaactcatctgttgcc

SEQ ID NO: 1770 - DNA, 21 bp, Artificial Sequence
  Description of Artificial Sequence: Synthetic oligonucleotide
cccttaactcatctgttagcc

SEQ ID NO: 1771 - DNA, 21 bp, Artificial Sequence
  Description of Artificial Sequence: Synthetic oligonucleotide
aactcatctgttatcttagcc

SEQ ID NO: 1772 - DNA, 21 bp, Artificial Sequence
  Description of Artificial Sequence: Synthetic oligonucleotide
gctgtggaaatgtatcttgcc

SEQ ID NO: 1773 - DNA, 21 bp, Artificial Sequence
  Description of Artificial Sequence: Synthetic oligonucleotide
tgacttgggcaaaggtaggcc

SEQ ID NO: 1774 - DNA, 21 bp, Artificial Sequence
  Description of Artificial Sequence: Synthetic oligonucleotide
ccccttaacacatctgttacc

SEQ ID NO: 1775 - DNA, 21 bp, Artificial Sequence
  Description of Artificial Sequence: Synthetic oligonucleotide
cccttaactgatctgttaacc

SEQ ID NO: 1776 - DNA, 21 bp, Artificial Sequence
  Description of Artificial Sequence: Synthetic oligonucleotide
aactcatctcttatcttgccc

SEQ ID NO: 1777 - DNA, 21 bp, Artificial Sequence
  Description of Artificial Sequence: Synthetic oligonucleotide
gctgtggaattgtatcttgcc

SEQ ID NO: 1778 - DNA, 21 bp, Artificial Sequence
  Description of Artificial Sequence: Synthetic oligonucleotide
tgacttggggaaaggtgagcc

SEQ ID NO: 1779 - DNA, 21 bp, Artificial Sequence
  Description of Artificial Sequence: Synthetic oligonucleotide
aactcatctgttatcttggcc

SEQ ID NO: 1780 - DNA, 21 bp, Artificial Sequence
  Description of Artificial Sequence: Synthetic oligonucleotide
ccccttaactcatttgttccc

SEQ ID NO: 1781 - DNA, 21 bp, Artificial Sequence
  Description of Artificial Sequence: Synthetic oligonucleotide
tgacttgggcaaaggtagccc

SEQ ID NO: 1782 - DNA, 54 bp, Artificial Sequence
  Description of Artificial Sequence: Synthetic oligonucleotide
gtgctgggcggggggcggcgggccctcccgcagaacaccatgcgctcttcggga

SEQ ID NO: 1783 - DNA, 54 bp, Artificial Sequence
  Description of Artificial Sequence: Synthetic oligonucleotide
tcctgaggagcgccttgacagcagccatgggagggccgccccctacctcagtga

SEQ ID NO: 1784 - DNA, 158 bp, Artificial Sequence
  Description of Artificial Sequence: Synthetic oligonucleotide
gtgctgggcggggggcggcgggccctcccgcagaacaccatgcgctcttcgggatttgtcagcagtcacattgtctgtgacctggcaatgtgactgctgacaaatcctgaggagcgccttgacagcagccatgggagggccgccccctacctcagtga

SEQ ID NO: 1785 - DNA, 21 bp, Artificial Sequence
  Description of Artificial Sequence: Synthetic oligonucleotide
tttgtcagcagtcacattgtc

SEQ ID NO: 1786 - DNA, 19 bp, Artificial Sequence
  Description of Artificial Sequence: Synthetic oligonucleotide
caatgtgactgctgacaaa

SEQ ID NO: 1787 - DNA, 141 bp, Artificial Sequence
  Description of Artificial Sequence: Synthetic oligonucleotide
cctgcaggcagctgcgcgctcgctcgctcactgaggccgcccgggcaaagcccgggcgtcgggcgacctttggtcgcccggcctcagtgagcgagcgagcgcgcagagagggagtggccaactccatcactaggggttcct

SEQ ID NO: 1788 - DNA, 105 bp, Artificial Sequence
  Description of Artificial Sequence: Synthetic oligonucleotide
ctgcgcgctcgctcgctcactgaggccgcccgggcaaagcccgggcgtcgggcgacctttggtcgcccggcctcagtgagcgagcgagcgcgcagagagggagtg

SEQ ID NO: 1789 - DNA, 141 bp, Artificial Sequence
  Description of Artificial Sequence: Synthetic oligonucleotide
aggaacccctagtgatggagttggccactccctctctgcgcgctcgctcgctcactgaggccgggcgaccaaaggtcgcccgacgcccgggctttgcccgggcggcctcagtgagcgagcgagcgcgcagctgcctgcagg

SEQ ID NO: 1790 - DNA, 130 bp, Artificial Sequence
  Description of Artificial Sequence: Synthetic oligonucleotide
aggaacccctagtgatggagttggccactccctctctgcgcgctcgctcgctcactgaggccgggcgaccaaaggtcgcccgacgcccgggctttgcccgggcggcctcagtgagcgagcgagcgcgcag

SEQ ID NO: 1791 - DNA, 10 bp, Artificial Sequence
  Description of Artificial Sequence: Synthetic oligonucleotide
gtcgacataa

SEQ ID NO: 1792 - DNA, 121 bp, Artificial Sequence
  Description of Artificial Sequence: Synthetic oligonucleotide
gtcgacataacgcgtaattcgcccttgggcctaggcaattggatccgccggcagagaaaacatcccagggatttacagatcacatgcaggcagggaccagctcaacccttctacgcgtata

SEQ ID NO: 1793 - DNA, 73 bp, Artificial Sequence
  Description of Artificial Sequence: Synthetic oligonucleotide
gtcgacataacgcgtaattcgcccttgggcctaggcaattggatccgccggcagagaaaacatcacgcgtata

SEQ ID NO: 1794 - DNA, 18 bp, Artificial Sequence
  Description of Artificial Sequence: Synthetic oligonucleotide
gtcgacataacgcgtata

SEQ ID NO: 1795 - DNA, 14 bp, Artificial Sequence
  Description of Artificial Sequence: Synthetic oligonucleotide
ctcgagagatctac

SEQ ID NO: 1796 - DNA, 3013 bp, Artificial Sequence
  Description of Artificial Sequence: Synthetic oligonucleotide
aattcgcccttgggcctaggcaattggatccgccggcagagaaaacatcccagggatttacagatcacatgcaggcagggaccagctcaacccttctttaatgtcatccagggagggggccagggatggaggggaggggttgaggagcgagaggcagttatttttgggtgggattcaccacttttcccatgaagaggggagacttggtattttgttcaatcattaagaagacaaagggtttgttgaacttgacctcgggggggatagacatgggtatggcctctaaaaacatggccccagcagcttcagtccctttctcgtcgatggtcagcacagccttatgcacggcctggaggggagagaagcagagacacgttgtaaggctgatcccaggcctcgagcaaggctcacgtggacacctcccaggaagcgctcactccccctggacggccctggccctgcacatcctctccctccctgtcacataggccttgctcctcctcaaggctttggctgatggggctggctcccctctgtccatcttcctgacaagcgcctctccccctgctcaggtgcacccacaactcagaacagggaagagcatcgtcactccacgtctgcctccagggctctctcctttctagtacacggcttgaagctccttgaggacacggaccctggcagtgaccttcacagtgcccagaccccaagataatgcagccattcatggaactgcaggttgttcattggtcgcctttagttttccaaaataagtgtcactttagctgaaatcattcattaattcagacaccaaatctcacagatcgaaggagtcagaaattcctttgaaacaacttagcccaaacctttctgtgtcagtatggataaatcaaggcccaatgtctagaaggtcttgggcaaagttgaaattcagggtcagtgacacaacctcaagggaggccccgaaagtgccagctgcacagcagcccctgcctggctttgctgtttgcccaccgtcccgtgtcagtgaatcacgggcatcttcaggagctcagcctgggtcttcatttgtttccctcggccccttcctcagcctcaggacagtgctgcagcccccacacattcttccctacagataccatggtgcaacaaggtcgtcagggtgatctcaccttggagagcttcaggggtgcctcctctgtgaccccggagaggtcagccccattgctgaagaccttagtgatgcccagttgacccaggacgctcttcagatcataggttccagtaatggacagtttgggtaaatgtaagctggcagacctgtcgtgcagaaaagaaattcaaggcatggcacagcattcctcttgttcttctgggacccaccacagtgcaagtgttttcttttctgattatttctgccacttactcctgtgtcctccacccacactaagatgggaactcggctttggtttgttctacttttagctcttctacattgagtcaaagaatgttaacatcgaatgaatcacaaaagcttgaaatgccacctcctctgatattctaggtgtcctggaagcctgtctcatcttgccctgtagtgttgggtcacctggcccccagcctgtaacatccccagggccctacacccagagaaacacggggctggtggcagtgcccagtgacaaccgtttagtggataagagaagagtgaccacaccaggctgagtgctcctctctggttttccatggggagacaatgccaccctgagcagggtctggtgtgagcggcagctggctctgggctctctgatccgttaccctctcagcctctttgttctttctcaacccctggagcagagacctcaggaggtgctggcatggaacagagaaattccagcctcgattcctattatgaacccgacaccttttgtattttcatcttggttttacagtgtacaaaacgaactagatcagcagggcatgggcataatcacgaatgcacacacatacactaatgtgtggctcatgtttaagtatcacttactacaggacacccaatctaacagcaccgataaagtgacagagaaacgcaagccttctgcgaacatggcctggctgttccaattccgaaccttgcttttctgggccttgccacacaggctcttcccccgtccccccagggacattctacccttgaactccacactccactgctgcctttgccaggaagcccatctgttcctttttggttctgccagaacgtgtggtggtgctgctgtccctgccttgggcactggatattgggaagggacagtgtccacactggagtgggaagttcccagggacgagacctttacctcctcaccctgggtactgttctcctcatggagcatggacggcgctgcctgaactcagtggtggcctcattctggaagccaagtttatacagagtagcagtgacccagggatgtggggttcaccctcctcagccctctggccagtcctgatgggcctcagtcccaacatggctaagaggtgtgggcagcttcttggtcaccctcaggttggggaatcaccttctgtcttcattttccaggaacttggtgatgatatcgtgggtgagttcatttaccaggtgctgtagtttcccctcatcaggcaggaagaagatggcggtggcattgcccaggtatttcatcagcagcacccagctggacagcttcttacagtgctggatgttaaacatgcctaaacgcttcatcataggcaccttcacggtggtcacctggtccacgtggaagtcctcttcctcggtgtccttgacttcaaagggtctctcccatttgcctggagagaggggaaggtgggcatcaccaggggtgagtgaaggtttggaagagtgtagcagaataagaaaccatgagtcccctccctgagaagccctgagcccccttgacgacacacatccctcgaggctcagcttcatcatctgtaaaaggtgctgaaactgacc

SEQ ID NO: 1797 - DNA, 712 bp, Artificial Sequence
  Description of Artificial Sequence: Synthetic oligonucleotide
aattcgcccttgggcctaggcaattggatccgccggcagagaaaacatcccagggatttacagatcacatgcaggcagggaccagctcaacccttctttaatgtcatccagggagggggccagggatggaggggaggggttgaggagcgagaggcagttatttttgggtgggattcaccacttttcccatgaagaggggagacttggtattttgttcaatcattaagaagacaaagggtttgttgaacttgacctcgggggggatagacatgggtatggcctctaaaaacatggccccagcagcttcagtccctttctcgtcgatggtcagcacagccttatgcacggcctggaggggagagaagcagagacacgttgtaaggctgatcccaggcctcgagcaaggctcacgtggacacctcccaggaagcgctcactccccctggacggccctggccctgcacatcctctccctccctgtcacataggccttgctcctcctcaaggctttggctgatggggctggctcccctctgtccatcttcctgacaagcgcctctccccctgctcaggtgcacccacaactcagaacagggaagagcatcgtcactccacgtctgcctccagggctctctcctttctagtacacggcttgaagctccttgaggacacggaccctggcagtgaccttcacagtgcccagaccacgcgt

SEQ ID NO: 1798 - DNA, 2405 bp, Artificial Sequence
  Description of Artificial Sequence: Synthetic oligonucleotide
aattcgcccttgggcctaggcaattggatccgccggcagagaaaacatcccagggatttacagatcacatgcaggcagggaccagctcaacccttctttaatgtcatccagggagggggccagggatggaggggaggggttgaggagcgagaggcagttatttttgggtgggattcaccacttttcccatgaagaggggagacttggtattttgttcaatcattaagaagacaaagggtttgttgaacttgacctcgggggggatagacatgggtatggcctctaaaaacatggccccagcagcttcagtccctttctcgtcgatggtcagcacagccttatgcacggcctggaggggagagaagcagagacacgttgtaaggctgatcccaggcctcgagcaaggctcacgtggacacctcccaggaagcgctcactccccctggacggccctggccctgcacatcctctccctccctgtcacataggccttgctcctcctcaaggctttggctgatggggctggctcccctctgtccatcttcctgacaagcgcctctccccctgctcaggtgcacccacaactcagaacagggaagagcatcgtcactccacgtctgcctccagggctctctcctttctagtacacggcttgaagctccttgaggacacggaccctggcagtgaccttcacagtgcccagaccccaagataatgcagccattcatggaactgcagttgttcattggtcgcctttagttttccaaaataagtgtcatctttagctgaaatcattcattaattcagacaccaaatctcacagatcgaaggagtcagaaattcctttgaaacaacttagcccaaacctttctgtgtcagtatggataaatcaaggcccaatgtctagaaggtcttgggcaaagttgaaattcagggtcagtgacacaacctcaagggaggccccgaaagtgccagctgcacagcagtcccctgcctggctttgctgtttgaccacgtcccgtgtcagtgaatcacgggcatcttcaggagctcagcctgggtcttcatttgtttccctcggccccttcctcagcctcaggacagagctgcagcccccacacattcttccctacagataccagggtgcaacaaggtcgtcagggtgatctcaccttggagagcttcaggggtgcctcctctgtgaccccggagaggtcagccccattgctgaagaccttagtgatgcccagttgacccaggacgctcttcagatcataggttccagtaatggacagtttgggtaaatgtaagctggcagacctgtcgtgcagaaaagaaattcaaggcatggcacagcattcctcttgttcttctgggacccaccacagtgcaagtgttttcttttctgattatttctgccacttactcctgtgtcctccacccacactaagatgggaactcggctttggtttgttctacttttagctcttctacattgagtcaaagaatgttaacatcgaatgaatcacaaaagcttgaaatgccacctcctctgatattctaggtgtcctggaagcctgtctcatcttgccctgtagtgttgggtcacctggcccccagcctgtaacatccccagggccctacacccagagaaacacggggctggtggcagtgcccagtgacaaccgtttagtggataagagaagagtgaccacaccaggctgagtgctcctctctggttttccatgggggagacaatgccaccctgagcagggtctggtgtgagcgggcagcttggctctgggctctctgatccgttaccctctcagcctctttgttctttctcaacccctggagcagagacctcaggaggtgctggcatggaacagagaaattccagcctcgattcctattatgaacccgacaccttttgtattttcatcttggttttacagtgtacaaaacgaactagatcagcagggcatgggcataatcacgaatgcacacacatacactaatgtgtggctcatgtttaagtatcacttactacaggacacccaatctaacagcaccgataaagtgacagagaaacgcaagccttctgcgaacatggcctggctgttccaattccgaaccttgcttttctgggccttgccacacaggctcttcccccgtccccccagggacattctacccttgaactccacactccactgctgcctttgccaggaagcccatctgttcctttttggttctgccagaacgtgtggtggtgctgctgtccctgccctgggcactggatattgggaagggacagtgtccacactggagtgggaagtccccagggacgagacctttacctcctcacccctgggtactgttctcctcatggagcatggacgcgt

SEQ ID NO: 1799 - DNA, 1203 bp, Artificial Sequence
  Description of Artificial Sequence: Synthetic oligonucleotide
aattcgcccttgggcctaggcaattggatccgccggcagagaaaacatcccagggatttacagatcacatgcaggcagggaccagctcaacccttctttaatgtcatccagggagggggccagggatggaggggaggggttgaggagcgagaggcagttatttttgggtgggattcaccacttttcccatgaagaggggagacttggtattttgttcaatcattaagaagacaaagggtttgttgaacttgacctcgggggggatagacatgggtatggcctctaaaaacatggccccagcagcttcagtccctttctcgtcgatggtcagcacagccttatgcacggcctggaggggagagaagcagagacacgttgtaaggctgatcccaggcctcgagcaaggctcacgtggacacctcccaggaagcgctcactccccctggacggccctggccctgcacatcctctccctccctgtcacataggccttgctcctcctcaaggctttggctgatggggctggctcccctctgtccatcttcctgacaagcgcctctccccctgctcaggtgcacccacaactcagaacagggaagagcatcgtcactccacgtctgcctccagggctctctcctttctagtacacggcttgaagctccttgaggacacggaccctggcagtgaccttcacagtgcccagaccccaagataatgcagccattcatggaactgcagttgttcattggtcgcctttagttttccaaaataagtgtcatctttagctgaaatcattcattaattcagacaccaaatctcacagatcgaaggagtcagaaattcctttgaaacaacttagcccaaacctttctgtgtcagtatggataaatcaaggcccaatgtctagaaggtcttgggcaaagttgaaattcagggtcagtgacacaacctcaagggaggccccgaaagtgccagctgcacagcagtcccctgcctggctttgctgtttgaccacgtcccgtgtcagtgaatcacgggcatcttcaggagctcagcctgggtcttcatttgtttccctcggccccttcctcagcctcaggacagagctgcagcccccacacattcttccctacagataccagggtgcaacaaggtcgtcagggtgatctcaccttggagagcttcaggggtgcctccacgcgt

SEQ ID NO: 1800 - DNA, 103 bp, Artificial Sequence
  Description of Artificial Sequence: Synthetic oligonucleotide
aattcgcccttgggcctaggcaattggatccgccggcagagaaaacatcccagggatttacagatcacatgcaggcagggaccagctcaacccttctacgcgt

SEQ ID NO: 1801 - DNA, 55 bp, Artificial Sequence
  Description of Artificial Sequence: Synthetic oligonucleotide
aattcgcccttgggcctaggcaattggatccgccggcagagaaaacatcacgcgt

SEQ ID NO: 1802 - DNA, 1512 bp, Artificial Sequence
  Description of Artificial Sequence: Synthetic oligonucleotide
cgcgtaattcgcccttgggcctaggcaattggatccgccggcagagaaaacatcccagggatttacagatcacatgcaggcagggaccagctcaacccttctttaatgtcatccagggagggggccagggatggaggggaggggttgaggagcgagaggcagttatttttgggtgggattcaccacttttcccatgaagaggggagacttggtattttgttcaatcattaagaagacaaagggtttgttgaacttgacctcgggggggatagacatgggtatggcctctaaaaacatggccccagcagcttcagtccctttctcgtcgatggtcagcacagccttatgcacggcctggaggggagagaagcagagacacgttgtaaggctgatcccaggcctcgagcaaggctcacgtggacacctcccaggaagcgctcactccccctggacggccctggccctgcacatcctctccctccctgtcacataggccttgctcctcctcaaggctttggctgatggggctggctcccctctgtccatcttcctgacaagcgcctctccccctgctcaggtgcacccacaactcagaacagggaagagcatcgtcactccacgtctgcctccagggctctctcctttctagtacacggcttgaagctccttgaggacacggaccctggcagtgaccttcacagtgcccagaccccaagataatgcagccattcatggaactgcagttgttcattggtcgcctttagttttccaaaataagtgtcatctttagctgaaatcattcattaattcagacaccaaatctcacagatcgaaggagtcagaaattcctttgaaacaacttagcccaaacctttctgtgtcagtatggataaatcaaggcccaatgtctagaaggtcttgggcaaagttgaaattcagggtcagtgacacaacctcaagggaggccccgaaagtgccagctgcacagcagtcccctgcctggctttgctgtttgaccacgtcccgtgtcagtgaatcacgggcatcttcaggagctcagcctgggtcttcatttgtttccctcggccccttcctcagcctcaggacagagctgcagcccccacacattcttccctacagataccatggtgcaacaaggtcgtcagggtgatctcaccttggagagcttcaggggtgcctcctctgtgaccccggagaggtcagccccattgctgaagaccttagtgatgcccagttgacccaggacgctcttcagatcataggttccagtaatggacagtttgggtaaatgtaagctggcagacctgtcgtgcagaaaagaaattcaaggcatggcacagcattcctcttgttcttctgggacccaccacagtgcaagtgttttcttttctgattatttctgccacttactcctgtgtcctccacccacactaagatgggaactcggctttggtttgttctacttttagctcttctacattgagtcaaaga

SEQ ID NO: 1803 - DNA, 363 bp, Artificial Sequence
  Description of Artificial Sequence: Synthetic oligonucleotide
aattcgcccttgggcctaggcaattggatccgccggcagagaaaacatcccagggatttacagatcacatgcaggcagggaccagctcaacccttctttaatgtcatccagggagggggccagggatggaggggaggggttgaggagcgagaggcagttatttttgggtgggattcaccacttttcccatgaagaggggagacttggtattttgttcaatcattaagaagacaaagggtttgttgaacttgacctcgggggggatagacatgggtatggcctctaaaaacatggccccagcagcttcagtccctttctcgtcgatggtcagcacagccttatgcacggcctggagggacgcgt

SEQ ID NO: 1804 - DNA, 2395 bp, Artificial Sequence
  Description of Artificial Sequence: Synthetic oligonucleotide
aattcgcccttgggcctaggcaattggatccgccggcagagaaaacatcccagggatttacagatcacatgcaggcagggaccagctcaacccttctttaatgtcatccagggagggggccagggatggaggggaggggttgaggagcgagaggcagttatttttgggtgggattcaccacttttcccatgaagaggggagacttggtattttgttcaatcattaagaagacaaagggtttgttgaacttgacctcgggggggatagacatgggtatggcctctaaaaacatggccccagcagcttcagtccctttctcgtcgatggtcagcacagccttatgcacggcctggaggggagagaagcagagacacgttgtaaggctgatcccaggcctcgagcaaggctcacgtggacacctcccaggaagcgctcactccccctggacggccctggccctgcacatcctctccctccctgtcacataggccttgctcctcctcaaggctttggctgatggggctggctcccctctgtccatcttcctgacaagcgcctctccccctgctcaggtgcacccacaactcagaacagggaagagcatcgtcactccacgtctgcctccagggctctctcctttctagtacacggcttgaagctccttgaggacacggaccctggcagtgaccttcacagtgcccagaccccaagataatgcagccattcatggaactgcaggttgttcattggtcgcctttagttttccaaaataagtgtcactttagctgaaatcattcattaattcagacaccaaatctcacagatcgaaggagtcagaaattcctttgaaacaacttagcccaaacctttctgtgtcagtatggataaatcaaggcccaatgtctagaaggtcttgggcaaagttgaaattcagggtcagtgacacaacctcaagggaggccccgaaagtgccagctgcacagcagcccctgcctggctttgctgtttgcccaccgtcccgtgtcagtgaatcacgggcatcttcaggagctcagcctgggtcttcatttgtttccctcggccccttcctcagcctcaggacagtgctgcagcccccacacattcttccctacagataccatggtgcaacaaggtcgtcagggtgatctcaccttggagagcttcaggggtgcctcctctgtgaccccggagaggtcagccccattgctgaagaccttagtgatgcccagttgacccaggacgctcttcagatcataggttccagtaatggacagtttgggtaaatgtaagctggcagacctgtcgtgcagaaaagaaattcaaggcatggcacagcattcctcttgttcttctgggacccaccacagtgcaagtgttttcttttctgattatttctgccacttactcctgtgtcctccacccacactaagatgggaactcggctttggtttgttctacttttagctcttctacattgagtcaaagaatgttaacatcgaatgaatcacaaaagcttgaaatgccacctcctctgatattctaggtgtcctggaagcctgtctcatcttgccctgtagtgttgggtcacctggcccccagcctgtaacatccccagggccctacacccagagaaacacggggctggtggcagtgcccagtgacaaccgtttagtggataagagaagagtgaccacaccaggctgagtgctcctctctggttttccatggggagacaatgccaccctgagcagggtctggtgtgagcggcagctggctctgggctctctgatccgttaccctctcagcctctttgttctttctcaacccctggagcagagacctcaggaggtgctggcatggaacagagaaattccagcctcgattcctattatgaacccgacaccttttgtattttcatcttggttttacagtgtacaaaacgaactagatcagcagggcatgggcataatcacgaatgcacacacatacactaatgtgtggctcatgtttaagtatcacttactacaggacacccaatctaacagcaccgataaagtgacagagaaacgcaagccttctgcgaacatggcctggctgttccaattccgaaccttgcttttctgggccttgccacacaggctcttcccccgtccccccagggacattctacccttgaactccacactccactgctgcctttgccaggaagcccatctgttcctttttggttctgccagaacgtgtggtggtgctgctgtccctgccttgggcactggatattgggaagggacagtgtccacactggagtgggaagttcccagggacgagacctttacctcctcaccctgggtactgttctcctcatggagcatgg

SEQ ID NO: 1805 - DNA, 97 bp, Artificial Sequence
  Description of Artificial Sequence: Synthetic oligonucleotide
aattcgcccttgggcctaggcaattggatccgccggcagagaaaacatcccagggatttacagatcacatgcaggcagggaccagctcaacccttct

SEQ ID NO: 1806 - DNA, 714 bp, Artificial Sequence
  Description of Artificial Sequence: Synthetic oligonucleotide
aattcgcccttgggcctaggcaattggatccgccggcagagaaaacatcccagggatttacagatcacatgcaggcagggaccagctcaacccttctttaatgtcatccagggagggggccagggatggaggggaggggttgaggagcgagaggcagttatttttgggtgggattcaccacttttcccatgaagaggggagacttggtattttgttcaatcattaagaagacaaagggtttgttgaacttgacctcgggggggatagacatgggtatggcctctaaaaacatggccccagcagcttcagtccctttctcgtcgatggtcagcacagccttatgcacggcctggaggggagagaagcagagacacgttgtaaggctgatcccaggcctcgagcaaggctcacgtggacacctcccaggaagcgctcactccccctggacggccctggccctgcacatcctctccctccctgtcacataggccttgctcctcctcaaggctttggctgatggggctggctcccctctgtccatcttcctgacaagcgcctctccccctgctcaggtgcacccacaactcagaacagggaagagcatcgtcactccacgtctgcctccagggctctctcctttctagtacacggcttgaagctccttgaggacacggaccctggcagtgaccttcacagtgcccagaccatttaaat

SEQ ID NO: 1807 - DNA, 3021 bp, Artificial Sequence
  Description of Artificial Sequence: Synthetic oligonucleotide
aattcgcccttgggcctaggcaattggatccgccggcagagaaaacatcccagggatttacagatcacatgcaggcagggaccagctcaacccttctttaatgtcatccagggagggggccagggatggaggggaggggttgaggagcgagaggcagttatttttgggtgggattcaccacttttcccatgaagaggggagacttggtattttgttcaatcattaagaagacaaagggtttgttgaacttgacctcgggggggatagacatgggtatggcctctaaaaacatggccccagcagcttcagtccctttctcgtcgatggtcagcacagccttatgcacggcctggaggggagagaagcagagacacgttgtaaggctgatcccaggcctcgagcaaggctcacgtggacacctcccaggaagcgctcactccccctggacggccctggccctgcacatcctctccctccctgtcacataggccttgctcctcctcaaggctttggctgatggggctggctcccctctgtccatcttcctgacaagcgcctctccccctgctcaggtgcacccacaactcagaacagggaagagcatcgtcactccacgtctgcctccagggctctctcctttctagtacacggcttgaagctccttgaggacacggaccctggcagtgaccttcacagtgcccagaccccaagataatgcagccattcatggaactgcaggttgttcattggtcgcctttagttttccaaaataagtgtcactttagctgaaatcattcattaattcagacaccaaatctcacagatcgaaggagtcagaaattcctttgaaacaacttagcccaaacctttctgtgtcagtatggataaatcaaggcccaatgtctagaaggtcttgggcaaagttgaaattcagggtcagtgacacaacctcaagggaggccccgaaagtgccagctgcacagcagcccctgcctggctttgctgtttgcccaccgtcccgtgtcagtgaatcacgggcatcttcaggagctcagcctgggtcttcatttgtttccctcggccccttcctcagcctcaggacagtgctgcagcccccacacattcttccctacagataccatggtgcaacaaggtcgtcagggtgatctcaccttggagagcttcaggggtgcctcctctgtgaccccggagaggtcagccccattgctgaagaccttagtgatgcccagttgacccaggacgctcttcagatcataggttccagtaatggacagtttgggtaaatgtaagctggcagacctgtcgtgcagaaaagaaattcaaggcatggcacagcattcctcttgttcttctgggacccaccacagtgcaagtgttttcttttctgattatttctgccacttactcctgtgtcctccacccacactaagatgggaactcggctttggtttgttctacttttagctcttctacattgagtcaaagaatgttaacatcgaatgaatcacaaaagcttgaaatgccacctcctctgatattctaggtgtcctggaagcctgtctcatcttgccctgtagtgttgggtcacctggcccccagcctgtaacatccccagggccctacacccagagaaacacggggctggtggcagtgcccagtgacaaccgtttagtggataagagaagagtgaccacaccaggctgagtgctcctctctggttttccatggggagacaatgccaccctgagcagggtctggtgtgagcggcagctggctctgggctctctgatccgttaccctctcagcctctttgttctttctcaacccctggagcagagacctcaggaggtgctggcatggaacagagaaattccagcctcgattcctattatgaacccgacaccttttgtattttcatcttggttttacagtgtacaaaacgaactagatcagcagggcatgggcataatcacgaatgcacacacatacactaatgtgtggctcatgtttaagtatcacttactacaggacacccaatctaacagcaccgataaagtgacagagaaacgcaagccttctgcgaacatggcctggctgttccaattccgaaccttgcttttctgggccttgccacacaggctcttcccccgtccccccagggacattctacccttgaactccacactccactgctgcctttgccaggaagcccatctgttcctttttggttctgccagaacgtgtggtggtgctgctgtccctgccttgggcactggatattgggaagggacagtgtccacactggagtgggaagttcccagggacgagacctttacctcctcaccctgggtactgttctcctcatggagcatggacggcgctgcctgaactcagtggtggcctcattctggaagccaagtttatacagagtagcagtgacccagggatgtggggttcaccctcctcagccctctggccagtcctgatgggcctcagtcccaacatggctaagaggtgtgggcagcttcttggtcaccctcaggttggggaatcaccttctgtcttcattttccaggaacttggtgatgatatcgtgggtgagttcatttaccaggtgctgtagtttcccctcatcaggcaggaagaagatggcggtggcattgcccaggtatttcatcagcagcacccagctggacagcttcttacagtgctggatgttaaacatgcctaaacgcttcatcataggcaccttcacggtggtcacctggtccacgtggaagtcctcttcctcggtgtccttgacttcaaagggtctctcccatttgcctggagagaggggaaggtgggcatcaccaggggtgagtgaaggtttggaagagtgtagcagaataagaaaccatgagtcccctccctgagaagccctgagcccccttgacgacacacatccctcgaggctcagcttcatcatctgtaaaaggtgctgaaactgaccatttaaat

SEQ ID NO: 1808 - DNA, 1209 bp, Artificial Sequence
  Description of Artificial Sequence: Synthetic oligonucleotide
tctgtgaccccggagaggtcagccccattgctgaagaccttagtgatgcccagttgacccaggacgctcttcagatcataggttccagtaatggacagtttgggtaaatgtaagctggcagacctgtcgtgcagaaaagaaattcaaggcatggcacagcattcctcttgttcttctgggacccaccacagtgcaagtgttttcttttctgattatttctgccacttactcctgtgtcctccacccacactaagatgggaactcggctttggtttgttctacttttagctcttctacattgagtcaaagaatgttaacatcgaatgaatcacaaaagcttgaaatgccacctcctctgatattctaggtgtcctggaagcctgtctcatcttgccctgtagtgttgggtcacctggcccccagcctgtaacatccccagggccctacacccagagaaacacggggctggtggcagtgcccagtgacaaccgtttagtggataagagaagagtgaccacaccaggctgagtgctcctctctggttttccatggggagacaatgccaccctgagcagggtctggtgtgagcgggcagcttggctctgggctctctgatccgttaccctctcagcctctttgttctttctcaacccctggagcagagacctcaggaggtgctggcatggaacagagaaattccagcctcgattcctattatgaacccgacaccttttgtattttcatcttggttttacagtgtacaaaacgaactagatcagcagggcatgggcataatcacgaatgcacacacatacactaatgtgtggctcatgtttaagtatcacttactacaggacacccaatctaacagcaccgataaagtgacagagaaacgcaagccttctgcgaacatggcctggctgttccaattccgaaccttgcttttctgggccttgccacacaggctcttcccccgtccccccagggacattctacccttgaactccacactccactgctgcctttgccaggaagcccatctgttcctttttggttctgccagaacgtgtggtggtgctgctgtccctgccctgggcactggatattgggaagggacagtgtccacactggagtgggaagtccccagggacgagacctttacctcctcacccctgggtactgttctcctcatggagcatggatttaaat

SEQ ID NO: 1809 - DNA, 56 bp, Artificial Sequence
  Description of Artificial Sequence: Synthetic oligonucleotide
ccagggatttacagatcacatgcaggcagggaccagctcaactcttctatttaaat

SEQ ID NO: 1810 - DNA, 1519 bp, Artificial Sequence
  Description of Artificial Sequence: Synthetic oligonucleotide
aatgttaacatcgaatgaatcacaaaagcttgaaatgccacctcctctgatattctaggtgtcctggaagcctgtctcatcttgccctgtagtgttgggtcacctggcccccagcctgtaacatccccagggccctacacccagagaaacacggggctggtggcagtgcccagtgacaaccgtttagtggataagagaagagtgaccacaccaggctgagtgctcctctctggttttccatggggagacaatgccaccctgagcagggtctggtgtgagcgggcagcttggctctgggctctctgatccgttaccctctcagcctctttgttctttctcaacccctggagcagagacctcaggaggtgctggcatggaacagagaaattccagcctcgattcctattatgaacccgacaccttttgtattttcatcttggttttacagtgtacaaaacgaactagatcagcagggcatgggcataatcacgaatgcacacacatacactaatgtgtggctcatgtttaagtatcacttactacaggacacccaatctaacagcaccgataaagtgacagagaaacgcaagccttctgcgaacatggcctggctgttccaattccgaaccttgcttttctgggccttgccacacaggctcttcccccgtccccccagggacattctacccttgaactccacactccactgctgcctttgccaggaagcccatctgttcctttttggttctgccagaacgtgtggtggtgctgctgtccctgccctgggcactggatattgggaagggacagtgtccacactggagtgggaagtccccagggacgagacctttacctcctcacccctgggtactgtcctcctcatggagcatggatggcgctgcctgaactcagtggtggcctcattctggaagccaagtttatacagagtagcagtgacccagggatgtggggttcaccctcctcagccctctggccagtcctgatgggcctcagtcccaacatggctaagaggtgtgggcagcttcttggtcaccctcaggttggggaatcaccttctgtcttcattttccaggaacttggtgatgatatcgtgggtgagttcattttccaggtgctgtagtttcccctcatcaggcaggaagaagatggcggtggcattgcccaggtatttcatcagcagcacccagctggacagcttcttacagtgctggatgttaaacatgcctaaacgcttcatcataggcaccttcacggtggtcacctggtccacgtggaagtcctcttcctcggtgtccttgacttcaaagggtctctcccatttgcctggagagaggggaaggtgggcatcaccaggggtgagtgaaggtttggaagagtgtagcagaataaagaaaccatgagtcccctccctgagaagccctgagcccccttgacgacacacatccctcgaggctcagcttcatcatctgtaaaaggtgctgaaactgaccatttaaat

SEQ ID NO: 1811 - DNA, 357 bp, Artificial Sequence
  Description of Artificial Sequence: Synthetic oligonucleotide
gagagaagcagagacacgttgtaaggctgatcccaggcctcgagcaaggctcacgtggacacctcccaggaagcgctcactccccctggacggccctggccctgcacatcctctccctccctgtcacataggccttgctcctcctcaaggctttggctgatggggctggctcccctctgtccatcttcctgacaagcgcctctccccctgctcaggtgcacccacaactcagaacagggaagagcatcgtcactccacgtctgcctccagggctctctcctttctagtacacggcttgaagctccttgaggacacggaccctggcagtgaccttcacagtgcccagaccatttaaat

SEQ ID NO: 1812 - DNA, 2403 bp, Artificial Sequence
  Description of Artificial Sequence: Synthetic oligonucleotide
aattcgcccttgggcctaggcaattggatccgccggcagagaaaacatcccagggatttacagatcacatgcaggcagggaccagctcaacccttctttaatgtcatccagggagggggccagggatggaggggaggggttgaggagcgagaggcagttatttttgggtgggattcaccacttttcccatgaagaggggagacttggtattttgttcaatcattaagaagacaaagggtttgttgaacttgacctcgggggggatagacatgggtatggcctctaaaaacatggccccagcagcttcagtccctttctcgtcgatggtcagcacagccttatgcacggcctggaggggagagaagcagagacacgttgtaaggctgatcccaggcctcgagcaaggctcacgtggacacctcccaggaagcgctcactccccctggacggccctggccctgcacatcctctccctccctgtcacataggccttgctcctcctcaaggctttggctgatggggctggctcccctctgtccatcttcctgacaagcgcctctccccctgctcaggtgcacccacaactcagaacagggaagagcatcgtcactccacgtctgcctccagggctctctcctttctagtacacggcttgaagctccttgaggacacggaccctggcagtgaccttcacagtgcccagaccccaagataatgcagccattcatggaactgcaggttgttcattggtcgcctttagttttccaaaataagtgtcactttagctgaaatcattcattaattcagacaccaaatctcacagatcgaaggagtcagaaattcctttgaaacaacttagcccaaacctttctgtgtcagtatggataaatcaaggcccaatgtctagaaggtcttgggcaaagttgaaattcagggtcagtgacacaacctcaagggaggccccgaaagtgccagctgcacagcagcccctgcctggctttgctgtttgcccaccgtcccgtgtcagtgaatcacgggcatcttcaggagctcagcctgggtcttcatttgtttccctcggccccttcctcagcctcaggacagtgctgcagcccccacacattcttccctacagataccatggtgcaacaaggtcgtcagggtgatctcaccttggagagcttcaggggtgcctcctctgtgaccccggagaggtcagccccattgctgaagaccttagtgatgcccagttgacccaggacgctcttcagatcataggttccagtaatggacagtttgggtaaatgtaagctggcagacctgtcgtgcagaaaagaaattcaaggcatggcacagcattcctcttgttcttctgggacccaccacagtgcaagtgttttcttttctgattatttctgccacttactcctgtgtcctccacccacactaagatgggaactcggctttggtttgttctacttttagctcttctacattgagtcaaagaatgttaacatcgaatgaatcacaaaagcttgaaatgccacctcctctgatattctaggtgtcctggaagcctgtctcatcttgccctgtagtgttgggtcacctggcccccagcctgtaacatccccagggccctacacccagagaaacacggggctggtggcagtgcccagtgacaaccgtttagtggataagagaagagtgaccacaccaggctgagtgctcctctctggttttccatggggagacaatgccaccctgagcagggtctggtgtgagcggcagctggctctgggctctctgatccgttaccctctcagcctctttgttctttctcaacccctggagcagagacctcaggaggtgctggcatggaacagagaaattccagcctcgattcctattatgaacccgacaccttttgtattttcatcttggttttacagtgtacaaaacgaactagatcagcagggcatgggcataatcacgaatgcacacacatacactaatgtgtggctcatgtttaagtatcacttactacaggacacccaatctaacagcaccgataaagtgacagagaaacgcaagccttctgcgaacatggcctggctgttccaattccgaaccttgcttttctgggccttgccacacaggctcttcccccgtccccccagggacattctacccttgaactccacactccactgctgcctttgccaggaagcccatctgttcctttttggttctgccagaacgtgtggtggtgctgctgtccctgccttgggcactggatattgggaagggacagtgtccacactggagtgggaagttcccagggacgagacctttacctcctcaccctgggtactgttctcctcatggagcatggatttaaat

SEQ ID NO: 1813 - DNA, 105 bp, Artificial Sequence
  Description of Artificial Sequence: Synthetic oligonucleotide
aattcgcccttgggcctaggcaattggatccgccggcagagaaaacatcccagggatttacagatcacatgcaggcagggaccagctcaacccttctatttaaat

SEQ ID NO: 1814 - DNA, 382 bp, Artificial Sequence
  Description of Artificial Sequence: Synthetic oligonucleotide
cgcgtcgacattgattattgactagttattaatagtaatcaattacggggtcattagttcatagcccatatatggagttccgcgttacataacttacggtaaatggcccgcctggctgaccgcccaacgacccccgcccattgacgtcaataatgacgtatgttcccatagtaacgccaatagggactttccattgacgtcaatgggtggagtatttacggtaaactgcccacttggcagtacatcaagtgtatcatatgccaagtacgccccctattgacgtcaatgacggtaaatggcccgcctggcattatgcccagtacatgaccttatgggactttcctacttggcagtacatctacgtattagtcatcgctattac

SEQ ID NO: 1815 - DNA, 303 bp, Artificial Sequence
  Description of Artificial Sequence: Synthetic oligonucleotide
cgttacataacttacggtaaatggcccgcctggctgaccgcccaacgacccccgcccattgacgtcaataatgacgtatgttcccatagtaacgccaatagggactttccattgacgtcaatgggtggagtatttacggtaaactgcccacttggcagtacatcaagtgtatcatatgccaagtacgccccctattgacgtcaatgacggtaaatggcccgcctggcattatgcccagtacatgaccttatgggactttcctacttggcagtacatctagtattagtcatcgctattaccatg

SEQ ID NO: 1816 - DNA, 260 bp, Artificial Sequence
  Description of Artificial Sequence: Synthetic oligonucleotide
ccacgttctgcttcactctccccatctcccccccctccccacccccaattttgtatttatttattttttaattattttgtgcagcgatgggggcggggggggggggcgcgcgccaggcggggcggggcggggcgaggggcggggcggggcgaggcggagaggtgcggcggcagccaatcagagcggcgcgctccgaaagtttccttttatggcgaggcggcggcggcggcggccctataaaaagcgaagcgcgcggcggg

SEQ ID NO: 1817 - DNA, 588 bp, Artificial Sequence
  Description of Artificial Sequence: Synthetic oligonucleotide
gttgacattgattattgactagttattaatagtaatcaattacggggtcattagttcatagcccatatatggagttccgcgttacataacttacggtaaatggcccgcctggctgaccgcccaacgacccccgcccattgacgtcaataatgacgtatgttcccatagtaacgccaatagggactttccattgacgtcaatgggtggagtatttacggtaaactgcccacttggcagtacatcaagtgtatcatatgccaagtacgccccctattgacgtcaatgacggtaaatggcccgcctggcattatgcccagtacatgaccttatgggactttcctacttggcagtacatctacgtattagtcatcgctattaccatggtgatgcggttttggcagtacatcaatgggcgtggatagcggtttgactcacggggatttccaagtctccaccccattgacgtcaatgggagtttgttttggcaccaaaatcaacgggactttccaaaatgtcgtaacaactccgccccattgacgcaaatgggcggtaggcgtgtacggtgggaggtctatataagcagagctc

SEQ ID NO: 1818 - DNA, 204 bp, Artificial Sequence
  Description of Artificial Sequence: Synthetic oligonucleotide
gtgatgcggttttggcagtacatcaatgggcgtggatagcggtttgactcacggggatttccaagtctccaccccattgacgtcaatgggagtttgttttggcaccaaaatcaacgggactttccaaaatgtcgtaacaactccgccccattgacgcaaatgggcggtaggcgtgtacggtgggaggtctatataagcagagct

SEQ ID NO: 1819 - DNA, 219 bp, Artificial Sequence
  Description of Artificial Sequence: Synthetic oligonucleotide
aattcgaacgctgacgtcatcaacccgctccaaggaatcgcgggcccagtgtcactaggcgggaacacccagcgcgcgtgcgccctggcaggaagatggctgtgagggacagggagtggcgccctgcaatatttgcatgtcgctatgtgttctgggaaatcaccataaacgtgaaatgtctttggatttgggaatcttataagttctgtatgagaccac

SEQ ID NO: 1820 - DNA, 17 bp, Artificial Sequence
  Description of Artificial Sequence: Synthetic oligonucleotide
taatacgactcactata

SEQ ID NO: 1821 - DNA, 134 bp, Artificial Sequence
  Description of Artificial Sequence: Synthetic oligonucleotide
tcagatcgcctggagacgccatccacgctgttttgacctccatagaagacaccgggaccgatccagcctccgcggattcgaatcccggccgggaacggtgcattggaacgcggattccccgtgccaagagtgac

SEQ ID NO: 1822 - DNA, 53 bp, Artificial Sequence
  Description of Artificial Sequence: Synthetic oligonucleotide
ctcctgggcaacgtgctggtctgtgtgctggcccatcactttggcaaagaatt

SEQ ID NO: 1823 - DNA, 172 bp, Artificial Sequence
  Description of Artificial Sequence: Synthetic oligonucleotide
gaactgaaaaaccagaaagttaactggtaagtttagtctttttgtcttttatttcaggtcccggatccggtggtggtgcaaatcaaagaactgctcctcagtggatgttgcctttacttctaggcctgtacggaagtgttacttctgctctaaaagctgcggaattgtaccc

SEQ ID NO: 1824 - DNA, 32 bp, Artificial Sequence
  Description of Artificial Sequence: Synthetic oligonucleotide
gtaagtaccgcctatagagtctataggcccac

SEQ ID NO: 1825 - DNA, 347 bp, Artificial Sequence
  Description of Artificial Sequence: Synthetic oligonucleotide
aaaaaatgctttcttcttttaatatacttttttgtttatcttatttctaatactttccctaatctctttctttcagggcaataatgatacaatgtatcatgcctctttgcaccattctaaagaataacagtgataatttctgggttaaggcaatagcaatatttctgcatataaatatttctgcatataaattgtaactgatgtaagaggtttcatattgctaatagcagctacaatccagctaccattctgcttttattttatggttgggataaggctggattattctgagtccaagctaggcccttttgctaatcatgttcatacctcttatcttcctcccacag

SEQ ID NO: 1826 - DNA, 201 bp, Artificial Sequence
  Description of Artificial Sequence: Synthetic oligonucleotide
gaactgaaaaaccagaaagttaactggtaagtttagtctttttgtcttttatttcaggtcccggatccggtggtggtgcaaatcaaagaactgctcctcagtggatgttgcctttacttctaggcctgtacggaagtgttacttctgctctaaaagctgcggaattgtacccgcggccgatccaccggtaaacttaagctt

SEQ ID NO: 1827 - DNA, 127 bp, Artificial Sequence
  Description of Artificial Sequence: Synthetic oligonucleotide
gatctttttccctctgccaaaaattatggggacatcatgaagccccttgagcatctgacttctggctaataaaggaaatttattttcattgcaatagtgtgttggaattttttgtgtctctcactcg

SEQ ID NO: 1828 - DNA, 225 bp, Artificial Sequence
  Description of Artificial Sequence: Synthetic oligonucleotide
ctgtgccttctagttgccagccatctgttgtttgcccctcccccgtgccttccttgaccctggaaggtgccactcccactgtcctttcctaataaaatgaggaaattgcatcgcattgtctgagtaggtgtcattctattctggggggtggggtggggcaggacagcaagggggaggattgggaagacaatagcaggcatgctggggatgcggtgggctctatgg

SEQ ID NO: 1829 - DNA, 477 bp, Artificial Sequence
  Description of Artificial Sequence: Synthetic oligonucleotide
gggtggcatccctgtgacccctccccagtgcctctcctggccctggaagttgccactccagtgcccaccagccttgtcctaataaaattaagttgcatcattttgtctgactaggtgtccttctataatattatggggtggaggggggtggtatggagcaaggggcaagttgggaagacaacctgtagggcctgcggggtctattgggaaccaagctggagtgcagtggcacaatcttggctcactgcaatctccgcctcctgggttcaagcgattctcctgcctcagcctcccgagttgttgggattccaggcatgcatgaccaggctcagctaatttttgtttttttggtagagacggggtttcaccatattggccaggctggtctccaactcctaatctcaggtgatctacccaccttggcctcccaaattgctgggattacaggcgtgaaccactgctcccttccctgtcctt

SEQ ID NO: 1830 - DNA, 476 bp, Artificial Sequence
  Description of Artificial Sequence: Synthetic oligonucleotide
gggtggcatccctgtgacccctccccagtgcctctcctggccctggaagttgccactccagtgcccaccagccttgtcctaataaaattaagttgcatcattttgtctgactaggtgtccttctataatattatggggtggaggggggtggtatggagcaaggggcaagttgggaagacaacctgtagggcctgcggggtctattgggaaccaagctggagtgcagtggcacaatcttggctcactgcaatctccgcctcctgggttcaagcgattctcctgcctcagcctcccgagttgttgggattccaggcatgcatgaccaggctcagctaatttttgtttttttggtagagacggggtttcaccatattggccaggctggtctccaactcctaatctcaggtgatctacccaccttggcctcccaaattgctgggattacaggcgtgaaccactgctcccttccctgtcct

SEQ ID NO: 1831 - DNA, 1676 bp, Artificial Sequence
  Description of Artificial Sequence: Synthetic oligonucleotide
ctgcgcgctcgctcgctcactgaggccgcccgggcaaagcccgggcgtcgggcgacctttggtcgcccggcctcagtgagcgagcgagcgcgcagagagggagtgtagccatgctctaggaagatcaattcaattcacgcgtcgacattgattattgactagttattaatagtaatcaattacggggtcattagttcatagcccatatatggagttccgcgttacataacttacggtaaatggcccgcctggctgaccgcccaacgacccccgcccattgacgtcaataatgacgtatgttcccatagtaacgccaatagggactttccattgacgtcaatgggtggagtatttacggtaaactgcccacttggcagtacatcaagtgtatcatatgccaagtacgccccctattgacgtcaatgacggtaaatggcccgcctggcattatgcccagtacatgaccttatgggactttcctacttggcagtacatctacgtattagtcatcgctattaccatgtcgaggccacgttctgcttcactctccccatctcccccccctccccacccccaattttgtatttatttattttttaattattttgtgcagcgatgggggcggggggggggggcgcgcgccaggcggggcggggcggggcgaggggcggggcggggcgaggcggagaggtgcggcggcagccaatcagagcggcgcgctccgaaagtttccttttatggcgaggcggcggcggcggcggccctataaaaagcgaagcgcgcggcgggcgggagcaagcttgaactgaaaaaccagaaagttaactggtaagtttagtctttttgtcttttatttcaggtcccggatccggtggtggtgcaaatcaaagaactgctcctcagtggatgttgcctttacttctaggcctgtacggaagtgttacttctgctctaaaagctgcggaattgtacccgcggccgatccaccggtaaacttaagcttggtaccgagctcgtcgacgtgctgggcggggggcggcgggccctcccgcagaacaccatgcgctcttcggaacctgctagctccatgcttgcctgtgacctggtaagcatggagctagcaggttctgaggagcgccttgacagcagccatgggagggccgccccctacctcagtgactcgacgtgctgggcggggggcggcgggccctcccgcagaacaccatgcgctcttcggaacctgctagctccatgcttgcctgtgacctggtaagcatggagctagcaggttctgaggagcgccttgacagcagccatgggagggccgccccctacctcagtgactcgaggacggggtgaactacgcctgaggatccgatctttttccctctgccaaaaattatggggacatcatgaagccccttgagcatctgacttctggctaataaaggaaatttattttcattgcaatagtgtgttggaattttttgtgtctctcactcggcctaggtagataagtagcatggcgggttaatcattaactacaaggaacccctagtgatggagttggccactccctctctgcgcgctcgctcgctcactgaggccgggcgaccaaaggtcgcccgacgcccgggctttgcccgggcggcctcagtgagcgagcgagcgcgcag

SEQ ID NO: 1832 - DNA, 1676 bp, Artificial Sequence
  Description of Artificial Sequence: Synthetic oligonucleotide
ctgcgcgctcgctcgctcactgaggccgcccgggcaaagcccgggcgtcgggcgacctttggtcgcccggcctcagtgagcgagcgagcgcgcagagagggagtgtagccatgctctaggaagatcaattcaattcacgcgtcgacattgattattgactagttattaatagtaatcaattacggggtcattagttcatagcccatatatggagttccgcgttacataacttacggtaaatggcccgcctggctgaccgcccaacgacccccgcccattgacgtcaataatgacgtatgttcccatagtaacgccaatagggactttccattgacgtcaatgggtggagtatttacggtaaactgcccacttggcagtacatcaagtgtatcatatgccaagtacgccccctattgacgtcaatgacggtaaatggcccgcctggcattatgcccagtacatgaccttatgggactttcctacttggcagtacatctacgtattagtcatcgctattaccatgtcgaggccacgttctgcttcactctccccatctcccccccctccccacccccaattttgtatttatttattttttaattattttgtgcagcgatgggggcggggggggggggcgcgcgccaggcggggcggggcggggcgaggggcggggcggggcgaggcggagaggtgcggcggcagccaatcagagcggcgcgctccgaaagtttccttttatggcgaggcggcggcggcggcggccctataaaaagcgaagcgcgcggcgggcgggagcaagcttgaactgaaaaaccagaaagttaactggtaagtttagtctttttgtcttttatttcaggtcccggatccggtggtggtgcaaatcaaagaactgctcctcagtggatgttgcctttacttctaggcctgtacggaagtgttacttctgctctaaaagctgcggaattgtacccgcggccgatccaccggtaaacttaagcttggtaccgagctcgtcgacgtgctgggcggggggcggcgggccctcccgcagaacaccatgcgctcttcggaagcaattcagtctcgttgtgcctgtgacctggtacaacgagactgaattgcttctgaggagcgccttgacagcagccatgggagggccgccccctacctcagtgactcgacgtgctgggcggggggcggcgggccctcccgcagaacaccatgcgctcttcggaagcaattcagtctcgttgtgcctgtgacctggtacaacgagactgaattgcttctgaggagcgccttgacagcagccatgggagggccgccccctacctcagtgactcgaggacggggtgaactacgcctgaggatccgatctttttccctctgccaaaaattatggggacatcatgaagccccttgagcatctgacttctggctaataaaggaaatttattttcattgcaatagtgtgttggaattttttgtgtctctcactcggcctaggtagataagtagcatggcgggttaatcattaactacaaggaacccctagtgatggagttggccactccctctctgcgcgctcgctcgctcactgaggccgggcgaccaaaggtcgcccgacgcccgggctttgcccgggcggcctcagtgagcgagcgagcgcgcag

SEQ ID NO: 1833 - DNA, 1778 bp, Artificial Sequence
  Description of Artificial Sequence: Synthetic oligonucleotide
ctgcgcgctcgctcgctcactgaggccgcccgggcaaagcccgggcgtcgggcgacctttggtcgcccggcctcagtgagcgagcgagcgcgcagagagggagtgtagccatgctctaggaagatcaattcaattcacgcgtcgacattgattattgactagttattaatagtaatcaattacggggtcattagttcatagcccatatatggagttccgcgttacataacttacggtaaatggcccgcctggctgaccgcccaacgacccccgcccattgacgtcaataatgacgtatgttcccatagtaacgccaatagggactttccattgacgtcaatgggtggagtatttacggtaaactgcccacttggcagtacatcaagtgtatcatatgccaagtacgccccctattgacgtcaatgacggtaaatggcccgcctggcattatgcccagtacatgaccttatgggactttcctacttggcagtacatctacgtattagtcatcgctattaccatgtcgaggccacgttctgcttcactctccccatctcccccccctccccacccccaattttgtatttatttattttttaattattttgtgcagcgatgggggcggggggggggggcgcgcgccaggcggggcggggcggggcgaggggcggggcggggcgaggcggagaggtgcggcggcagccaatcagagcggcgcgctccgaaagtttccttttatggcgaggcggcggcggcggcggccctataaaaagcgaagcgcgcggcgggcgggagcaagcttgaactgaaaaaccagaaagttaactggtaagtttagtctttttgtcttttatttcaggtcccggatccggtggtggtgcaaatcaaagaactgctcctcagtggatgttgcctttacttctaggcctgtacggaagtgttacttctgctctaaaagctgcggaattgtacccgcggccgatccaccggtaaacttaagcttggtaccgagctcgtcgacgaagcaaagaaggggcagagggagcccgtgagctgagtgggccagggactgggagaaggagtgaggaggcagggccggcatgcctctgctgctggccagacctgctagctccatgcttcccgtctgcacctgtcactagtaagcatggagctagcaggtttggccgtgtagtgctacccagcgctggctgcctcctcagcattgcaattcctctcccatctgggcaccagtcagctaccctggtgggaatctgggtagccctcgacgtgctgggcggggggcggcgggccctcccgcagaacaccatgcgctcttcggaagcaattcagtctcgttgtgcctgtgacctggtacaacgagactgaattgcttctgaggagcgccttgacagcagccatgggagggccgccccctacctcagtgactcgaggacggggtgaactacgcctgaggatccgatctttttccctctgccaaaaattatggggacatcatgaagccccttgagcatctgacttctggctaataaaggaaatttattttcattgcaatagtgtgttggaattttttgtgtctctcactcggcctaggtagataagtagcatggcgggttaatcattaactacaaggaacccctagtgatggagttggccactccctctctgcgcgctcgctcgctcactgaggccgggcgaccaaaggtcgcccgacgcccgggctttgcccgggcggcctcagtgagcgagcgagcgcgcag

SEQ ID NO: 1834 - DNA, 1778 bp, Artificial Sequence
  Description of Artificial Sequence: Synthetic oligonucleotide
ctgcgcgctcgctcgctcactgaggccgcccgggcaaagcccgggcgtcgggcgacctttggtcgcccggcctcagtgagcgagcgagcgcgcagagagggagtgtagccatgctctaggaagatcaattcaattcacgcgtcgacattgattattgactagttattaatagtaatcaattacggggtcattagttcatagcccatatatggagttccgcgttacataacttacggtaaatggcccgcctggctgaccgcccaacgacccccgcccattgacgtcaataatgacgtatgttcccatagtaacgccaatagggactttccattgacgtcaatgggtggagtatttacggtaaactgcccacttggcagtacatcaagtgtatcatatgccaagtacgccccctattgacgtcaatgacggtaaatggcccgcctggcattatgcccagtacatgaccttatgggactttcctacttggcagtacatctacgtattagtcatcgctattaccatgtcgaggccacgttctgcttcactctccccatctcccccccctccccacccccaattttgtatttatttattttttaattattttgtgcagcgatgggggcggggggggggggcgcgcgccaggcggggcggggcggggcgaggggcggggcggggcgaggcggagaggtgcggcggcagccaatcagagcggcgcgctccgaaagtttccttttatggcgaggcggcggcggcggcggccctataaaaagcgaagcgcgcggcgggcgggagcaagcttgaactgaaaaaccagaaagttaactggtaagtttagtctttttgtcttttatttcaggtcccggatccggtggtggtgcaaatcaaagaactgctcctcagtggatgttgcctttacttctaggcctgtacggaagtgttacttctgctctaaaagctgcggaattgtacccgcggccgatccaccggtaaacttaagcttggtaccgagctcgtcgacgtgctgggcggggggcggcgggccctcccgcagaacaccatgcgctcttcggaagcaattcagtctcgttgtgcctgtgacctggtacaacgagactgaattgcttctgaggagcgccttgacagcagccatgggagggccgccccctacctcagtgactcgacgaagcaaagaaggggcagagggagcccgtgagctgagtgggccagggactgggagaaggagtgaggaggcagggccggcatgcctctgctgctggccagacctgctagctccatgcttcccgtctgcacctgtcactagtaagcatggagctagcaggtttggccgtgtagtgctacccagcgctggctgcctcctcagcattgcaattcctctcccatctgggcaccagtcagctaccctggtgggaatctgggtagccctcgaggacggggtgaactacgcctgaggatccgatctttttccctctgccaaaaattatggggacatcatgaagccccttgagcatctgacttctggctaataaaggaaatttattttcattgcaatagtgtgttggaattttttgtgtctctcactcggcctaggtagataagtagcatggcgggttaatcattaactacaaggaacccctagtgatggagttggccactccctctctgcgcgctcgctcgctcactgaggccgggcgaccaaaggtcgcccgacgcccgggctttgcccgggcggcctcagtgagcgagcgagcgcgcag

SEQ ID NO: 1835 - DNA, 1880 bp, Artificial Sequence
  Description of Artificial Sequence: Synthetic oligonucleotide
ctgcgcgctcgctcgctcactgaggccgcccgggcaaagcccgggcgtcgggcgacctttggtcgcccggcctcagtgagcgagcgagcgcgcagagagggagtgtagccatgctctaggaagatcaattcaattcacgcgtcgacattgattattgactagttattaatagtaatcaattacggggtcattagttcatagcccatatatggagttccgcgttacataacttacggtaaatggcccgcctggctgaccgcccaacgacccccgcccattgacgtcaataatgacgtatgttcccatagtaacgccaatagggactttccattgacgtcaatgggtggagtatttacggtaaactgcccacttggcagtacatcaagtgtatcatatgccaagtacgccccctattgacgtcaatgacggtaaatggcccgcctggcattatgcccagtacatgaccttatgggactttcctacttggcagtacatctacgtattagtcatcgctattaccatgtcgaggccacgttctgcttcactctccccatctcccccccctccccacccccaattttgtatttatttattttttaattattttgtgcagcgatgggggcggggggggggggcgcgcgccaggcggggcggggcggggcgaggggcggggcggggcgaggcggagaggtgcggcggcagccaatcagagcggcgcgctccgaaagtttccttttatggcgaggcggcggcggcggcggccctataaaaagcgaagcgcgcggcgggcgggagcaagcttgaactgaaaaaccagaaagttaactggtaagtttagtctttttgtcttttatttcaggtcccggatccggtggtggtgcaaatcaaagaactgctcctcagtggatgttgcctttacttctaggcctgtacggaagtgttacttctgctctaaaagctgcggaattgtacccgcggccgatccaccggtaaacttaagcttggtaccgagctcgtcgacgaagcaaagaaggggcagagggagcccgtgagctgagtgggccagggactgggagaaggagtgaggaggcagggccggcatgcctctgctgctggccagacctgctagctccatgcttcccgtctgcacctgtcactagtaagcatggagctagcaggtttggccgtgtagtgctacccagcgctggctgcctcctcagcattgcaattcctctcccatctgggcaccagtcagctaccctggtgggaatctgggtagccctcgacgaagcaaagaaggggcagagggagcccgtgagctgagtgggccagggactgggagaaggagtgaggaggcagggccggcatgcctctgctgctggccagacctgctagctccatgcttcccgtctgcacctgtcactagtaagcatggagctagcaggtttggccgtgtagtgctacccagcgctggctgcctcctcagcattgcaattcctctcccatctgggcaccagtcagctaccctggtgggaatctgggtagccctcgaggacggggtgaactacgcctgaggatccgatctttttccctctgccaaaaattatggggacatcatgaagccccttgagcatctgacttctggctaataaaggaaatttattttcattgcaatagtgtgttggaattttttgtgtctctcactcggcctaggtagataagtagcatggcgggttaatcattaactacaaggaacccctagtgatggagttggccactccctctctgcgcgctcgctcgctcactgaggccgggcgaccaaaggtcgcccgacgcccgggctttgcccgggcggcctcagtgagcgagcgagcgcgcag

SEQ ID NO: 1836 - DNA, 1880 bp, Artificial Sequence
  Description of Artificial Sequence: Synthetic oligonucleotide
ctgcgcgctcgctcgctcactgaggccgcccgggcaaagcccgggcgtcgggcgacctttggtcgcccggcctcagtgagcgagcgagcgcgcagagagggagtgtagccatgctctaggaagatcaattcaattcacgcgtcgacattgattattgactagttattaatagtaatcaattacggggtcattagttcatagcccatatatggagttccgcgttacataacttacggtaaatggcccgcctggctgaccgcccaacgacccccgcccattgacgtcaataatgacgtatgttcccatagtaacgccaatagggactttccattgacgtcaatgggtggagtatttacggtaaactgcccacttggcagtacatcaagtgtatcatatgccaagtacgccccctattgacgtcaatgacggtaaatggcccgcctggcattatgcccagtacatgaccttatgggactttcctacttggcagtacatctacgtattagtcatcgctattaccatgtcgaggccacgttctgcttcactctccccatctcccccccctccccacccccaattttgtatttatttattttttaattattttgtgcagcgatgggggcggggggggggggcgcgcgccaggcggggcggggcggggcgaggggcggggcggggcgaggcggagaggtgcggcggcagccaatcagagcggcgcgctccgaaagtttccttttatggcgaggcggcggcggcggcggccctataaaaagcgaagcgcgcggcgggcgggagcaagcttgaactgaaaaaccagaaagttaactggtaagtttagtctttttgtcttttatttcaggtcccggatccggtggtggtgcaaatcaaagaactgctcctcagtggatgttgcctttacttctaggcctgtacggaagtgttacttctgctctaaaagctgcggaattgtacccgcggccgatccaccggtaaacttaagcttggtaccgagctcgtcgacgaagcaaagaaggggcagagggagcccgtgagctgagtgggccagggactgggagaaggagtgaggaggcagggccggcatgcctctgctgctggccagagcaattcagtctcgttgtaccgtctgcacctgtcactagtacaacgagactgaattgctttggccgtgtagtgctacccagcgctggctgcctcctcagcattgcaattcctctcccatctgggcaccagtcagctaccctggtgggaatctgggtagccctcgacgaagcaaagaaggggcagagggagcccgtgagctgagtgggccagggactgggagaaggagtgaggaggcagggccggcatgcctctgctgctggccagagcaattcagtctcgttgtaccgtctgcacctgtcactagtacaacgagactgaattgctttggccgtgtagtgctacccagcgctggctgcctcctcagcattgcaattcctctcccatctgggcaccagtcagctaccctggtgggaatctgggtagccctcgaggacggggtgaactacgcctgaggatccgatctttttccctctgccaaaaattatggggacatcatgaagccccttgagcatctgacttctggctaataaaggaaatttattttcattgcaatagtgtgttggaattttttgtgtctctcactcggcctaggtagataagtagcatggcgggttaatcattaactacaaggaacccctagtgatggagttggccactccctctctgcgcgctcgctcgctcactgaggccgggcgaccaaaggtcgcccgacgcccgggctttgcccgggcggcctcagtgagcgagcgagcgcgcag

SEQ ID NO: 1837 - DNA, 1778 bp, Artificial Sequence
  Description of Artificial Sequence: Synthetic oligonucleotide
ctgcgcgctcgctcgctcactgaggccgcccgggcaaagcccgggcgtcgggcgacctttggtcgcccggcctcagtgagcgagcgagcgcgcagagagggagtgtagccatgctctaggaagatcaattcaattcacgcgtcgacattgattattgactagttattaatagtaatcaattacggggtcattagttcatagcccatatatggagttccgcgttacataacttacggtaaatggcccgcctggctgaccgcccaacgacccccgcccattgacgtcaataatgacgtatgttcccatagtaacgccaatagggactttccattgacgtcaatgggtggagtatttacggtaaactgcccacttggcagtacatcaagtgtatcatatgccaagtacgccccctattgacgtcaatgacggtaaatggcccgcctggcattatgcccagtacatgaccttatgggactttcctacttggcagtacatctacgtattagtcatcgctattaccatgtcgaggccacgttctgcttcactctccccatctcccccccctccccacccccaattttgtatttatttattttttaattattttgtgcagcgatgggggcggggggggggggcgcgcgccaggcggggcggggcggggcgaggggcggggcggggcgaggcggagaggtgcggcggcagccaatcagagcggcgcgctccgaaagtttccttttatggcgaggcggcggcggcggcggccctataaaaagcgaagcgcgcggcgggcgggagcaagcttgaactgaaaaaccagaaagttaactggtaagtttagtctttttgtcttttatttcaggtcccggatccggtggtggtgcaaatcaaagaactgctcctcagtggatgttgcctttacttctaggcctgtacggaagtgttacttctgctctaaaagctgcggaattgtacccgcggccgatccaccggtaaacttaagcttggtaccgagctcgtcgacgtgctgggcggggggcggcgggccctcccgcagaacaccatgcgctcttcggaacctgctagctccatgcttgcctgtgacctggtaagcatggagctagcaggttctgaggagcgccttgacagcagccatgggagggccgccccctacctcagtgactcgacgaagcaaagaaggggcagagggagcccgtgagctgagtgggccagggactgggagaaggagtgaggaggcagggccggcatgcctctgctgctggccagagcaattcagtctcgttgtaccgtctgcacctgtcactagtacaacgagactgaattgctttggccgtgtagtgctacccagcgctggctgcctcctcagcattgcaattcctctcccatctgggcaccagtcagctaccctggtgggaatctgggtagccctcgaggacggggtgaactacgcctgaggatccgatctttttccctctgccaaaaattatggggacatcatgaagccccttgagcatctgacttctggctaataaaggaaatttattttcattgcaatagtgtgttggaattttttgtgtctctcactcggcctaggtagataagtagcatggcgggttaatcattaactacaaggaacccctagtgatggagttggccactccctctctgcgcgctcgctcgctcactgaggccgggcgaccaaaggtcgcccgacgcccgggctttgcccgggcggcctcagtgagcgagcgagcgcgcag

SEQ ID NO: 1838 - DNA, 1778 bp, Artificial Sequence
  Description of Artificial Sequence: Synthetic oligonucleotide
ctgcgcgctcgctcgctcactgaggccgcccgggcaaagcccgggcgtcgggcgacctttggtcgcccggcctcagtgagcgagcgagcgcgcagagagggagtgtagccatgctctaggaagatcaattcaattcacgcgtcgacattgattattgactagttattaatagtaatcaattacggggtcattagttcatagcccatatatggagttccgcgttacataacttacggtaaatggcccgcctggctgaccgcccaacgacccccgcccattgacgtcaataatgacgtatgttcccatagtaacgccaatagggactttccattgacgtcaatgggtggagtatttacggtaaactgcccacttggcagtacatcaagtgtatcatatgccaagtacgccccctattgacgtcaatgacggtaaatggcccgcctggcattatgcccagtacatgaccttatgggactttcctacttggcagtacatctacgtattagtcatcgctattaccatgtcgaggccacgttctgcttcactctccccatctcccccccctccccacccccaattttgtatttatttattttttaattattttgtgcagcgatgggggcggggggggggggcgcgcgccaggcggggcggggcggggcgaggggcggggcggggcgaggcggagaggtgcggcggcagccaatcagagcggcgcgctccgaaagtttccttttatggcgaggcggcggcggcggcggccctataaaaagcgaagcgcgcggcgggcgggagcaagcttgaactgaaaaaccagaaagttaactggtaagtttagtctttttgtcttttatttcaggtcccggatccggtggtggtgcaaatcaaagaactgctcctcagtggatgttgcctttacttctaggcctgtacggaagtgttacttctgctctaaaagctgcggaattgtacccgcggccgatccaccggtaaacttaagcttggtaccgagctcgtcgacgaagcaaagaaggggcagagggagcccgtgagctgagtgggccagggactgggagaaggagtgaggaggcagggccggcatgcctctgctgctggccagagcaattcagtctcgttgtaccgtctgcacctgtcactagtacaacgagactgaattgctttggccgtgtagtgctacccagcgctggctgcctcctcagcattgcaattcctctcccatctgggcaccagtcagctaccctggtgggaatctgggtagccctcgacgtgctgggcggggggcggcgggccctcccgcagaacaccatgcgctcttcggaacctgctagctccatgcttgcctgtgacctggtaagcatggagctagcaggttctgaggagcgccttgacagcagccatgggagggccgccccctacctcagtgactcgaggacggggtgaactacgcctgaggatccgatctttttccctctgccaaaaattatggggacatcatgaagccccttgagcatctgacttctggctaataaaggaaatttattttcattgcaatagtgtgttggaattttttgtgtctctcactcggcctaggtagataagtagcatggcgggttaatcattaactacaaggaacccctagtgatggagttggccactccctctctgcgcgctcgctcgctcactgaggccgggcgaccaaaggtcgcccgacgcccgggctttgcccgggcggcctcagtgagcgagcgagcgcgcag

SEQ ID NO: 1839 - DNA, 1165 bp, Artificial Sequence
  Description of Artificial Sequence: Synthetic oligonucleotide
ctgcgcgctcgctcgctcactgaggccgcccgggcaaagcccgggcgtcgggcgacctttggtcgcccggcctcagtgagcgagcgagcgcgcagagagggagtgtagccatgctctaggaagatcaattcaattcacgcgttgacgtacgaaattcgaacgctgacgtcatcaacccgctccaaggaatcgcgggcccagtgtcactaggcgggaacacccagcgcgcgtgcgccctggcaggaagatggctgtgagggacagggagtggcgccctgcaatatttgcatgtcgctatgtgttctgggaaatcaccataaacgtgaaatgtctttggatttgggaatcttataagttctgtatgagaccacaccggtgtgctgggcggggggcggcgggccctcccgcagaacaccatgcgctcttcggaagcaattcagtctcgttgtgcctgtgacctggtacaacgagactgaattgcttctgaggagcgccttgacagcagccatgggagggccgccccctacctcagtgactcgagatagcggccgcccccgagatctttttatgtacgaaattcgaacgctgacgtcatcaacccgctccaaggaatcgcgggcccagtgtcactaggcgggaacacccagcgcgcgtgcgccctggcaggaagatggctgtgagggacagggagtggcgccctgcaatatttgcatgtcgctatgtgttctgggaaatcaccataaacgtgaaatgtctttggatttgggaatcttataagttctgtatgagaccacaccggtgtgctgggcggggggcggcgggccctcccgcagaacaccatgcgctcttcggaagcaattcagtctcgttgtgcctgtgacctggtacaacgagactgaattgcttctgaggagcgccttgacagcagccatgggagggccgccccctacctcagtgactcgagatagcggccgcccccgagatctttttatgtacatctagataagtagcatggcgggttaatcattaactacaaggaacccctagtgatggagttggccactccctctctgcgcgctcgctcgctcactgaggccgggcgaccaaaggtcgcccgacgcccgggctttgcccgggcggcctcagtgagcgagcgagcgcgcag

SEQ ID NO: 1840 - DNA, 1369 bp, Artificial Sequence
  Description of Artificial Sequence: Synthetic oligonucleotide
ctgcgcgctcgctcgctcactgaggccgcccgggcaaagcccgggcgtcgggcgacctttggtcgcccggcctcagtgagcgagcgagcgcgcagagagggagtgtagccatgctctaggaagatcaattcaattcacgcgttgacgtacgaaattcgaacgctgacgtcatcaacccgctccaaggaatcgcgggcccagtgtcactaggcgggaacacccagcgcgcgtgcgccctggcaggaagatggctgtgagggacagggagtggcgccctgcaatatttgcatgtcgctatgtgttctgggaaatcaccataaacgtgaaatgtctttggatttgggaatcttataagttctgtatgagaccacaccggtgaagcaaagaaggggcagagggagcccgtgagctgagtgggccagggactgggagaaggagtgaggaggcagggccggcatgcctctgctgctggccagacctgctagctccatgcttcccgtctgcacctgtcactagtaagcatggagctagcaggtttggccgtgtagtgctacccagcgctggctgcctcctcagcattgcaattcctctcccatctgggcaccagtcagctaccctggtgggaatctgggtagccctcgagatagcggccgcccccgagatctttttatgtacgaaattcgaacgctgacgtcatcaacccgctccaaggaatcgcgggcccagtgtcactaggcgggaacacccagcgcgcgtgcgccctggcaggaagatggctgtgagggacagggagtggcgccctgcaatatttgcatgtcgctatgtgttctgggaaatcaccataaacgtgaaatgtctttggatttgggaatcttataagttctgtatgagaccacaccggtgaagcaaagaaggggcagagggagcccgtgagctgagtgggccagggactgggagaaggagtgaggaggcagggccggcatgcctctgctgctggccagacctgctagctccatgcttcccgtctgcacctgtcactagtaagcatggagctagcaggtttggccgtgtagtgctacccagcgctggctgcctcctcagcattgcaattcctctcccatctgggcaccagtcagctaccctggtgggaatctgggtagccctcgagatagcggccgcccccgagatctttttatgtacatctagataagtagcatggcgggttaatcattaactacaaggaacccctagtgatggagttggccactccctctctgcgcgctcgctcgctcactgaggccgggcgaccaaaggtcgcccgacgcccgggctttgcccgggcggcctcagtgagcgagcgagcgcgcag

SEQ ID NO: 1841 - DNA, 1267 bp, Artificial Sequence
  Description of Artificial Sequence: Synthetic oligonucleotide
ctgcgcgctcgctcgctcactgaggccgcccgggcaaagcccgggcgtcgggcgacctttggtcgcccggcctcagtgagcgagcgagcgcgcagagagggagtgtagccatgctctaggaagatcaattcaattcacgcgttgacgtacgaaattcgaacgctgacgtcatcaacccgctccaaggaatcgcgggcccagtgtcactaggcgggaacacccagcgcgcgtgcgccctggcaggaagatggctgtgagggacagggagtggcgccctgcaatatttgcatgtcgctatgtgttctgggaaatcaccataaacgtgaaatgtctttggatttgggaatcttataagttctgtatgagaccacaccggtgaagcaaagaaggggcagagggagcccgtgagctgagtgggccagggactgggagaaggagtgaggaggcagggccggcatgcctctgctgctggccagacctgctagctccatgcttcccgtctgcacctgtcactagtaagcatggagctagcaggtttggccgtgtagtgctacccagcgctggctgcctcctcagcattgcaattcctctcccatctgggcaccagtcagctaccctggtgggaatctgggtagccctcgagatagcggccgcccccgagatctttttatgtacgaaattcgaacgctgacgtcatcaacccgctccaaggaatcgcgggcccagtgtcactaggcgggaacacccagcgcgcgtgcgccctggcaggaagatggctgtgagggacagggagtggcgccctgcaatatttgcatgtcgctatgtgttctgggaaatcaccataaacgtgaaatgtctttggatttgggaatcttataagttctgtatgagaccacaccggtgtgctgggcggggggcggcgggccctcccgcagaacaccatgcgctcttcggaagcaattcagtctcgttgtgcctgtgacctggtacaacgagactgaattgcttctgaggagcgccttgacagcagccatgggagggccgccccctacctcagtgactcgagatagcggccgcccccgagatctttttatgtacatctagataagtagcatggcgggttaatcattaactacaaggaacccctagtgatggagttggccactccctctctgcgcgctcgctcgctcactgaggccgggcgaccaaaggtcgcccgacgcccgggctttgcccgggcggcctcagtgagcgagcgagcgcgcag

SEQ ID NO: 1842 - DNA, 1267 bp, Artificial Sequence
  Description of Artificial Sequence: Synthetic oligonucleotide
ctgcgcgctcgctcgctcactgaggccgcccgggcaaagcccgggcgtcgggcgacctttggtcgcccggcctcagtgagcgagcgagcgcgcagagagggagtgtagccatgctctaggaagatcaattcaattcacgcgttgacgtacgaaattcgaacgctgacgtcatcaacccgctccaaggaatcgcgggcccagtgtcactaggcgggaacacccagcgcgcgtgcgccctggcaggaagatggctgtgagggacagggagtggcgccctgcaatatttgcatgtcgctatgtgttctgggaaatcaccataaacgtgaaatgtctttggatttgggaatcttataagttctgtatgagaccacaccggtgtgctgggcggggggcggcgggccctcccgcagaacaccatgcgctcttcggaagcaattcagtctcgttgtgcctgtgacctggtacaacgagactgaattgcttctgaggagcgccttgacagcagccatgggagggccgccccctacctcagtgactcgagatagcggccgcccccgagatctttttatgtacgaaattcgaacgctgacgtcatcaacccgctccaaggaatcgcgggcccagtgtcactaggcgggaacacccagcgcgcgtgcgccctggcaggaagatggctgtgagggacagggagtggcgccctgcaatatttgcatgtcgctatgtgttctgggaaatcaccataaacgtgaaatgtctttggatttgggaatcttataagttctgtatgagaccacaccggtgaagcaaagaaggggcagagggagcccgtgagctgagtgggccagggactgggagaaggagtgaggaggcagggccggcatgcctctgctgctggccagacctgctagctccatgcttcccgtctgcacctgtcactagtaagcatggagctagcaggtttggccgtgtagtgctacccagcgctggctgcctcctcagcattgcaattcctctcccatctgggcaccagtcagctaccctggtgggaatctgggtagccctcgagatagcggccgcccccgagatctttttatgtacatctagataagtagcatggcgggttaatcattaactacaaggaacccctagtgatggagttggccactccctctctgcgcgctcgctcgctcactgaggccgggcgaccaaaggtcgcccgacgcccgggctttgcccgggcggcctcagtgagcgagcgagcgcgcag

SEQ ID NO: 1843 - DNA, 1942 bp, Artificial Sequence
  Description of Artificial Sequence: Synthetic oligonucleotide
ctgcgcgctcgctcgctcactgaggccgcccgggcaaagcccgggcgtcgggcgacctttggtcgcccggcctcagtgagcgagcgagcgcgcagagagggagtgtagccatgctctaggaagatcaattcaattcacgcgtcgacattgattattgactagttattaatagtaatcaattacggggtcattagttcatagcccatatatggagttccgcgttacataacttacggtaaatggcccgcctggctgaccgcccaacgacccccgcccattgacgtcaataatgacgtatgttcccatagtaacgccaatagggactttccattgacgtcaatgggtggagtatttacggtaaactgcccacttggcagtacatcaagtgtatcatatgccaagtacgccccctattgacgtcaatgacggtaaatggcccgcctggcattatgcccagtacatgaccttatgggactttcctacttggcagtacatctacgtattagtcatcgctattaccatgtcgaggccacgttctgcttcactctccccatctcccccccctccccacccccaattttgtatttatttattttttaattattttgtgcagcgatgggggcggggggggggggcgcgcgccaggcggggcggggcggggcgaggggcggggcggggcgaggcggagaggtgcggcggcagccaatcagagcggcgcgctccgaaagtttccttttatggcgaggcggcggcggcggcggccctataaaaagcgaagcgcgcggcgggcgggagcaagcttgaactgaaaaaccagaaagttaactggtaagtttagtctttttgtcttttatttcaggtcccggatccggtggtggtgcaaatcaaagaactgctcctcagtggatgttgcctttacttctaggcctgtacggaagtgttacttctgctctaaaagctgcggaattgtacccgcggccgatccaccggtaaacttaagcttggtaccgagctcgtcgacgaagcaaagaaggggcagagggagcccgtgagctgagtgggccagggactgggagaaggagtgaggaggcagggccggcatgcctctgctgctggccagacctgctagctccatgcttcccgtctgcacctgtcactagtaagcatggagctagcaggtttggccgtgtagtgctacccagcgctggctgcctcctcagcattgcaattcctctcccatctgggcaccagtcagctaccctggtgggaatctgggtagccctcgacgtgctgggcggggggcggcgggccctcccgcagaacaccatgcgctcttcggaagcaattcagtctcgttgtgcctgtgacctggtacaacgagactgaattgcttctgaggagcgccttgacagcagccatgggagggccgccccctacctcagtgactcgacgtgctgggcggggggcggcgggccctcccgcagaacaccatgcgctcttcggaagcaattcagtctcgttgtgcctgtgacctggtacaacgagactgaattgcttctgaggagcgccttgacagcagccatgggagggccgccccctacctcagtgactcgaggacggggtgaactacgcctgaggatccgatctttttccctctgccaaaaattatggggacatcatgaagccccttgagcatctgacttctggctaataaaggaaatttattttcattgcaatagtgtgttggaattttttgtgtctctcactcggcctaggtagataagtagcatggcgggttaatcattaactacaaggaacccctagtgatggagttggccactccctctctgcgcgctcgctcgctcactgaggccgggcgaccaaaggtcgcccgacgcccgggctttgcccgggcggcctcagtgagcgagcgagcgcgcag

SEQ ID NO: 1844 - DNA, 2044 bp, Artificial Sequence
  Description of Artificial Sequence: Synthetic oligonucleotide
ctgcgcgctcgctcgctcactgaggccgcccgggcaaagcccgggcgtcgggcgacctttggtcgcccggcctcagtgagcgagcgagcgcgcagagagggagtgtagccatgctctaggaagatcaattcaattcacgcgtcgacattgattattgactagttattaatagtaatcaattacggggtcattagttcatagcccatatatggagttccgcgttacataacttacggtaaatggcccgcctggctgaccgcccaacgacccccgcccattgacgtcaataatgacgtatgttcccatagtaacgccaatagggactttccattgacgtcaatgggtggagtatttacggtaaactgcccacttggcagtacatcaagtgtatcatatgccaagtacgccccctattgacgtcaatgacggtaaatggcccgcctggcattatgcccagtacatgaccttatgggactttcctacttggcagtacatctacgtattagtcatcgctattaccatgtcgaggccacgttctgcttcactctccccatctcccccccctccccacccccaattttgtatttatttattttttaattattttgtgcagcgatgggggcggggggggggggcgcgcgccaggcggggcggggcggggcgaggggcggggcggggcgaggcggagaggtgcggcggcagccaatcagagcggcgcgctccgaaagtttccttttatggcgaggcggcggcggcggcggccctataaaaagcgaagcgcgcggcgggcgggagcaagcttgaactgaaaaaccagaaagttaactggtaagtttagtctttttgtcttttatttcaggtcccggatccggtggtggtgcaaatcaaagaactgctcctcagtggatgttgcctttacttctaggcctgtacggaagtgttacttctgctctaaaagctgcggaattgtacccgcggccgatccaccggtaaacttaagcttggtaccgagctcgtcgacgaagcaaagaaggggcagagggagcccgtgagctgagtgggccagggactgggagaaggagtgaggaggcagggccggcatgcctctgctgctggccagacctgctagctccatgcttcccgtctgcacctgtcactagtaagcatggagctagcaggtttggccgtgtagtgctacccagcgctggctgcctcctcagcattgcaattcctctcccatctgggcaccagtcagctaccctggtgggaatctgggtagccctcgacgtgctgggcggggggcggcgggccctcccgcagaacaccatgcgctcttcggaagcaattcagtctcgttgtgcctgtgacctggtacaacgagactgaattgcttctgaggagcgccttgacagcagccatgggagggccgccccctacctcagtgactcgacgaagcaaagaaggggcagagggagcccgtgagctgagtgggccagggactgggagaaggagtgaggaggcagggccggcatgcctctgctgctggccagacctgctagctccatgcttcccgtctgcacctgtcactagtaagcatggagctagcaggtttggccgtgtagtgctacccagcgctggctgcctcctcagcattgcaattcctctcccatctgggcaccagtcagctaccctggtgggaatctgggtagccctcgaggacggggtgaactacgcctgaggatccgatctttttccctctgccaaaaattatggggacatcatgaagccccttgagcatctgacttctggctaataaaggaaatttattttcattgcaatagtgtgttggaattttttgtgtctctcactcggcctaggtagataagtagcatggcgggttaatcattaactacaaggaacccctagtgatggagttggccactccctctctgcgcgctcgctcgctcactgaggccgggcgaccaaaggtcgcccgacgcccgggctttgcccgggcggcctcagtgagcgagcgagcgcgcag

SEQ ID NO: 1845 - DNA, 1792 bp, Artificial Sequence
  Description of Artificial Sequence: Synthetic oligonucleotide
ctgcgcgctcgctcgctcactgaggccgcccgggcaaagcccgggcgtcgggcgacctttggtcgcccggcctcagtgagcgagcgagcgcgcagagagggagtgtagccatgctctaggaagatcaattcaattcacgcgttgacgtacgaaattcgaacgctgacgtcatcaacccgctccaaggaatcgcgggcccagtgtcactaggcgggaacacccagcgcgcgtgcgccctggcaggaagatggctgtgagggacagggagtggcgccctgcaatatttgcatgtcgctatgtgttctgggaaatcaccataaacgtgaaatgtctttggatttgggaatcttataagttctgtatgagaccacaccggtgaagcaaagaaggggcagagggagcccgtgagctgagtgggccagggactgggagaaggagtgaggaggcagggccggcatgcctctgctgctggccagacctgctagctccatgcttcccgtctgcacctgtcactagtaagcatggagctagcaggtttggccgtgtagtgctacccagcgctggctgcctcctcagcattgcaattcctctcccatctgggcaccagtcagctaccctggtgggaatctgggtagccctcgagatagcggccgcccccgagatctttttatgtacgaaattcgaacgctgacgtcatcaacccgctccaaggaatcgcgggcccagtgtcactaggcgggaacacccagcgcgcgtgcgccctggcaggaagatggctgtgagggacagggagtggcgccctgcaatatttgcatgtcgctatgtgttctgggaaatcaccataaacgtgaaatgtctttggatttgggaatcttataagttctgtatgagaccacaccggtgtgctgggcggggggcggcgggccctcccgcagaacaccatgcgctcttcggaagcaattcagtctcgttgtgcctgtgacctggtacaacgagactgaattgcttctgaggagcgccttgacagcagccatgggagggccgccccctacctcagtgactcgagatagcggccgcccccgagatctttttatgtacgaaattcgaacgctgacgtcatcaacccgctccaaggaatcgcgggcccagtgtcactaggcgggaacacccagcgcgcgtgcgccctggcaggaagatggctgtgagggacagggagtggcgccctgcaatatttgcatgtcgctatgtgttctgggaaatcaccataaacgtgaaatgtctttggatttgggaatcttataagttctgtatgagaccacaccggtgaagcaaagaaggggcagagggagcccgtgagctgagtgggccagggactgggagaaggagtgaggaggcagggccggcatgcctctgctgctggccagacctgctagctccatgcttcccgtctgcacctgtcactagtaagcatggagctagcaggtttggccgtgtagtgctacccagcgctggctgcctcctcagcattgcaattcctctcccatctgggcaccagtcagctaccctggtgggaatctgggtagccctcgagatagcggccgcccccgagatctttttatgtacatctagataagtagcatggcgggttaatcattaactacaaggaacccctagtgatggagttggccactccctctctgcgcgctcgctcgctcactgaggccgggcgaccaaaggtcgcccgacgcccgggctttgcccgggcggcctcagtgagcgagcgagcgcgcag

SEQ ID NO: 1846 - DNA, 1690 bp, Artificial Sequence
  Description of Artificial Sequence: Synthetic oligonucleotide
ctgcgcgctcgctcgctcactgaggccgcccgggcaaagcccgggcgtcgggcgacctttggtcgcccggcctcagtgagcgagcgagcgcgcagagagggagtgtagccatgctctaggaagatcaattcaattcacgcgttgacgtacgaaattcgaacgctgacgtcatcaacccgctccaaggaatcgcgggcccagtgtcactaggcgggaacacccagcgcgcgtgcgccctggcaggaagatggctgtgagggacagggagtggcgccctgcaatatttgcatgtcgctatgtgttctgggaaatcaccataaacgtgaaatgtctttggatttgggaatcttataagttctgtatgagaccacaccggtgtgctgggcggggggcggcgggccctcccgcagaacaccatgcgctcttcggaagcaattcagtctcgttgtgcctgtgacctggtacaacgagactgaattgcttctgaggagcgccttgacagcagccatgggagggccgccccctacctcagtgactcgagatagcggccgcccccgagatctttttatgtacgaaattcgaacgctgacgtcatcaacccgctccaaggaatcgcgggcccagtgtcactaggcgggaacacccagcgcgcgtgcgccctggcaggaagatggctgtgagggacagggagtggcgccctgcaatatttgcatgtcgctatgtgttctgggaaatcaccataaacgtgaaatgtctttggatttgggaatcttataagttctgtatgagaccacaccggtgaagcaaagaaggggcagagggagcccgtgagctgagtgggccagggactgggagaaggagtgaggaggcagggccggcatgcctctgctgctggccagacctgctagctccatgcttcccgtctgcacctgtcactagtaagcatggagctagcaggtttggccgtgtagtgctacccagcgctggctgcctcctcagcattgcaattcctctcccatctgggcaccagtcagctaccctggtgggaatctgggtagccctcgagatagcggccgcccccgagatctttttatgtacgaaattcgaacgctgacgtcatcaacccgctccaaggaatcgcgggcccagtgtcactaggcgggaacacccagcgcgcgtgcgccctggcaggaagatggctgtgagggacagggagtggcgccctgcaatatttgcatgtcgctatgtgttctgggaaatcaccataaacgtgaaatgtctttggatttgggaatcttataagttctgtatgagaccacaccggtgtgctgggcggggggcggcgggccctcccgcagaacaccatgcgctcttcggaagcaattcagtctcgttgtgcctgtgacctggtacaacgagactgaattgcttctgaggagcgccttgacagcagccatgggagggccgccccctacctcagtgactcgagatagcggccgcccccgagatctttttatgtacatctagataagtagcatggcgggttaatcattaactacaaggaacccctagtgatggagttggccactccctctctgcgcgctcgctcgctcactgaggccgggcgaccaaaggtcgcccgacgcccgggctttgcccgggcggcctcagtgagcgagcgagcgcgcag

SEQ ID NO: 1847 - DNA, 1894 bp, Artificial Sequence
  Description of Artificial Sequence: Synthetic oligonucleotide
ctgcgcgctcgctcgctcactgaggccgcccgggcaaagcccgggcgtcgggcgacctttggtcgcccggcctcagtgagcgagcgagcgcgcagagagggagtgtagccatgctctaggaagatcaattcaattcacgcgttgacgtacgaaattcgaacgctgacgtcatcaacccgctccaaggaatcgcgggcccagtgtcactaggcgggaacacccagcgcgcgtgcgccctggcaggaagatggctgtgagggacagggagtggcgccctgcaatatttgcatgtcgctatgtgttctgggaaatcaccataaacgtgaaatgtctttggatttgggaatcttataagttctgtatgagaccacaccggtgaagcaaagaaggggcagagggagcccgtgagctgagtgggccagggactgggagaaggagtgaggaggcagggccggcatgcctctgctgctggccagacctgctagctccatgcttcccgtctgcacctgtcactagtaagcatggagctagcaggtttggccgtgtagtgctacccagcgctggctgcctcctcagcattgcaattcctctcccatctgggcaccagtcagctaccctggtgggaatctgggtagccctcgagatagcggccgcccccgagatctttttatgtacgaaattcgaacgctgacgtcatcaacccgctccaaggaatcgcgggcccagtgtcactaggcgggaacacccagcgcgcgtgcgccctggcaggaagatggctgtgagggacagggagtggcgccctgcaatatttgcatgtcgctatgtgttctgggaaatcaccataaacgtgaaatgtctttggatttgggaatcttataagttctgtatgagaccacaccggtgaagcaaagaaggggcagagggagcccgtgagctgagtgggccagggactgggagaaggagtgaggaggcagggccggcatgcctctgctgctggccagacctgctagctccatgcttcccgtctgcacctgtcactagtaagcatggagctagcaggtttggccgtgtagtgctacccagcgctggctgcctcctcagcattgcaattcctctcccatctgggcaccagtcagctaccctggtgggaatctgggtagccctcgagatagcggccgcccccgagatctttttatgtacgaaattcgaacgctgacgtcatcaacccgctccaaggaatcgcgggcccagtgtcactaggcgggaacacccagcgcgcgtgcgccctggcaggaagatggctgtgagggacagggagtggcgccctgcaatatttgcatgtcgctatgtgttctgggaaatcaccataaacgtgaaatgtctttggatttgggaatcttataagttctgtatgagaccacaccggtgaagcaaagaaggggcagagggagcccgtgagctgagtgggccagggactgggagaaggagtgaggaggcagggccggcatgcctctgctgctggccagacctgctagctccatgcttcccgtctgcacctgtcactagtaagcatggagctagcaggtttggccgtgtagtgctacccagcgctggctgcctcctcagcattgcaattcctctcccatctgggcaccagtcagctaccctggtgggaatctgggtagccctcgagatagcggccgcccccgagatctttttatgtacatctagataagtagcatggcgggttaatcattaactacaaggaacccctagtgatggagttggccactccctctctgcgcgctcgctcgctcactgaggccgggcgaccaaaggtcgcccgacgcccgggctttgcccgggcggcctcagtgagcgagcgagcgcgcag

SEQ ID NO: 1848 - DNA, 1792 bp, Artificial Sequence
  Description of Artificial Sequence: Synthetic oligonucleotide
ctgcgcgctcgctcgctcactgaggccgcccgggcaaagcccgggcgtcgggcgacctttggtcgcccggcctcagtgagcgagcgagcgcgcagagagggagtgtagccatgctctaggaagatcaattcaattcacgcgttgacgtacgaaattcgaacgctgacgtcatcaacccgctccaaggaatcgcgggcccagtgtcactaggcgggaacacccagcgcgcgtgcgccctggcaggaagatggctgtgagggacagggagtggcgccctgcaatatttgcatgtcgctatgtgttctgggaaatcaccataaacgtgaaatgtctttggatttgggaatcttataagttctgtatgagaccacaccggtgaagcaaagaaggggcagagggagcccgtgagctgagtgggccagggactgggagaaggagtgaggaggcagggccggcatgcctctgctgctggccagacctgctagctccatgcttcccgtctgcacctgtcactagtaagcatggagctagcaggtttggccgtgtagtgctacccagcgctggctgcctcctcagcattgcaattcctctcccatctgggcaccagtcagctaccctggtgggaatctgggtagccctcgagatagcggccgcccccgagatctttttatgtacgaaattcgaacgctgacgtcatcaacccgctccaaggaatcgcgggcccagtgtcactaggcgggaacacccagcgcgcgtgcgccctggcaggaagatggctgtgagggacagggagtggcgccctgcaatatttgcatgtcgctatgtgttctgggaaatcaccataaacgtgaaatgtctttggatttgggaatcttataagttctgtatgagaccacaccggtgaagcaaagaaggggcagagggagcccgtgagctgagtgggccagggactgggagaaggagtgaggaggcagggccggcatgcctctgctgctggccagacctgctagctccatgcttcccgtctgcacctgtcactagtaagcatggagctagcaggtttggccgtgtagtgctacccagcgctggctgcctcctcagcattgcaattcctctcccatctgggcaccagtcagctaccctggtgggaatctgggtagccctcgagatagcggccgcccccgagatctttttatgtacgaaattcgaacgctgacgtcatcaacccgctccaaggaatcgcgggcccagtgtcactaggcgggaacacccagcgcgcgtgcgccctggcaggaagatggctgtgagggacagggagtggcgccctgcaatatttgcatgtcgctatgtgttctgggaaatcaccataaacgtgaaatgtctttggatttgggaatcttataagttctgtatgagaccacaccggtgtgctgggcggggggcggcgggccctcccgcagaacaccatgcgctcttcggaagcaattcagtctcgttgtgcctgtgacctggtacaacgagactgaattgcttctgaggagcgccttgacagcagccatgggagggccgccccctacctcagtgactcgagatagcggccgcccccgagatctttttatgtacatctagataagtagcatggcgggttaatcattaactacaaggaacccctagtgatggagttggccactccctctctgcgcgctcgctcgctcactgaggccgggcgaccaaaggtcgcccgacgcccgggctttgcccgggcggcctcagtgagcgagcgagcgcgcag

SEQ ID NO: 1849 - DNA, 1588 bp, Artificial Sequence
  Description of Artificial Sequence: Synthetic oligonucleotide
ctgcgcgctcgctcgctcactgaggccgcccgggcaaagcccgggcgtcgggcgacctttggtcgcccggcctcagtgagcgagcgagcgcgcagagagggagtgtagccatgctctaggaagatcaattcaattcacgcgttgacgtacgaaattcgaacgctgacgtcatcaacccgctccaaggaatcgcgggcccagtgtcactaggcgggaacacccagcgcgcgtgcgccctggcaggaagatggctgtgagggacagggagtggcgccctgcaatatttgcatgtcgctatgtgttctgggaaatcaccataaacgtgaaatgtctttggatttgggaatcttataagttctgtatgagaccacaccggtgtgctgggcggggggcggcgggccctcccgcagaacaccatgcgctcttcggaagcaattcagtctcgttgtgcctgtgacctggtacaacgagactgaattgcttctgaggagcgccttgacagcagccatgggagggccgccccctacctcagtgactcgagatagcggccgcccccgagatctttttatgtacgaaattcgaacgctgacgtcatcaacccgctccaaggaatcgcgggcccagtgtcactaggcgggaacacccagcgcgcgtgcgccctggcaggaagatggctgtgagggacagggagtggcgccctgcaatatttgcatgtcgctatgtgttctgggaaatcaccataaacgtgaaatgtctttggatttgggaatcttataagttctgtatgagaccacaccggtgtgctgggcggggggcggcgggccctcccgcagaacaccatgcgctcttcggaagcaattcagtctcgttgtgcctgtgacctggtacaacgagactgaattgcttctgaggagcgccttgacagcagccatgggagggccgccccctacctcagtgactcgagatagcggccgcccccgagatctttttatgtacgaaattcgaacgctgacgtcatcaacccgctccaaggaatcgcgggcccagtgtcactaggcgggaacacccagcgcgcgtgcgccctggcaggaagatggctgtgagggacagggagtggcgccctgcaatatttgcatgtcgctatgtgttctgggaaatcaccataaacgtgaaatgtctttggatttgggaatcttataagttctgtatgagaccacaccggtgtgctgggcggggggcggcgggccctcccgcagaacaccatgcgctcttcggaagcaattcagtctcgttgtgcctgtgacctggtacaacgagactgaattgcttctgaggagcgccttgacagcagccatgggagggccgccccctacctcagtgactcgagatagcggccgcccccgagatctttttatgtacatctagataagtagcatggcgggttaatcattaactacaaggaacccctagtgatggagttggccactccctctctgcgcgctcgctcgctcactgaggccgggcgaccaaaggtcgcccgacgcccgggctttgcccgggcggcctcagtgagcgagcgagcgcgcag

SEQ ID NO: 1850 - DNA, 1690 bp, Artificial Sequence
  Description of Artificial Sequence: Synthetic oligonucleotide
ctgcgcgctcgctcgctcactgaggccgcccgggcaaagcccgggcgtcgggcgacctttggtcgcccggcctcagtgagcgagcgagcgcgcagagagggagtgtagccatgctctaggaagatcaattcaattcacgcgttgacgtacgaaattcgaacgctgacgtcatcaacccgctccaaggaatcgcgggcccagtgtcactaggcgggaacacccagcgcgcgtgcgccctggcaggaagatggctgtgagggacagggagtggcgccctgcaatatttgcatgtcgctatgtgttctgggaaatcaccataaacgtgaaatgtctttggatttgggaatcttataagttctgtatgagaccacaccggtgtgctgggcggggggcggcgggccctcccgcagaacaccatgcgctcttcggaagcaattcagtctcgttgtgcctgtgacctggtacaacgagactgaattgcttctgaggagcgccttgacagcagccatgggagggccgccccctacctcagtgactcgagatagcggccgcccccgagatctttttatgtacgaaattcgaacgctgacgtcatcaacccgctccaaggaatcgcgggcccagtgtcactaggcgggaacacccagcgcgcgtgcgccctggcaggaagatggctgtgagggacagggagtggcgccctgcaatatttgcatgtcgctatgtgttctgggaaatcaccataaacgtgaaatgtctttggatttgggaatcttataagttctgtatgagaccacaccggtgtgctgggcggggggcggcgggccctcccgcagaacaccatgcgctcttcggaagcaattcagtctcgttgtgcctgtgacctggtacaacgagactgaattgcttctgaggagcgccttgacagcagccatgggagggccgccccctacctcagtgactcgagatagcggccgcccccgagatctttttatgtacgaaattcgaacgctgacgtcatcaacccgctccaaggaatcgcgggcccagtgtcactaggcgggaacacccagcgcgcgtgcgccctggcaggaagatggctgtgagggacagggagtggcgccctgcaatatttgcatgtcgctatgtgttctgggaaatcaccataaacgtgaaatgtctttggatttgggaatcttataagttctgtatgagaccacaccggtgaagcaaagaaggggcagagggagcccgtgagctgagtgggccagggactgggagaaggagtgaggaggcagggccggcatgcctctgctgctggccagacctgctagctccatgcttcccgtctgcacctgtcactagtaagcatggagctagcaggtttggccgtgtagtgctacccagcgctggctgcctcctcagcattgcaattcctctcccatctgggcaccagtcagctaccctggtgggaatctgggtagccctcgagatagcggccgcccccgagatctttttatgtacatctagataagtagcatggcgggttaatcattaactacaaggaacccctagtgatggagttggccactccctctctgcgcgctcgctcgctcactgaggccgggcgaccaaaggtcgcccgacgcccgggctttgcccgggcggcctcagtgagcgagcgagcgcgcag

SEQ ID NO: 1851 - DNA, 2418 bp, Artificial Sequence
  Description of Artificial Sequence: Synthetic oligonucleotide
ctgcgcgctcgctcgctcactgaggccgcccgggcaaagcccgggcgtcgggcgacctttggtcgcccggcctcagtgagcgagcgagcgcgcagagagggagtgtagccatgctctaggaagatcaattcaattcacgcgttgacgtacgaaattcgaacgctgacgtcatcaacccgctccaaggaatcgcgggcccagtgtcactaggcgggaacacccagcgcgcgtgcgccctggcaggaagatggctgtgagggacagggagtggcgccctgcaatatttgcatgtcgctatgtgttctgggaaatcaccataaacgtgaaatgtctttggatttgggaatcttataagttctgtatgagaccacaccggtgaagcaaagaaggggcagagggagcccgtgagctgagtgggccagggactgggagaaggagtgaggaggcagggccggcatgcctctgctgctggccagacctgctagctccatgcttcccgtctgcacctgtcactagtaagcatggagctagcaggtttggccgtgtagtgctacccagcgctggctgcctcctcagcattgcaattcctctcccatctgggcaccagtcagctaccctggtgggaatctgggtagccctcgagatagcggccgcccccgagatctttttatgtacgaaattcgaacgctgacgtcatcaacccgctccaaggaatcgcgggcccagtgtcactaggcgggaacacccagcgcgcgtgcgccctggcaggaagatggctgtgagggacagggagtggcgccctgcaatatttgcatgtcgctatgtgttctgggaaatcaccataaacgtgaaatgtctttggatttgggaatcttataagttctgtatgagaccacaccggtgaagcaaagaaggggcagagggagcccgtgagctgagtgggccagggactgggagaaggagtgaggaggcagggccggcatgcctctgctgctggccagacctgctagctccatgcttcccgtctgcacctgtcactagtaagcatggagctagcaggtttggccgtgtagtgctacccagcgctggctgcctcctcagcattgcaattcctctcccatctgggcaccagtcagctaccctggtgggaatctgggtagccctcgagatagcggccgcccccgagatctttttatgtacaaattcgaacgctgacgtcatcaacccgctccaaggaatcgcgggcccagtgtcactaggcgggaacacccagcgcgcgtgcgccctggcaggaagatggctgtgagggacagggagtggcgccctgcaatatttgcatgtcgctatgtgttctgggaaatcaccataaacgtgaaatgtctttggatttgggaatcttataagttctgtatgagaccacaccggtgaagcaaagaaggggcagagggagcccgtgagctgagtgggccagggactgggagaaggagtgaggaggcagggccggcatgcctctgctgctggccagacctgctagctccatgcttcccgtctgcacctgtcactagtaagcatggagctagcaggtttggccgtgtagtgctacccagcgctggctgcctcctcagcattgcaattcctctcccatctgggcaccagtcagctaccctggtgggaatctgggtagccctcgagatagcggccgcccccgagatctttttatgtacgaaattcgaacgctgacgtcatcaacccgctccaaggaatcgcgggcccagtgtcactaggcgggaacacccagcgcgcgtgcgccctggcaggaagatggctgtgagggacagggagtggcgccctgcaatatttgcatgtcgctatgtgttctgggaaatcaccataaacgtgaaatgtctttggatttgggaatcttataagttctgtatgagaccacaccggtgaagcaaagaaggggcagagggagcccgtgagctgagtgggccagggactgggagaaggagtgaggaggcagggccggcatgcctctgctgctggccagacctgctagctccatgcttcccgtctgcacctgtcactagtaagcatggagctagcaggtttggccgtgtagtgctacccagcgctggctgcctcctcagcattgcaattcctctcccatctgggcaccagtcagctaccctggtgggaatctgggtagccctcgagatagcggccgcccccgagatctttttgtgtacatctagataagtagcatggcgggttaatcattaactacaaggaacccctagtgatggagttggccactccctctctgcgcgctcgctcgctcactgaggccgggcgaccaaaggtcgcccgacgcccgggctttgcccgggcggcctcagtgagcgagcgagcgcgcag

SEQ ID NO: 1852 - DNA, 2215 bp, Artificial Sequence
  Description of Artificial Sequence: Synthetic oligonucleotide
ctgcgcgctcgctcgctcactgaggccgcccgggcaaagcccgggcgtcgggcgacctttggtcgcccggcctcagtgagcgagcgagcgcgcagagagggagtgtagccatgctctaggaagatcaattcaattcacgcgttgacgtacgaaattcgaacgctgacgtcatcaacccgctccaaggaatcgcgggcccagtgtcactaggcgggaacacccagcgcgcgtgcgccctggcaggaagatggctgtgagggacagggagtggcgccctgcaatatttgcatgtcgctatgtgttctgggaaatcaccataaacgtgaaatgtctttggatttgggaatcttataagttctgtatgagaccacaccggtgaagcaaagaaggggcagagggagcccgtgagctgagtgggccagggactgggagaaggagtgaggaggcagggccggcatgcctctgctgctggccagacctgctagctccatgcttcccgtctgcacctgtcactagtaagcatggagctagcaggtttggccgtgtagtgctacccagcgctggctgcctcctcagcattgcaattcctctcccatctgggcaccagtcagctaccctggtgggaatctgggtagccctcgagatagcggccgcccccgagatctttttatgtacgaaattcgaacgctgacgtcatcaacccgctccaaggaatcgcgggcccagtgtcactaggcgggaacacccagcgcgcgtgcgccctggcaggaagatggctgtgagggacagggagtggcgccctgcaatatttgcatgtcgctatgtgttctgggaaatcaccataaacgtgaaatgtctttggatttgggaatcttataagttctgtatgagaccacaccggtgtgctgggcggggggcggcgggccctcccgcagaacaccatgcgctcttcggaagcaattcagtctcgttgtgcctgtgacctggtacaacgagactgaattgcttctgaggagcgccttgacagcagccatgggagggccgccccctacctcagtgactcgagatagcggccgcccccgagatctttttatgtacgaaattcgaacgctgacgtcatcaacccgctccaaggaatcgcgggcccagtgtcactaggcgggaacacccagcgcgcgtgcgccctggcaggaagatggctgtgagggacagggagtggcgccctgcaatatttgcatgtcgctatgtgttctgggaaatcaccataaacgtgaaatgtctttggatttgggaatcttataagttctgtatgagaccacaccggtgaagcaaagaaggggcagagggagcccgtgagctgagtgggccagggactgggagaaggagtgaggaggcagggccggcatgcctctgctgctggccagacctgctagctccatgcttcccgtctgcacctgtcactagtaagcatggagctagcaggtttggccgtgtagtgctacccagcgctggctgcctcctcagcattgcaattcctctcccatctgggcaccagtcagctaccctggtgggaatctgggtagccctcgagatagcggccgcccccgagatctttttatgtacgaaattcgaacgctgacgtcatcaacccgctccaaggaatcgcgggcccagtgtcactaggcgggaacacccagcgcgcgtgcgccctggcaggaagatggctgtgagggacagggagtggcgccctgcaatatttgcatgtcgctatgtgttctgggaaatcaccataaacgtgaaatgtctttggatttgggaatcttataagttctgtatgagaccacaccggtgtgctgggcggggggcggcgggccctcccgcagaacaccatgcgctcttcggaagcaattcagtctcgttgtgcctgtgacctggtacaacgagactgaattgcttctgaggagcgccttgacagcagccatgggagggccgccccctacctcagtgactcgagatagcggccgcccccgagatctttttatgtacatctagataagtagcatggcgggttaatcattaactacaaggaacccctagtgatggagttggccactccctctctgcgcgctcgctcgctcactgaggccgggcgaccaaaggtcgcccgacgcccgggctttgcccgggcggcctcagtgagcgagcgagcgcgcag

SEQ ID NO: 1853 - DNA, 2215 bp, Artificial Sequence
  Description of Artificial Sequence: Synthetic oligonucleotide
ctgcgcgctcgctcgctcactgaggccgcccgggcaaagcccgggcgtcgggcgacctttggtcgcccggcctcagtgagcgagcgagcgcgcagagagggagtgtagccatgctctaggaagatcaattcaattcacgcgttgacgtacgaaattcgaacgctgacgtcatcaacccgctccaaggaatcgcgggcccagtgtcactaggcgggaacacccagcgcgcgtgcgccctggcaggaagatggctgtgagggacagggagtggcgccctgcaatatttgcatgtcgctatgtgttctgggaaatcaccataaacgtgaaatgtctttggatttgggaatcttataagttctgtatgagaccacaccggtgaagcaaagaaggggcagagggagcccgtgagctgagtgggccagggactgggagaaggagtgaggaggcagggccggcatgcctctgctgctggccagacctgctagctccatgcttcccgtctgcacctgtcactagtaagcatggagctagcaggtttggccgtgtagtgctacccagcgctggctgcctcctcagcattgcaattcctctcccatctgggcaccagtcagctaccctggtgggaatctgggtagccctcgagatagcggccgcccccgagatctttttatgtacgaaattcgaacgctgacgtcatcaacccgctccaaggaatcgcgggcccagtgtcactaggcgggaacacccagcgcgcgtgcgccctggcaggaagatggctgtgagggacagggagtggcgccctgcaatatttgcatgtcgctatgtgttctgggaaatcaccataaacgtgaaatgtctttggatttgggaatcttataagttctgtatgagaccacaccggtgtgctgggcggggggcggcgggccctcccgcagaacaccatgcgctcttcggaagcaattcagtctcgttgtgcctgtgacctggtacaacgagactgaattgcttctgaggagcgccttgacagcagccatgggagggccgccccctacctcagtgactcgagatagcggccgcccccgagatctttttatgtacgaaattcgaacgctgacgtcatcaacccgctccaaggaatcgcgggcccagtgtcactaggcgggaacacccagcgcgcgtgcgccctggcaggaagatggctgtgagggacagggagtggcgccctgcaatatttgcatgtcgctatgtgttctgggaaatcaccataaacgtgaaatgtctttggatttgggaatcttataagttctgtatgagaccacaccggtgtgctgggcggggggcggcgggccctcccgcagaacaccatgcgctcttcggaagcaattcagtctcgttgtgcctgtgacctggtacaacgagactgaattgcttctgaggagcgccttgacagcagccatgggagggccgccccctacctcagtgactcgagatagcggccgcccccgagatctttttatgtacgaaattcgaacgctgacgtcatcaacccgctccaaggaatcgcgggcccagtgtcactaggcgggaacacccagcgcgcgtgcgccctggcaggaagatggctgtgagggacagggagtggcgccctgcaatatttgcatgtcgctatgtgttctgggaaatcaccataaacgtgaaatgtctttggatttgggaatcttataagttctgtatgagaccacaccggtgaagcaaagaaggggcagagggagcccgtgagctgagtgggccagggactgggagaaggagtgaggaggcagggccggcatgcctctgctgctggccagacctgctagctccatgcttcccgtctgcacctgtcactagtaagcatggagctagcaggtttggccgtgtagtgctacccagcgctggctgcctcctcagcattgcaattcctctcccatctgggcaccagtcagctaccctggtgggaatctgggtagccctcgagatagcggccgcccccgagatctttttatgtacatctagataagtagcatggcgggttaatcattaactacaaggaacccctagtgatggagttggccactccctctctgcgcgctcgctcgctcactgaggccgggcgaccaaaggtcgcccgacgcccgggctttgcccgggcggcctcagtgagcgagcgagcgcgcag

SEQ ID NO: 1854 - DNA, 2215 bp, Artificial Sequence
  Description of Artificial Sequence: Synthetic oligonucleotide
ctgcgcgctcgctcgctcactgaggccgcccgggcaaagcccgggcgtcgggcgacctttggtcgcccggcctcagtgagcgagcgagcgcgcagagagggagtgtagccatgctctaggaagatcaattcaattcacgcgttgacgtacgaaattcgaacgctgacgtcatcaacccgctccaaggaatcgcgggcccagtgtcactaggcgggaacacccagcgcgcgtgcgccctggcaggaagatggctgtgagggacagggagtggcgccctgcaatatttgcatgtcgctatgtgttctgggaaatcaccataaacgtgaaatgtctttggatttgggaatcttataagttctgtatgagaccacaccggtgtgctgggcggggggcggcgggccctcccgcagaacaccatgcgctcttcggaagcaattcagtctcgttgtgcctgtgacctggtacaacgagactgaattgcttctgaggagcgccttgacagcagccatgggagggccgccccctacctcagtgactcgagatagcggccgcccccgagatctttttatgtacgaaattcgaacgctgacgtcatcaacccgctccaaggaatcgcgggcccagtgtcactaggcgggaacacccagcgcgcgtgcgccctggcaggaagatggctgtgagggacagggagtggcgccctgcaatatttgcatgtcgctatgtgttctgggaaatcaccataaacgtgaaatgtctttggatttgggaatcttataagttctgtatgagaccacaccggtgaagcaaagaaggggcagagggagcccgtgagctgagtgggccagggactgggagaaggagtgaggaggcagggccggcatgcctctgctgctggccagacctgctagctccatgcttcccgtctgcacctgtcactagtaagcatggagctagcaggtttggccgtgtagtgctacccagcgctggctgcctcctcagcattgcaattcctctcccatctgggcaccagtcagctaccctggtgggaatctgggtagccctcgagatagcggccgcccccgagatctttttatgtacgaaattcgaacgctgacgtcatcaacccgctccaaggaatcgcgggcccagtgtcactaggcgggaacacccagcgcgcgtgcgccctggcaggaagatggctgtgagggacagggagtggcgccctgcaatatttgcatgtcgctatgtgttctgggaaatcaccataaacgtgaaatgtctttggatttgggaatcttataagttctgtatgagaccacaccggtgaagcaaagaaggggcagagggagcccgtgagctgagtgggccagggactgggagaaggagtgaggaggcagggccggcatgcctctgctgctggccagacctgctagctccatgcttcccgtctgcacctgtcactagtaagcatggagctagcaggtttggccgtgtagtgctacccagcgctggctgcctcctcagcattgcaattcctctcccatctgggcaccagtcagctaccctggtgggaatctgggtagccctcgagatagcggccgcccccgagatctttttatgtacgaaattcgaacgctgacgtcatcaacccgctccaaggaatcgcgggcccagtgtcactaggcgggaacacccagcgcgcgtgcgccctggcaggaagatggctgtgagggacagggagtggcgccctgcaatatttgcatgtcgctatgtgttctgggaaatcaccataaacgtgaaatgtctttggatttgggaatcttataagttctgtatgagaccacaccggtgtgctgggcggggggcggcgggccctcccgcagaacaccatgcgctcttcggaagcaattcagtctcgttgtgcctgtgacctggtacaacgagactgaattgcttctgaggagcgccttgacagcagccatgggagggccgccccctacctcagtgactcgagatagcggccgcccccgagatctttttatgtacatctagataagtagcatggcgggttaatcattaactacaaggaacccctagtgatggagttggccactccctctctgcgcgctcgctcgctcactgaggccgggcgaccaaaggtcgcccgacgcccgggctttgcccgggcggcctcagtgagcgagcgagcgcgcag

SEQ ID NO: 1855 - DNA, 2011 bp, Artificial Sequence
  Description of Artificial Sequence: Synthetic oligonucleotide
ctgcgcgctcgctcgctcactgaggccgcccgggcaaagcccgggcgtcgggcgacctttggtcgcccggcctcagtgagcgagcgagcgcgcagagagggagtgtagccatgctctaggaagatcaattcaattcacgcgttgacgtacgaaattcgaacgctgacgtcatcaacccgctccaaggaatcgcgggcccagtgtcactaggcgggaacacccagcgcgcgtgcgccctggcaggaagatggctgtgagggacagggagtggcgccctgcaatatttgcatgtcgctatgtgttctgggaaatcaccataaacgtgaaatgtctttggatttgggaatcttataagttctgtatgagaccacaccggtgtgctgggcggggggcggcgggccctcccgcagaacaccatgcgctcttcggaagcaattcagtctcgttgtgcctgtgacctggtacaacgagactgaattgcttctgaggagcgccttgacagcagccatgggagggccgccccctacctcagtgactcgagatagcggccgcccccgagatctttttatgtacgaaattcgaacgctgacgtcatcaacccgctccaaggaatcgcgggcccagtgtcactaggcgggaacacccagcgcgcgtgcgccctggcaggaagatggctgtgagggacagggagtggcgccctgcaatatttgcatgtcgctatgtgttctgggaaatcaccataaacgtgaaatgtctttggatttgggaatcttataagttctgtatgagaccacaccggtgtgctgggcggggggcggcgggccctcccgcagaacaccatgcgctcttcggaagcaattcagtctcgttgtgcctgtgacctggtacaacgagactgaattgcttctgaggagcgccttgacagcagccatgggagggccgccccctacctcagtgactcgagatagcggccgcccccgagatctttttatgtacgaaattcgaacgctgacgtcatcaacccgctccaaggaatcgcgggcccagtgtcactaggcgggaacacccagcgcgcgtgcgccctggcaggaagatggctgtgagggacagggagtggcgccctgcaatatttgcatgtcgctatgtgttctgggaaatcaccataaacgtgaaatgtctttggatttgggaatcttataagttctgtatgagaccacaccggtgtgctgggcggggggcggcgggccctcccgcagaacaccatgcgctcttcggaagcaattcagtctcgttgtgcctgtgacctggtacaacgagactgaattgcttctgaggagcgccttgacagcagccatgggagggccgccccctacctcagtgactcgagatagcggccgcccccgagatctttttatgtacgaaattcgaacgctgacgtcatcaacccgctccaaggaatcgcgggcccagtgtcactaggcgggaacacccagcgcgcgtgcgccctggcaggaagatggctgtgagggacagggagtggcgccctgcaatatttgcatgtcgctatgtgttctgggaaatcaccataaacgtgaaatgtctttggatttgggaatcttataagttctgtatgagaccacaccggtgtgctgggcggggggcggcgggccctcccgcagaacaccatgcgctcttcggaagcaattcagtctcgttgtgcctgtgacctggtacaacgagactgaattgcttctgaggagcgccttgacagcagccatgggagggccgccccctacctcagtgactcgagatagcggccgcccccgagatctttttatgtacatctagataagtagcatggcgggttaatcattaactacaaggaacccctagtgatggagttggccactccctctctgcgcgctcgctcgctcactgaggccgggcgaccaaaggtcgcccgacgcccgggctttgcccgggcggcctcagtgagcgagcgagcgcgcag

SEQ ID NO: 1856 - DNA, 2215 bp, Artificial Sequence
  Description of Artificial Sequence: Synthetic oligonucleotide
ctgcgcgctcgctcgctcactgaggccgcccgggcaaagcccgggcgtcgggcgacctttggtcgcccggcctcagtgagcgagcgagcgcgcagagagggagtgtagccatgctctaggaagatcaattcaattcacgcgttgacgtacgaaattcgaacgctgacgtcatcaacccgctccaaggaatcgcgggcccagtgtcactaggcgggaacacccagcgcgcgtgcgccctggcaggaagatggctgtgagggacagggagtggcgccctgcaatatttgcatgtcgctatgtgttctgggaaatcaccataaacgtgaaatgtctttggatttgggaatcttataagttctgtatgagaccacaccggtgtgctgggcggggggcggcgggccctcccgcagaacaccatgcgctcttcggaagcaattcagtctcgttgtgcctgtgacctggtacaacgagactgaattgcttctgaggagcgccttgacagcagccatgggagggccgccccctacctcagtgactcgagatagcggccgcccccgagatctttttatgtacgaaattcgaacgctgacgtcatcaacccgctccaaggaatcgcgggcccagtgtcactaggcgggaacacccagcgcgcgtgcgccctggcaggaagatggctgtgagggacagggagtggcgccctgcaatatttgcatgtcgctatgtgttctgggaaatcaccataaacgtgaaatgtctttggatttgggaatcttataagttctgtatgagaccacaccggtgaagcaaagaaggggcagagggagcccgtgagctgagtgggccagggactgggagaaggagtgaggaggcagggccggcatgcctctgctgctggccagacctgctagctccatgcttcccgtctgcacctgtcactagtaagcatggagctagcaggtttggccgtgtagtgctacccagcgctggctgcctcctcagcattgcaattcctctcccatctgggcaccagtcagctaccctggtgggaatctgggtagccctcgagatagcggccgcccccgagatctttttatgtacgaaattcgaacgctgacgtcatcaacccgctccaaggaatcgcgggcccagtgtcactaggcgggaacacccagcgcgcgtgcgccctggcaggaagatggctgtgagggacagggagtggcgccctgcaatatttgcatgtcgctatgtgttctgggaaatcaccataaacgtgaaatgtctttggatttgggaatcttataagttctgtatgagaccacaccggtgtgctgggcggggggcggcgggccctcccgcagaacaccatgcgctcttcggaagcaattcagtctcgttgtgcctgtgacctggtacaacgagactgaattgcttctgaggagcgccttgacagcagccatgggagggccgccccctacctcagtgactcgagatagcggccgcccccgagatctttttatgtacgaaattcgaacgctgacgtcatcaacccgctccaaggaatcgcgggcccagtgtcactaggcgggaacacccagcgcgcgtgcgccctggcaggaagatggctgtgagggacagggagtggcgccctgcaatatttgcatgtcgctatgtgttctgggaaatcaccataaacgtgaaatgtctttggatttgggaatcttataagttctgtatgagaccacaccggtgaagcaaagaaggggcagagggagcccgtgagctgagtgggccagggactgggagaaggagtgaggaggcagggccggcatgcctctgctgctggccagacctgctagctccatgcttcccgtctgcacctgtcactagtaagcatggagctagcaggtttggccgtgtagtgctacccagcgctggctgcctcctcagcattgcaattcctctcccatctgggcaccagtcagctaccctggtgggaatctgggtagccctcgagatagcggccgcccccgagatctttttatgtacatctagataagtagcatggcgggttaatcattaactacaaggaacccctagtgatggagttggccactccctctctgcgcgctcgctcgctcactgaggccgggcgaccaaaggtcgcccgacgcccgggctttgcccgggcggcctcagtgagcgagcgagcgcgcag

SEQ ID NO: 1857 - DNA, 2208 bp, Artificial Sequence
  Description of Artificial Sequence: Synthetic oligonucleotide
ctgcgcgctcgctcgctcactgaggccgcccgggcaaagcccgggcgtcgggcgacctttggtcgcccggcctcagtgagcgagcgagcgcgcagagagggagtgtagccatgctctaggaagatcaattcaattcacgcgtcgacattgattattgactagttattaatagtaatcaattacggggtcattagttcatagcccatatatggagttccgcgttacataacttacggtaaatggcccgcctggctgaccgcccaacgacccccgcccattgacgtcaataatgacgtatgttcccatagtaacgccaatagggactttccattgacgtcaatgggtggagtatttacggtaaactgcccacttggcagtacatcaagtgtatcatatgccaagtacgccccctattgacgtcaatgacggtaaatggcccgcctggcattatgcccagtacatgaccttatgggactttcctacttggcagtacatctacgtattagtcatcgctattaccatgtcgaggccacgttctgcttcactctccccatctcccccccctccccacccccaattttgtatttatttattttttaattattttgtgcagcgatgggggcggggggggggggcgcgcgccaggcggggcggggcggggcgaggggcggggcggggcgaggcggagaggtgcggcggcagccaatcagagcggcgcgctccgaaagtttccttttatggcgaggcggcggcggcggcggccctataaaaagcgaagcgcgcggcgggcgggagcaagcttgaactgaaaaaccagaaagttaactggtaagtttagtctttttgtcttttatttcaggtcccggatccggtggtggtgcaaatcaaagaactgctcctcagtggatgttgcctttacttctaggcctgtacggaagtgttacttctgctctaaaagctgcggaattgtacccgcggccgatccaccggtaaacttaagcttggtaccgagctcgtcgacgaagcaaagaaggggcagagggagcccgtgagctgagtgggccagggactgggagaaggagtgaggaggcagggccggcatgcctctgctgctggccagacctgctagctccatgcttcccgtctgcacctgtcactagtaagcatggagctagcaggtttggccgtgtagtgctacccagcgctggctgcctcctcagcattgcaattcctctcccatctgggcaccagtcagctaccctggtgggaatctgggtagccctcgacgtgctgggcggggggcggcgggccctcccgcagaacaccatgcgctcttcggaagcaattcagtctcgttgtgcctgtgacctggtacaacgagactgaattgcttctgaggagcgccttgacagcagccatgggagggccgccccctacctcagtgactcgacgaagcaaagaaggggcagagggagcccgtgagctgagtgggccagggactgggagaaggagtgaggaggcagggccggcatgcctctgctgctggccagacctgctagctccatgcttcccgtctgcacctgtcactagtaagcatggagctagcaggtttggccgtgtagtgctacccagcgctggctgcctcctcagcattgcaattcctctcccatctgggcaccagtcagctaccctggtgggaatctgggtagccctcgacgtgctgggcggggggcggcgggccctcccgcagaacaccatgcgctcttcggaagcaattcagtctcgttgtgcctgtgacctggtacaacgagactgaattgcttctgaggagcgccttgacagcagccatgggagggccgccccctacctcagtgactcgaggacggggtgaactacgcctgaggatccgatctttttccctctgccaaaaattatggggacatcatgaagccccttgagcatctgacttctggctaataaaggaaatttattttcattgcaatagtgtgttggaattttttgtgtctctcactcggcctaggtagataagtagcatggcgggttaatcattaactacaaggaacccctagtgatggagttggccactccctctctgcgcgctcgctcgctcactgaggccgggcgaccaaaggtcgcccgacgcccgggctttgcccgggcggcctcagtgagcgagcgagcgcgcag

SEQ ID NO: 1858 - DNA, 2208 bp, Artificial Sequence
  Description of Artificial Sequence: Synthetic oligonucleotide
ctgcgcgctcgctcgctcactgaggccgcccgggcaaagcccgggcgtcgggcgacctttggtcgcccggcctcagtgagcgagcgagcgcgcagagagggagtgtagccatgctctaggaagatcaattcaattcacgcgtcgacattgattattgactagttattaatagtaatcaattacggggtcattagttcatagcccatatatggagttccgcgttacataacttacggtaaatggcccgcctggctgaccgcccaacgacccccgcccattgacgtcaataatgacgtatgttcccatagtaacgccaatagggactttccattgacgtcaatgggtggagtatttacggtaaactgcccacttggcagtacatcaagtgtatcatatgccaagtacgccccctattgacgtcaatgacggtaaatggcccgcctggcattatgcccagtacatgaccttatgggactttcctacttggcagtacatctacgtattagtcatcgctattaccatgtcgaggccacgttctgcttcactctccccatctcccccccctccccacccccaattttgtatttatttattttttaattattttgtgcagcgatgggggcggggggggggggcgcgcgccaggcggggcggggcggggcgaggggcggggcggggcgaggcggagaggtgcggcggcagccaatcagagcggcgcgctccgaaagtttccttttatggcgaggcggcggcggcggcggccctataaaaagcgaagcgcgcggcgggcgggagcaagcttgaactgaaaaaccagaaagttaactggtaagtttagtctttttgtcttttatttcaggtcccggatccggtggtggtgcaaatcaaagaactgctcctcagtggatgttgcctttacttctaggcctgtacggaagtgttacttctgctctaaaagctgcggaattgtacccgcggccgatccaccggtaaacttaagcttggtaccgagctcgtcgacgaagcaaagaaggggcagagggagcccgtgagctgagtgggccagggactgggagaaggagtgaggaggcagggccggcatgcctctgctgctggccagacctgctagctccatgcttcccgtctgcacctgtcactagtaagcatggagctagcaggtttggccgtgtagtgctacccagcgctggctgcctcctcagcattgcaattcctctcccatctgggcaccagtcagctaccctggtgggaatctgggtagccctcgacgtgctgggcggggggcggcgggccctcccgcagaacaccatgcgctcttcggaagcaattcagtctcgttgtgcctgtgacctggtacaacgagactgaattgcttctgaggagcgccttgacagcagccatgggagggccgccccctacctcagtgactcgacgtgctgggcggggggcggcgggccctcccgcagaacaccatgcgctcttcggaagcaattcagtctcgttgtgcctgtgacctggtacaacgagactgaattgcttctgaggagcgccttgacagcagccatgggagggccgccccctacctcagtgactcgacgaagcaaagaaggggcagagggagcccgtgagctgagtgggccagggactgggagaaggagtgaggaggcagggccggcatgcctctgctgctggccagacctgctagctccatgcttcccgtctgcacctgtcactagtaagcatggagctagcaggtttggccgtgtagtgctacccagcgctggctgcctcctcagcattgcaattcctctcccatctgggcaccagtcagctaccctggtgggaatctgggtagccctcgaggacggggtgaactacgcctgaggatccgatctttttccctctgccaaaaattatggggacatcatgaagccccttgagcatctgacttctggctaataaaggaaatttattttcattgcaatagtgtgttggaattttttgtgtctctcactcggcctaggtagataagtagcatggcgggttaatcattaactacaaggaacccctagtgatggagttggccactccctctctgcgcgctcgctcgctcactgaggccgggcgaccaaaggtcgcccgacgcccgggctttgcccgggcggcctcagtgagcgagcgagcgcgcag

SEQ ID NO: 1859 - protein, 743 aa, Artificial Sequence
  Description of Artificial Sequence: Synthetic polypeptide
MAADGYLPDWLEDNLSEGIREWWALKPGAPQPKANQQHQDNARGLVLPGYKYLGPGNGLDKGEPVNAADAAALEHDKAYDQQLKAGDNPYLKYNHADAEFQERLKEDTSFGGNLGRAVFQAKKRLLEPLGLVEEAAKTAPGKKRPVEQSPQEPDSSAGIGKSGAQPAKKRLNFGQTGDTESVPDPQPIGEPPAAPSGVGSLTMASGGGAPVADNNEGADGVGSSSGNWHCDSQWLGDRVITTSTRTWALPTYNNHLYKQISNSTSGGSSNDNAYFGYSTPWGYFDFNRFHCHFSPRDWQRLINNNWGFRPKRLNFKLFNIQVKEVTDNNGVKTIANNLTSTVQVFTDSDYQLPYVLGSAHEGCLPPFPADVFMIPQYGYLTLNDGSQAVGRSSFYCLEYFPSQMLRTGNNFQFSYEFENVPFHSSYAHSQSLDRLMNPLIDQYLYYLSRTINGSGQNQQTLKFSVAGPSNMAVQGRNYIPGPSYRQQRVSTTVTQNNNSEFAWPGASSWALNGRNSLMNPGPAMASHKEGEDRFFPLSGSLIFGKQGTGRDNVDADKVMITNEEEIKTTNPVATESYGQVATNHQSDGTLAVPFKAQAQTGWVQNQGILPGMVWQDRDVYLQGPIWAKIPHTDGNFHPSPLMGGFGMKHPPPQILIKNTPVPADPPTAFNKDKLNSFITQYSTGQVSVEIEWELQKENSKRWNPEIQYTSNYYKSNNVEFAVNTEGVYSEPRPIGTRYLTRNL

SEQ ID NO: 1860 - protein, 743 aa, Artificial Sequence
  Description of Artificial Sequence: Synthetic polypeptide
MAADGYLPDWLEDNLSEGIREWWALKPGAPQPKANQQHQDNARGLVLPGYKYLGPGNGLDKGEPVNAADAAALEHDKAYDQQLKAGDNPYLKYNHADAEFQERLKEDTSFGGNLGRAVFQAKKRLLEPLGLVEEAAKTAPGKKRPVEQSPQEPDSSAGIGKSGAQPAKKRLNFGQTGDTESVPDPQPIGEPPAAPSGVGSLTMASGGGAPVADNNEGADGVGSSSGNWHCDSQWLGDRVITTSTRTWALPTYNNHLYKQISNSTSGGSSNDNAYFGYSTPWGYFDFNRFHCHFSPRDWQRLINNNWGFRPKRLNFKLFNIQVKEVTDNNGVKTIANNLTSTVQVFTDSDYQLPYVLGSAHEGCLPPFPADVFMIPQYGYLTLNDGSQAVGRSSFYCLEYFPSQMLRTGNNFQFSYEFENVPFHSSYAHSQSLDRLMNPLIDQYLYYLSRTINGSGQNQQTLKFSVAGPSNMAVQGRNYIPGPSYRQQRVSTTVTQNNNSEFAWPGASSWALNGRNSLMNPGPAMASHKEGEDRFFPLSGSLIFGKQGTGRDNVDADKVMITNEEEIKTTNPVATESYGQVATNHQSAQQAVRTSLAQAQTGWVQNQGILPGMVWQDRDVYLQGPIWAKIPHTDGNFHPSPLMGGFGMKHPPPQILIKNTPVPADPPTAFNKDKLNSFITQYSTGQVSVEIEWELQKENSKRWNPEIQYTSNYYKSNNVEFAVNTEGVYSEPRPIGTRYLTRNL

SEQ ID NO: 1861 - protein, 736 aa, Artificial Sequence
  Description of Artificial Sequence: Synthetic polypeptide
MAADGYLPDWLEDNLSEGIREWWALKPGAPQPKANQQHQDNARGLVLPGYKYLGPGNGLDKGEPVNAADAAALEHDKAYDQQLKAGDNPYLKYNHADAEFQERLKEDTSFGGNLGRAVFQAKKRLLEPLGLVEEAAKTAPGKKRPVEQSPQEPDSSAGIGKSGAQPAKKRLNFGQTGDTESVPDPQPIGEPPAAPSGVGSLTMASGGGAPVADNNEGADGVGSSSGNWHCDSQWLGDRVITTSTRTWALPTYNNHLYKQISNSTSGGSSNDNAYFGYSTPWGYFDFNRFHCHFSPRDWQRLINNNWGFRPKRLNFKLFNIQVKEVTDNNGVKTIANNLTSTVQVFTDSDYQLPYVLGSAHEGCLPPFPADVFMIPQYGYLTLNDGSQAVGRSSFYCLEYFPSQMLRTGNNFQFSYEFENVPFHSSYAHSQSLDRLMNPLIDQYLYYLSRTINGSGQNQQTLKFSVAGPSNMAVQGRNYIPGPSYRQQRVSTTVTQNNNSEFAWPGASSWALNGRNSLMNPGPAMASHKEGEDRFFPLSGSLIFGKQGTGRDNVDADKVMITNEEEIKTTNPVATESYGQVATNHQSAQAQAQTGWVQNQGILPGMVWQDRDVYLQGPIWAKIPHTDGNFHPSPLMGGFGMKHPPPQILIKNTPVPADPPTAFNKDKLNSFITQYSTGQVSVEIEWELQKENSKRWNPEIQYTSNYYKSNNVEFAVNTEGVYSEPRPIGTRYLTRNL

SEQ ID NO: 1862 - protein, 534 aa, Artificial Sequence
  Description of Artificial Sequence: Synthetic polypeptide
MAEGGGGAMGDSSGGADGVGNASGNWHCDSQWMGNTVITKTTRTWVLPSYNNHIYKAITSGTSQDANVQYAGYSTPWGYFDFNRFHCHFSPRDWQRLINNHWGIRPKSLKFKIFNVQVKEVTTQDQTKTIANNLTSTIQVFTDDEHQLPYVLGSATEGTMPPFPSDVYALPQYGYCTMHTNQNGARFNDRSAFYCLEYFPSQMLRTGNNFEFTFDFEEVPFHSMFAHSQDLDRLMNPLVDQYLWNFNEVDSSRNAQFKKAVKGAYGTMGRNWLPGPKFLDQRVRAYTGGTDNYANWNIWSNGNKVNLKDRQYLLQPGPVSATYTEGEASSLPAQNILGIAKDPYRSGSTTAGISDIMVTEEQEVAPTNGVGWKPYGRTVTNEQNTTTAPTSSDLDVLGALPGMVWQNRDIYLQGPIGAKIPKTDGKFHPSPNLGGFGLHNPPPQVFIKNTPVPADPPVEYVHQKWNSYITQYSTGQCTVEMVWELRKENSKRWNPEIQFTSNFSNRTSIMFAPNETGGYVEDRLIGTRYLTQNL

SEQ ID NO: 1863 - protein, 554 aa, Artificial Sequence
  Description of Artificial Sequence: Synthetic polypeptide
MTSVNSAEASTGAGGGGSNPVKSMWSEGATFSANSVTCTFSRQFLIPYDPEHHYKVFSPAASSCHNASGKEAKVCTISPIMGYSTPWRYLDFNALNLFFSPLEFQHLIENYGSIAPDALTVTISEIAVKDVTDKTGGGVQVTDSTTGRLCMLVDHEYKYPYVLGQGQDTLAPELPIWVYFPPQYAYLTVGDVNTQGISGDSKKLASEESAFYVLEHSSFQLLGTGGTATMSYKFPPVPPENLEGCSQHFYEMYNPLYGSRLGVPDTLGGDPKFRSLTHEDHAIQPQNFMPGPLVNSVSTKEGDSFNTGAGKALTGLSTGTSQNTRISLRPGPVSQPYHHWDTDKYVTGINAISHGQTTYGNAEDKEYQQGVGRFPNEKEQLKQLQGLNMHTYFPNKGTQQYTDQIERPLMVGSVWNRRALHYESQLWSKIPNLDDSFKTQFAALGGWGLHQPPPQIFLKILPQSGPIGGIKSMGITTLVQYAVGIMTVTMTFKLGPRKATGRWNPQPGVYPPHAAGHLPYVLYDPTATDAKQHHRHGYEKPEELWTAKSRVHPL

SEQ ID NO: 1864 - protein, 587 aa, Artificial Sequence
  Description of Artificial Sequence: Synthetic polypeptide
MSDGTSQPDGGNAVHSAARVERAADGPGGSGGGGSGGGGVGVSTGSYDNQTHYRFLGDGWVEITALATRLVHLNMPKSENYCRIRVHNTTDTSVKGNMAKDDAHEQIWTPWSLVDANAWGVWLQPSDWQYICNTMSQLNLVSLDQEIFNVVLKTVTEQDSGGQAIKIYNNDLTACMMVAVDSNNILPYTPAANSMETLGFYPWKPTIASPYRYYFCVDRDLSVTYENQEGTIEHNVMGTPKGMNSQFFTIENTQQITLLRTGDEFATGTYYFDTNPVKLTHTWQTNRQLGQPPLLSTFPEADTDAGTLTAQGSRHGATQMEVNWVSEAIRTRPAQVGFCQPHNDFEASRAGPFAAPKVPADVTQGMDREANGSVRYSYGKQHGENWAAHGPAPERYTWDETNFGSGRDTRDGFIQSAPLVVPPPLNGILTNANPIGTKNDIHFSNVFNSYGPLTTFSHPSPVYPQGQIWDKELDLEHKPRLHITAPFVCKNNAPGQMLVRLGPNLTDQYDPNGATLSRIVTYGTFFWKGKLTMRAKLRANTTWNPVYQVSVEDNGNSYMSVTKWLPTATGNMQSVPLITRPVARNTY

SEQ ID NO: 1865 - protein, 584 aa, Artificial Sequence
  Description of Artificial Sequence: Synthetic polypeptide
MSDGAVQPDGGQPAVRNERATGSGNGSGGGGGGGSGGVGISTGTFNNQTEFKFLENGWVEITANSSRLVHLNMPESENYKRVVVNNMDKTAVKGNMALDDIHVEIVTPWSLVDANAWGVWFNPGDWQLIVNTMSELHLVSFEQEIFNVVLKTVSESATQPPTKVYNNDLTASLMVALDSNNTMPFTPAAMRSETLGFYPWKPTIPTPWRYYFQWDRTLIPSHTGTSGTPTNVYHGTDPDDVQFYTIENSVPVHLLRTGDEFATGTFFFDCKPCRLTHTWQTNRALGLPPFLNSLPQSEGATNFGDIGVQQDKRRGVTQMGNTDYITEATIMRPAEVGYSAPYYSFEASTQGPFKTPIAAGRGGAQTDENQAADGDPRYAFGRQHGQKTTTTGETPERFTYIAHQDTGRYPEGDWIQNINFNLPVTNDNVLLPTDPIGGKTGINYTNIFNTYGPLTALNNVPPVYPNGQIWDKEFDTDLKPRLHINAPFVCQNNCPGQLFVKVAPNLTNQYDPDASANMSRIVTYSDFWWKGKLVFKAKLRASHTWNPIQQMSINVDNQFNYVPNNIGAMKIVYEKSQLAPRKLY

SEQ ID NO: 1866 - protein, 548 aa, Artificial Sequence
  Description of Artificial Sequence: Synthetic polypeptide
GVGISTGTFNNQTEFKFLENGWVEITANSSRLVHLNMPESENYRRVVVNNMDKTAVNGNMALDDIHAQIVTPWSLVDANAWGVWFNPGDWQLIVNTMSELHLVSFEQEIFNVVLKTVSESATQPPTKVYNNDLTASLMVALDSNNTMPFTPAAMRSETLGFYPWKPTIPTPWRYYFQWDRTLIPSHTGTSGTPTNIYHGTDPDDVQFYTIENSVPVHLLRTGDEFATGTFFFDCKPCRLTHTWQTNRALGLPPFLNSLPQSEGATNFGDIGVQQDKRRGVTQMGNTNYITEATIMRPAEVGYSAPYYSFEASTQGPFKTPIAAGRGGAQTDENQAADGNPRYAFGRQHGQKTTTTGETPERFTYIAHQDTGRYPEGDWIQNINFNLPVTNDNVLLPTDPIGGKTGINYTNIFNTYGPLTALNNVPPVYPNGQIWDKEFDTDLKPRLHVNAPFVCQNNCPGQLFVKVAPNLTNEYDPDASANMSRIVTYSDFWWKGKLVFKAKLRASHTWNPIQQMSINVDNQFNYVPSNIGGMKIVYEKSQLAPRKLY

SEQ ID NO: 1867 - protein, 736 aa, Artificial Sequence; identical to SEQ ID NO: 101
  Description of Artificial Sequence: Synthetic polypeptide

SEQ ID NO: 1868 - protein, 736 aa, Artificial Sequence; identical to SEQ ID NO: 96
  Description of Artificial Sequence: Synthetic polypeptide

SEQ ID NO: 1869 - protein, 736 aa, Artificial Sequence
  Description of Artificial Sequence: Synthetic polypeptide
MAADGYLPDWLEDTLSEGIRQWWKLKPGPPPPKPAERHKDDSRGLVLPGYKYLGPFNGLDKGEPVNEADAAALEHDKAYDRQLDSGDNPYLKYNHADAEFQERLKEDTSFGGNLGRAVFQAKKRVLEPLGLVEEPVKTAPGKKRPVEHSPVEEPDSSSGTGKAGQQPARKRLNFGQTGDADSVPDPQPLGQPPAAPSGLGTNTMATGSGAPMADNNEGADGVGNSSGNWHCDSTWMGDRVITTSTRTWALPTYNNHLYKQISSQSGASNDNHYFGYSTPWGYFDFNRFHCHFSPRDWQRLINNNWGFRPKRLNFKLFNIQVKEVTQNDGTTTIANNLTSTVQVFTDSEYQLPYVLGSAHQGCLPPFPADVFMVPQYGYLTLNNGSQAVGRSSFYCLEYFPSQMLRTGNNFTFSYTFEDVPFHSSYAHSQSLDRLMNPLIDQYLYYLSRTNTPSGTTTQSRLQFSQAGASDIRDQSRNWLPGPCYRQQRVSKTSADNNNSEYSWTGATKYHLNGRDSLVNPGPAMASHKDDEEKFFPQSGVLIFGKQGSEKTNVDIEKVMITDEEEIRTTNPVATEQYGSVSTNLQRGNRQAATADVNTQGVLPGMVWQDRDVYLQGPIWAKIPHTDGHFHPSPLMGGFGLKHPPPQILIKNTPVPANPSTTFSAAKFASFITQYSTGQVSVEIEWELQKENSKRWNPEIQYTSNYNKSVNVDFTVDTNGVYSEPRPIGTRYLTRNL

SEQ ID NO: 1870 - protein, 736 aa, Artificial Sequence
  Description of Artificial Sequence: Synthetic polypeptide
MAADGYLPDWLEDNLSEGIREWWDLKPGAPKPKANQQKQDDGRGLVLPGYKYLGPFNGLDKGEPVNAADAAALEHDKAYDQQLKAGDNPYLRYNHADAEFQERLQEDTSFGGNLGRAVFQAKKRVLEPFGLVEEGAKTAPGKKRPVEQSPQEPDSSSGIGKTGQQPAKKRLNFGQTGDSESVPDPQPLGEPPATPAAVGPTTMASGGGAPMADNNEGADGVGNASGNWHCDSTWLGDRVITTSTRTWALPTYNNHLYKQISSASTGASNDNHYFGYSTPWGYFDFNRFHCHFSPRDWQRLINNNWGFRPKRLNFKLFNVQVKEVTTNDGVTTIANNLTSTVQVFSDSEYQLPYVLGSAHQGCLPPFPADVFMIPQYGYLTLNNGSQAVGRSSFYCLEYFPSQMLRTGNNFTFSYTFEDVPFHSSYAHSQSLDRLMNPLIDQYLYYLNRTQDQSGSAQNKDLLFSRGSPAGMSVQPKNWLPGPCYRQQRVSKTKTDNNNSNFTWTGASKYNLNGRESIINPGTAMASHKDDKNKFFPMSGVMIFGKESAGASNTALDNVMITDEEEIKATNPVATERFGTVAVNLQSSSTDPATGDVHVMGALPGMVWQDRDVYLQGPIWAKIPHTDGHFHPSPLMGGFGLKNPPPQILIKNTPVPANPPAEFSATKFASFITQYSTGQVSVEIEWELQKENSKRWNPEVQYTSNYAKSANVDFTVDNNGLYTEPRPIGTRYLTRPL

SEQ ID NO: 1871 - protein, 737 aa, Artificial Sequence
  Description of Artificial Sequence: Synthetic polypeptide
MAADGYLPDWLEDTLSEGIRQWWKLKPGPPPPKPAERHKDDSRGLVLPGYKYLGPGNGLDKGEPVNAADAAALEHDKAYDQQLKAGDNPYLKYNHADAEFQERLKEDTSFGGNLGRAVFQAKKRVLEPLGLVEEGAKTAPGKKRPVEPSPQRSPDSSTGIGKKGQQPARKRLNFGQTGDSESVPDPQPLGEPPATPAAVGPTTMASGGGAPMADNNEGADGVGNASGNWHCDSTWLGDRVITTSTRTWALPTYNNHLYKQISSASTGASNDNHYFGYSTPWGYFDFNRFHCHFSPRDWQRLINNNWGFRPKRLNFKLFNIQVKEVTTNDGVTTIANNLTSTVQVFSDSEYQLPYVLGSAHQGCLPPFPADVFMIPQYGYLTLNNGSQAVGRSSFYCLEYFPSQMLRTGNNFTFSYTFEDVPFHSSYAHSQSLDRLMNPLIDQYLYYLNRTQNQSGSAQNKDLLFSRGSPAGMSVQPKNWLPGPCYRQQRVSKTKTDNNNSNFTWTGASKYNLNGRESIINPGTAMASHKDDKDKFFPMSGVMIFGKESAGASNTALDNVMITDEEEIKATNPVATERFGTVAVNLQSSSTDPATEDVHVMGALPGMVWQDRDVYLQGPIWAKIPHTDGHFHPSPLMGGFGLKNPPPQILIKNTPVPANPPAEFSATKFASFITQYSTGQVSVEIEWELQKENSKRWNPEVQYTSNYAKSANVDFTVDNNGLYTEPRPIGTRYLTRNL

SEQ ID NO: 1872 - protein, 736 aa, Artificial Sequence
  Description of Artificial Sequence: Synthetic polypeptide
MAADGYLPDWLEDNLSEGIREWWDLKPGAPKPKANQQKQDDGRGLVLPGYKYLGPFNGLDKGEPVNAADAAALEHDKAYDQQLKAGDNPYLRYNHADAEFQERLQEDTSFGGNLGRAVFQAKKRVLEPFGLVEEGAKTAPGKKRPVEQSPQEPDSSSGIGKTGQQPAKKRLNFGQTGDSESVPDPQPLGEPPATPAAVGPTTMASGGGAPMADNNEGADGVGNASGNWHCDSTWLGDRVITTSTRTWALPTYNNHLYKQISSASTGASNDNHYFGYSTPWGYFDFNRFHCHFSPRDWQRLINNNWGFRPKRLNFKLFNVQVKEVTTNDGVTTIANNLTSTVQVFSDSEYQLPYVLGSAHQGCLPPFPADVFMIPQYGYLTLNNGSQAVGRSSFYCLEYFPSQMLRTGNNFTFSYTFEDVPFHSSYAHSQSLDRLMNPLIDQYLYYLNRTQDQSGSAQNKDLLFSRGSPAGMSVQPKNWLPGPCYRQQRVSKTKTDNNNSNFTWTGASKYNLNGRESIINPGTAMASHKDDKNKFFPMSGVMIFGKESAGASNTALDNVMITDEEEIKATNPVATERFGTVAVNLQSSSTDPATGDVHVMGALPGMVWQDRDVYLQGPIWAKIPHTDGHFHPSPLMGGFGLKHPPPQILIKNTPVPANPPAEFSATKFASFITQYSTGQVSVEIEWELQKENSKRWNPEVQYTSNYAKSANVDFTVDNNGLYTEPRPIGTRYLTRPL

SEQ ID NO: 1873 - protein, 736 aa, Artificial Sequence
  Description of Artificial Sequence: Synthetic polypeptide
MAADGYLPDWLEDNLSEGIREWWDLKPGAPKPKANQQKQDDGRGLVLPGYKYLGPFNGLDKGEPVNAADAAALEHDKAYDQQLKAGDNPYLRYNHADAEFQERLQEDTSFGGNLGRAVFQAKKRVLEPFGLVEEGAKTAPGKKRPVEQSPQEPDSSSGIGKTGQQPAKKRLNFGQTGDSESVPDPQPLGEPPATPAAVGPTTMASGGGAPMADNNEGADGVGNASGNWHCDSTWLGDRVITTSTRTWALPTYNNHLYKQISSASTGASNDNHYFGYSTPWGYFDFNRFHCHFSPRDWQRLINNNWGFRPKRLNFKLFNVQVKEVTTNDGVTTIANNLTSTVQVFSDSEYQLPYVLGSAHQGCLPPFPADVFMIPQYGYLTLNNGSQAVGRSSFYCLEYFPSQMLRTGNNFTFSYTFEDVPFHSSYAHSQSLDRLMNPLIDQYLYYLNRTQDQSGSAQNKDLLFSRGSPAGMSVQPKNWLPGPCYRQQRVSKTKTDNNNSNFTWTGASKYNLNGRESIINPGTAMASHKDDKDKFFPMSGVMIFGKESAGASNTALDNVMITDEEEIKATNPVATERFGTVAVNLQSSSTDPATGDVHVMGALPGMVWQDRDVYLQGPIWAKIPHTDGHFHPSPLMGGFGLKHPPPQILIKNTPVPANPPAEFSATKFASFITQYSTGQVSVEIEWELQKENSKRWNPEVQYTSNYAKSANVDFTVDNNGLYTEPRPIGTRYLTRPL

SEQ ID NO: 1874 - protein, 736 aa, Artificial Sequence
  Description of Artificial Sequence: Synthetic polypeptide
MAADGYLPDWLEDNLSEGIREWWDLKPGAPKPKANQQKQDDGRGLVLPGYKYLGPFNGLDKGEPVNAADAAALEHDKAYDQQLKAGDNPYLRYNHADAEFQERLQEDTSFGGNLGRAVFQAKKRVLEPFGLVEEGAKTAPGKKRPVEQSPQEPDSSSGIGKTGQQPAKKRLNFGQTGDSESVPDPQPLGEPPATPAAVGPTTMASGGGAPMADNNEGADGVGNASGNWHCDSTWLGDRVITTSTRTWALPTYNNHLYKQISSASTGASNDNHYFGYSTPWGYFDFNRFHCHFSPRDWQRLINNNWGFRPKRLNFKLFNIQVKEVTTNDGVTTIANNLTSTVQVFSDSEYQLPYVLGSAHQGCLPPFPADVFMIPQYGYLTLNNGSQAVGRSSFYCLEYFPSQMLRTGNNFTFSYTFEDVPFHSSYAHSQSLDRLMNPLIDQYLYYLNRTQDQSGSAQNKDLLFSRGSPAGMSVQPKNWLPGPCYRQQRVSKTKTDNNNSNFTWTGASKYNLNGRESIINPGTAMASHKDDKNKFFPMSGVMIFGKESAGASNTALDNVMITDEEEIKATNPVATERFGTVAVNLQSSSTDPATGDVHVMGALPGMVWQDRDVYLQGPIWAKIPHTDGHFHPSPLMGGFGLKHPPPQILIKNTPVPANPPAEFSATKFASFITQYSTGQVSVEIEWELQKENSKRWNPEVQYTSNYAKSANVDFTVDNNGLYTEPRPIGTRYLTRPL

SEQ ID NO: 1875 - protein, 736 aa, Artificial Sequence
  Description of Artificial Sequence: Synthetic polypeptide
MAADGYLPDWLEDNLSEGIREWWDLKPGAPKPKANQQKQDDGRGLVLPGYKYLGPFNGLDKGEPVNAADAAALEHDKAYDQQLKAGDNPYLRYNHADAEFQERLQEDTSFGGNLGRAVFQAKKRVLEPFGLVEEGAKTAPGKKRPVEQSPQEPDSSSGIGKTGQQPAKKRLNFGQTGDSESVPDPQPLGEPPATPAAVGPTTMASGGGAPMADNNEGADGVGNASGNWHCDSTWLGDRVITTSTRTWALPTYNNHLYKQISSASTGASNDNHYFGYSTPWGYFDFNRFHCHFSPRDWQRLINNNWGFRPKRLNFKLFNVQVKEVTTNDGVTTIANNLTSTVQVFSDSEYQLPYVLGSAHQGCLPPFPADVFMIPQYGYLTLNNGSQAVGRSSFYCLEYFPSQMLRTGNNFTFSYTFEDVPFHSSYAHSQSLDRLMNPLIDQYLYYLNRTQNQSGSAQNKDLLFSRGSPAGMSVQPKNWLPGPCYRQQRVSKTKTDNNNSNFTWTGASKYNLNGRESIINPGTAMASHKDDKDKFFPMSGVMIFGKESAGASNTALDNVMITDEEEIKATNPVATERFGTVAVNLQSSSTDPATGDVHVMGALPGMVWQDRDVYLQGPIWAKIPHTDGHFHPSPLMGGFGLKHPPPQILIKNTPVPANPPAEFSATKFASFITQYSTGQVSVEIEWELQKENSKRWNPEVQYTSNYAKSANVDFTVDNNGLYTEPRPIGTRYLTRPL

SEQ ID NO: 1876 - protein, 736 aa, Artificial Sequence
  Description of Artificial Sequence: Synthetic polypeptide
MAADGYLPDWLEDNLSEGIREWWDLKPGAPKPKANQQKQDDGRGLVLPGYKYLGPFNGLDKGEPVNAADAAALEHDKAYDQQLKAGDNPYLRYNHADAEFQERLQEDTSFGGNLGRAVFQAKKRVLEPFGLVEEGAKTAPGKKRPVEQSPQEPDSSSGIGKTGQQPAKKRLNFGQTGDSESVPDPQPLGEPPATPAAVGPTTMASGGGAPMADNNEGADGVGNASGNWHCDSTWLGDRVITTSTRTWALPTYNNHLYKQISSASTGASNDNHYFGYSTPWGYFDFNRFHCHFSPRDWQRLINNNWGFRPKRLNFKLFNVQVKEVTTNDGVTTIANNLTSTVQVFSDSEYQLPYVLGSAHQGCLPPFPADVFMIPQYGYLTLNNGSQAVGRSSFYCLEYFPSQMLRTGNNFTFSYTFEDVPFHSSYAHSQSLDRLMNPLIDQYLYYLNRTQNQSGSAQNKDLLFSRGSPAGMSVQPKNWLPGPCYRQQRVSKTKTDNNNSNFTWTGASKYNLNGRESIINPGTAMASHKDDKNKFFPMSGVMIFGKESAGASNTALDNVMITDEEEIKATNPVATERFGTVAVNLQSSSTDPATGDVHVMGALPGMVWQDRDVYLQGPIWAKIPHTDGHFHPSPLMGGFGLKHPPPQILIKNTPVPANPPAEFSATKFASFITQYSTGQVSVEIEWELQKENSKRWNPEVQYTSNYAKSANVDFTVDNNGLYTEPRPIGTRYLTRPL

SEQ ID NO: 1877 - DNA, 2217 bp, Artificial Sequence
  Description of Artificial Sequence: Synthetic polynucleotide
atggctgccgatggttatcttccagattggctcgaggacaacctctctgagggcattcgcgagtggtgggacctgaaacctggagccccgaaacccaaagccaaccagcaaaagcaggacaacggccggggtctggtgcttcctggctacaagtacctcggacccttcaacggactcgacaagggggagcccgtcaacgcggcggacgcagcggccctcgagcacgacaaggcctacgaccagcagctccaagcgggtgacaatccgtacctgcggtataatcacgccgacgccgagtttcaggagcgtctgcaagaagatacgtcttttgggggcaacctcgggcgcgcagtcttccaggccaaaaagcgggttctcgaacctctgggcctggttgaatcgccggttaagacggctcctggaaagaagagaccggtagagccatcaccccagcgctctccagactcctctacgggcatcggcaagaaaggccagcagcccgcaaaaaagagactcaattttgggcagactggcgactcagagtcagtccccgaccctcaaccaatcggagaaccaccagcaggcccctctggtctgggatctggtacaatggctgcaggcggtggcgctccaatggcagacaataacgaaggcgccgacggagtgggtagttcctcaggaaattggcattgcgattccacatggctgggcgacagagtcatcaccaccagcacccgcacctgggccctgcccacctacaacaaccacctctacaagcaaatctccaacgggacctcgggaggaagcaccaacgacaacacctacttcggctacagcaccccctgggggtattttgacttcaacagattccactgccacttttcaccacgtgactggcagcgactcatcaacaacaactggggattccggcccaagaggctcaacttcaagctcttcaacatccaagtcaaggaggtcacgcagaatgaaggcaccaagaccatcgccaataaccttaccagcacgattcaggtctttacggactcggaataccagctcccgtacgtgctcggctcggcgcaccagggctgcctgcctccgttcccggcggacgtcttcatgattcctcagtacgggtacctgactctgaacaatggcagtcaggctgtgggccggtcgtccttctactgcctggagtactttccttctcaaatgctgagaacgggcaacaactttgaattcagctacaacttcgaggacgtgcccttccacagcagctacgcgcacagccagagcctggaccggctgatgaaccctctcatcgaccagtacttgtactacctgtcccggactcaaagcacgggcggtactgcaggaactcagcagttgctattttctcaggccgggcctaacaacatgtcggctcaggccaagaactggctacccggtccctgctaccggcagcaacgcgtctccacgacactgtcgcagaacaacaacagcaactttgcctggacgggtgccaccaagtatcatctgaatggcagagactctctggtgaatcctggcgttgccatggctacccacaaggacgacgaagagcgattttttccatccagcggagtcttaatgtttgggaaacagggagctggaaaagacaacgtggactatagcagcgtgatgctaaccagcgaggaagaaataaagaccaccaacccagtggccacagaacagtacggcgtggtggccgataacctgcaacagcaaaacgccgctcctattgtaggggccgtcaatagtcaaggagccttacctggcatggtgtggcagaaccgggacgtgtacctgcagggtcccatctgggccaagattcctcatacggacggcaactttcatccctcgccgctgatgggaggctttggactgaagcatccgcctcctcagatcctgattaaaaacacacctgttcccgcggatcctccgaccaccttcaatcaggccaagctggcttctttcatcacgcagtacagtaccggccaggtcagcgtggagatcgagtgggagctgcagaaggagaacagcaaacgctggaacccagagattcagtacacttccaactactacaaatctacaaatgtggactttgctgtcaatactgagggtacttattccgagcctcgccccattggcacccgttacctcacccgtaatctgtaa

SEQ ID NO: 1878 - protein, 738 aa, Artificial Sequence
  Description of Artificial Sequence: Synthetic polypeptide
MAADGYLPDWLEDNLSEGIREWWDLKPGAPKPKANQQKQDNGRGLVLPGYKYLGPFNGLDKGEPVNAADAAALEHDKAYDQQLQAGDNPYLRYNHADAEFQERLQEDTSFGGNLGRAVFQAKKRVLEPLGLVESPVKTAPGKKRPVEPSPQRSPDSSTGIGKKGQQPAKKRLNFGQTGDSESVPDPQPIGEPPAGPSGLGSGTMAAGGGAPMADNNEGADGVGSSSGNWHCDSTWLGDRVITTSTRTWALPTYNNHLYKQISNGTSGGSTNDNTYFGYSTPWGYFDFNRFHCHFSPRDWQRLINNNWGFRPKRLNFKLFNIQVKEVTQNEGTKTIANNLTSTIQVFTDSEYQLPYVLGSAHQGCLPPFPADVFMIPQYGYLTLNNGSQAVGRSSFYCLEYFPSQMLRTGNNFEFSYNFEDVPFHSSYAHSQSLDRLMNPLIDQYLYYLSRTQSTGGTAGTQQLLFSQAGPNNMSAQAKNWLPGPCYRQQRVSTTLSQNNNSNFAWTGATKYHLNGRDSLVNPGVAMATHKDDEERFFPSSGVLMFGKQGAGKDNVDYSSVMLTSEEEIKTTNPVATEQYGVVADNLQQQNAAPIVGAVNSQGALPGMVWQNRDVYLQGPIWAKIPHTDGNFHPSPLMGGFGLKHPPPQILIKNTPVPADPPTTFNQAKLASFITQYSTGQVSVEIEWELQKENSKRWNPEIQYTSNYYKSTNVDFAVNTEGTYSEPRPIGTRYLTRNL

SEQ ID NO: 1879 - protein, 738 aa, Artificial Sequence; identical to SEQ ID NO: 1878
  Description of Artificial Sequence: Synthetic polypeptide

SEQ ID NO: 1880 - DNA, 4472 bp, Artificial Sequence
  Description of Artificial Sequence: Synthetic polynucleotide
ctccatcactaggggtaaccgcgaagcgcctcccacgctgccgcgtcagcgctgacgtaaattacgtcataggggagtggtcctgtattagctgtcacgtgagtgcttttgcgacattttgcgacaccacgtggccattcatggtatatatggccgagtgagcgagcaggatctccattttgaccgcgaaatttgaacgagcagcagccatgccgggcttctacgagatcgtgcttaaggtgccgagcgacctggacgagcacctgccgggcatttctgactcgtttgtgaactgggtggcagagaaggaatgggagctgcccccggattctgacatggatcggaatctgattgagcaggcacccctgaccgtggccgagaagctacagcgcgacttcctggtccaatggcgccgcgtgagtaaggccccggaggccctcttctttgttcagttcgagaagggcgagtcctacttccacctccatattctggtagagaccacgggggtcaaatccatggtgctgggccgcttcctgagtcagattcgggacaagctggtgcagaccatctaccgcgggatcgagccgaccctgcccaactggttcgcggtgacaaagacgcgtaatggcgccggaggggggaacaaggtggtggacgagtgctacatccccaactacctgctgcccaagactcagcccgagctgcagtgggcgtggactaacatggaggagtatataagcgcgtgcttgaacctggccgagcgcaaacggctcgtggcgcagcacctgacccacgtcagccagacccaggagcagaacaaggagaatctgaacccgaattctgacgcgcctgtcatccggtcaaaaacctccgcgcgctacatggagctggtcgggtggctggtggaccggggcatcacctccgagaagcagtggatccaggaggaccaggcctcgtacatctccttcaacgccgcctccaactcgcggtctcagatcaaggccgcgctggacaatgccggcaagatcatggcgctgaccaaatccgcgcccgactacctggtaggccccgctctgcccgcggacattaaatccaaccgcatctaccgcatcctggagctgaatggctacgaccctgcctacgccggttccgtctttctcggctgggcccagaaaaagtttggcaaaaggaacaccatctggctgtttgggccggccaccacgggcaagaccaacatcgcggaagccatcgcccacgccgtgcccttctacggctgcgtcaactggaccaatgagaactttcccttcaacgattgcgtcgacaagatggtgatctggtgggaggagggcaagatgacggccaaggtcgtggagtccgccaaggccattctcggcggcagcaaggtgcgcgtggaccaaaagtgcaagtcgtccgcccagatcgatcccacccccgtgatcgtcacctccaacaccaacatgtgcgccgtgattgacgggaacagcaccaccttcgagcaccagcagccgttgcaggaccggatgttcaaatttgaacttacccgccgtctggagcacgactttggcaaggtgacaaagcaggaagtcaaagagttcttccgctgggcgcaggatcacgtgaccgaggtggcgcatgagttctacgtcagaaagggtggagctaacaaaagacccgcccccgatgacgcggatataagcgagcccaagcgggcctgcccctcagtcgcggatccatcgacgtcagacgcggaaggagctccggtggactttgccgacaggtaccaaaacaaatgttctcgtcacgcgggcatgcttcagatgctgtttccctgcaaaacatgcgagagaatgaatcagaatttcaacatttgcttcacgcacgggaccagagactgttcagaatgtttccctggcgtgtcagaatctcaaccggtcgtcagaaaaaagacgtatcggaaactctgtgcgattcatcatctgctggggcgggcacccgagattgcttgctcggcctgcgacctggtcaacgtggacctggatgactgtgtttctgagcaataaatgacttaaaccaggtatggctgccgatggttatcttccagattggctcgaggacaacctctctgagggcattcgcgagtggtgggacctgaaacctggagccccgaaacccaaagccaaccagcaaaagcaggacaacggccggggtctggtgcttcctggctacaagtacctcggacccttcaacggactcgacaagggggagcccgtcaacgcggcggacgcagcggccctcgagcacgacaaggcctacgaccagcagctccaagcgggtgacaatccgtacctgcggtataatcacgccgacgccgagtttcaggagcgtctgcaagaagatacgtcttttgggggcaacctcgggcgcgcagtcttccaggccaaaaagcgggttctcgaacctctgggcctggttgaatcgccggttaagacggctcctggaaagaagagaccggtagagccatcaccccagcgctctccagactcctctacgggcatcggcaagaaaggccagcagcccgcaaaaaagagactcaattttgggcagactggcgactcagagtcagtccccgaccctcaaccaatcggagaaccaccagcaggcccctctggtctgggatctggtacaatggctgcaggcggtggcgctccaatggcagacaataacgaaggcgccgacggagtgggtagttcctcaggaaattggcattgcgattccacatggctgggcgacagagtcatcaccaccagcacccgcacctgggccctgcccacctacaacaaccacctctacaagcaaatctccaacgggacctcgggaggaagcaccaacgacaacacctacttcggctacagcaccccctgggggtattttgacttcaacagattccactgccacttttcaccacgtgactggcagcgactcatcaacaacaactggggattccggcccaagaggctcaacttcaagctcttcaacatccaagtcaaggaggtcacgcagaatgaaggcaccaagaccatcgccaataaccttaccagcacgattcaggtctttacggactcggaataccagctcccgtacgtgctcggctcggcgcaccagggctgcctgcctccgttcccggcggacgtcttcatgattcctcagtacgggtacctgactctgaacaatggcagtcaggctgtgggccggtcgtccttctactgcctggagtactttccttctcaaatgctgagaacgggcaacaactttgaattcagctacaacttcgaggacgtgcccttccacagcagctacgcgcacagccagagcctggaccggctgatgaaccctctcatcgaccagtacttgtactacctgtcccggactcaaagcacgggcggtactgcaggaactcagcagttgctattttctcaggccgggcctaacaacatgtcggctcaggccaagaactggctacccggtccctgctaccggcagcaacgcgtctccacgacactgtcgcagaacaacaacagcaactttgcctggacgggtgccaccaagtatcatctgaatggcagagactctctggtgaatcctggcgttgccatggctacccacaaggacgacgaagagcgattttttccatccagcggagtcttaatgtttgggaaacagggagctggaaaagacaacgtggactatagcagcgtgatgctaaccagcgaggaagaaataaagaccaccaacccagtggccacagaacagtacggcgtggtggccgataacctgcaacagcaaaacgccgctcctattgtaggggccgtcaatagtcaaggagccttacctggcatggtgtggcagaaccgggacgtgtacctgcagggtcccatctgggccaagattcctcatacggacggcaactttcatccctcgccgctgatgggaggctttggactgaagcatccgcctcctcagatcctgattaaaaacacacctgttcccgcggatcctccgaccaccttcaatcaggccaagctggcttctttcatcacgcagtacagtaccggccaggtcagcgtggagatcgagtgggagctgcagaaggagaacagcaaacgctggaacccagagattcagtacacttccaactactacaaatctacaaatgtggactttgctgtcaatactgagggtacttattccgagcctcgccccattggcacccgttacctcacccgtaatctgtaattacatgttaatcaataaaccggttaattcgtttcagttgaactttggtctcctgtccttcttatcttatcggttaccatagaaactggttacttattaactgcttggtgcgcttcgcgataaaagacttacgtcatcgggttacccctagtgatgga

SEQ ID NO: 1881 - protein, 738 aa, Artificial Sequence
  Description of Artificial Sequence: Synthetic polypeptide
MAADGYLPDWLEDNLSEGIREWWDLKPGAPKPKANQQKQDNGRGLVLPGYKYLGPFNGLDKGEPVNAADAAALEHDKAYDQQLQAGDNPYLRYNHADAEFQERLQEDTSFGGNLGRAVFQAKKRVLEPLGLVESPVKTAPGKKRPVEPSPQRSPDSSTGIGKKGQQPAKKRLNFGQTGDSESVPDPQPIGEPPAAPSGVGPNTMAAGGGAPMADNNEGADGVGSSSGNWHCDSTWLGDRVITTSTRTWALPTYNNHLYKQISNGTSGGSTNDNTYFGYSTPWGYFDFNRFHCHFSPRDWQRLINNNWGFRPKRLNFKLFNIQVKEVTQNEGTKTIANNLTSTIQVFTDSEYQLPYVLGSAHQGCLPPFPADVFMIPQYGYLTLNNGSQAVGRSSFYCLEYFPSQMLRTGNNFEFSYNFEDVPFHSSYAHSQSLDRLMNPLIDQYLYYLSRTQSTGGTAGTQQLLFSQAGPNNMSAQAKNWLPGPCYRQQRVSTTLSQNNNSNFAWTGATKYHLNGRDSLVNPGVAMATHKDDEERFFPSSGVLMFGKQGAGKDNVDYSSVMLTSEEEIKTTNPVATEQYGVVADNLQQQNAAPIVGAVNSQGALPGMVWQNRDVYLQGPIWAKIPHTDGNFHPSPLMGGFGLKHPPPQILIKNTPVPADPPTTFNQAKLASFITQYSTGQVSVEIEWELQKENSKRWNPEIQYTSNYYKSTNVDFAVNTEGTYSEPRPIGTRYLTRNL

SEQ ID NO: 1882 - protein, 738 aa, Artificial Sequence
  Description of Artificial Sequence: Synthetic polypeptide
MAADGYLPDWLEDNLSEGIREWWDLKPGAPKPKANQQRQDNGRGLVLPGYRYLGPFNGLDKGEPVNAADAAALEHDRAYDQQLQAGDNPYLRYNHADAEFQERLQEDTSFGGNLGRAVFQAKKRVLEPLGLVESPVRTAPGKKRPVEPSPQRSPDSSTGIGKKGQQPARKRLNFGQTGDSESVPDPQPIGEPPAAPSGVGPNTMAAGGGAPMADNNEGADGVGSSSGNWHCDSTWLGDRVITTSTRTWALPTYNNHLYRQISNGTSGGSTNDNTYFGYSTPWGYFDFNRFHCHFSPRDWQRLINNNWGFRPKRLNFKLFNIQVKEVTQNEGTRTIANNLTSTIQVFTDSEYQLPYVLGSAHQGCLPPFPADVFMIPQYGYLTLNNGSQAVGRSSFYCLEYFPSQMLRTGNNFEFSYNFEDVPFHSSYAHSQSLDRLMNPLIDQYLYYLSRTQSTGGTAGTQQLLFSQAGPNNMSAQAKNWLPGPCYRQQRVSTTLSQNNNSNFAWTGATKYHLNGRDSLVNPGVAMATHRDDEERFFPSSGVLMFGRQGAGRDNVDYSSVMLTSEEEIRTTNPVATEQYGVVADNLQQQNAAPIVGAVNSQGALPGMVWQNRDVYLQGPIWAKIPHTDGNFHPSPLMGGFGLKHPPPQILIKNTPVPADPPTTFNQAKLASFITQYSTGQVSVEIEWELQKENSKRWNPEIQYTSNYYKSTNVDFAVNTEGTYSEPRPIGTRYLTRNL

SEQ ID NO: 1883 - protein, 738 aa, Artificial Sequence
  Description of Artificial Sequence: Synthetic polypeptide
MAADGYLPDWLEDNLSEGIREWWDLKPGAPKPKANQQRQDNGRGLVLPGYRYLGPFNGLDKGEPVNAADAAALEHDRAYDQQLQAGDNPYLRYNHADAEFQERLQEDTSFGGNLGRAVFQAKKRVLEPLGLVESPVRTAPGKKRPVEPSPQRSPDSSTGIGKRGQQPARKRLNFGQTGDSESVPDPQPIGEPPAAPSGVGPNTMAAGGGAPMADNNEGADGVGSSSGNWHCDSTWLGDRVITTSTRTWALPTYNNHLYRQISNGTSGGSTNDNTYFGYSTPWGYFDFNRFHCHFSPRDWQRLINNNWGFRPKRLNFKLFNIQVKEVTQNEGTRTIANNLTSTIQVFTDSEYQLPYVLGSAHQGCLPPFPADVFMIPQYGYLTLNNGSQAVGRSSFYCLEYFPSQMLRTGNNFEFSYNFEDVPFHSSYAHSQSLDRLMNPLIDQYLYYLSRTQSTGGTAGTQQLLFSQAGPNNMSAQAKNWLPGPCYRQQRVSTTLSQNNNSNFAWTGATKYHLNGRDSLVNPGVAMATHRDDEERFFPSSGVLMFGKQGAGRDNVDYSSVMLTSEEEIRTTNPVATEQYGVVADNLQQQNAAPIVGAVNSQGALPGMVWQNRDVYLQGPIWAKIPHTDGNFHPSPLMGGFGLKHPPPQILIKNTPVPADPPTTFNQAKLASFITQYSTGQVSVEIEWELQKENSKRWNPEIQYTSNYYKSTNVDFAVNTEGTYSEPRPIGTRYLTRNL

SEQ ID NO: 1884 - protein, 738 aa, Artificial Sequence
  Description of Artificial Sequence: Synthetic polypeptide
MAADGYLPDWLEDNLSEGIREWWDLKPGAPKPKANQQRQDNGRGLVLPGYRYLGPFNGLDKGEPVNAADAAALEHDRAYDQQLQAGDNPYLRYNHADAEFQERLQEDTSFGGNLGRAVFQAKKRVLEPLGLVESPVRTAPGKKRPVEPSPQRSPDSSTGIGKRGQQPAKKRLNFGQTGDSESVPDPQPIGEPPAAPSGVGPNTMAAGGGAPMADNNEGADGVGSSSGNWHCDSTWLGDRVITTSTRTWALPTYNNHLYRQISNGTSGGSTNDNTYFGYSTPWGYFDFNRFHCHFSPRDWQRLINNNWGFRPKRLNFKLFNIQVKEVTQNEGTRTIANNLTSTIQVFTDSEYQLPYVLGSAHQGCLPPFPADVFMIPQYGYLTLNNGSQAVGRSSFYCLEYFPSQMLRTGNNFEFSYNFEDVPFHSSYAHSQSLDRLMNPLIDQYLYYLSRTQSTGGTAGTQQLLFSQAGPNNMSAQAKNWLPGPCYRQQRVSTTLSQNNNSNFAWTGATKYHLNGRDSLVNPGVAMATHRDDEERFFPSSGVLMFGRQGAGRDNVDYSSVMLTSEEEIRTTNPVATEQYGVVADNLQQQNAAPIVGAVNSQGALPGMVWQNRDVYLQGPIWAKIPHTDGNFHPSPLMGGFGLKHPPPQILIKNTPVPADPPTTFNQAKLASFITQYSTGQVSVEIEWELQKENSKRWNPEIQYTSNYYKSTNVDFAVNTEGTYSEPRPIGTRYLTRNL

SEQ ID NO: 1885 - protein, 738 aa, Artificial Sequence
  Description of Artificial Sequence: Synthetic polypeptide
MAADGYLPDWLEDNLSEGIREWWDLKPGAPKPKANQQRQDNGRGLVLPGYRYLGPFNGLDKGEPVNAADAAALEHDRAYDQQLQAGDNPYLRYNHADAEFQERLQEDTSFGGNLGRAVFQAKKRVLEPLGLVESPVRTAPGKKRPVEPSPQRSPDSSTGIGKRGQQPAKKRLNFGQTGDSESVPDPQPIGEPPAAPSGVGPNTMAAGGGAPMADNNEGADGVGSSSGNWHCDSTWLGDRVITTSTRTWALPTYNNHLYRQISNGTSGGSTNDNTYFGYSTPWGYFDFNRFHCHFSPRDWQRLINNNWGFRPKRLNFKLFNIQVKEVTQNEGTRTIANNLTSTIQVFTDSEYQLPYVLGSAHQGCLPPFPADVFMIPQYGYLTLNNGSQAVGRSSFYCLEYFPSQMLRTGNNFEFSYNFEDVPFHSSYAHSQSLDRLMNPLIDQYLYYLSRTQSTGGTAGTQQLLFSQAGPNNMSAQAKNWLPGPCYRQQRVSTTLSQNNNSNFAWTGATKYHLNGRDSLVNPGVAMATHRDDEERFFPSSGVLMFGKQGAGRDNVDYSSVMLTSEEEIRTTNPVATEQYGVVADNLQQQNAAPIVGAVNSQGALPGMVWQNRDVYLQGPIWAKIPHTDGNFHPSPLMGGFGLKHPPPQILIKNTPVPADPPTTFNQARLASFITQYSTGQVSVEIEWELQKENSKRWNPEIQYTSNYYKSTNVDFAVNTEGTYSEPRPIGTRYLTRNL

SEQ ID NO: 1886 - protein, 738 aa, Artificial Sequence
  Description of Artificial Sequence: Synthetic polypeptide
MAADGYLPDWLEDNLSEGIREWWDLKPGAPKPKANQQRQDNGRGLVLPGYRYLGPFNGLDKGEPVNAADAAALEHDRAYDQQLQAGDNPYLRYNHADAEFQERLQEDTSFGGNLGRAVFQAKKRVLEPLGLVESPVRTAPGKKRPVEPSPQRSPDSSTGIGKKGQQPAKKRLNFGQTGDSESVPDPQPIGEPPAAPSGVGPNTMAAGGGAPMADNNEGADGVGSSSGNWHCDSTWLGDRVITTSTRTWALPTYNNHLYRQISNGTSGGSTNDNTYFGYSTPWGYFDFNRFHCHFSPRDWQRLINNNWGFRPKRLNFKLFNIQVKEVTQNEGTRTIANNLTSTIQVFTDSEYQLPYVLGSAHQGCLPPFPADVFMIPQYGYLTLNNGSQAVGRSSFYCLEYFPSQMLRTGNNFEFSYNFEDVPFHSSYAHSQSLDRLMNPLIDQYLYYLSRTQSTGGTAGTQQLLFSQAGPNNMSAQAKNWLPGPCYRQQRVSTTLSQNNNSNFAWTGATKYHLNGRDSLVNPGVAMATHRDDEERFFPSSGVLMFGRQGAGRDNVDYSSVMLTSEEEIRTTNPVATEQYGVVADNLQQQNAAPIVGAVNSQGALPGMVWQNRDVYLQGPIWAKIPHTDGNFHPSPLMGGFGLKHPPPQILIKNTPVPADPPTTFNQARLASFITQYSTGQVSVEIEWELQKENSKRWNPEIQYTSNYYKSTNVDFAVNTEGTYSEPRPIGTRYLTRNL

SEQ ID NO: 1887 - DNA, 2214 bp, Artificial Sequence
  Description of Artificial Sequence: Synthetic polynucleotide
atggctgccgatggttatcttccagattggctcgaggacaacctctctgagggcattcgcgagtggtgggacctgaaacctggagccccgaaacccaaagccaaccagcaaaagcaggacaacggccggggtctggtgcttcctggctacaagtacctcggacccttcaacggactcgacaagggggagcccgtcaacgcggcggacgcagcggccctcgagcacgacaaggcctacgaccagcagctccaagcgggtgacaatccgtacctgcggtataatcacgccgacgccgagtttcaggagcgtctgcaagaagatacgtcttttgggggcaacctcgggcgcgcagtcttccaggccaaaaagcgggttctcgaacctctgggcctggttgaatcgccggttaagacggctcctggaaagaagagaccggtagagccatcaccccagcgctctccagactcctctacgggcatcggcaagaaaggccagcagcccgcaaaaaagagactcaattttgggcagactggcgactcagagtcagtccccgaccctcaaccaatcggagaaccaccagcagccccctctggtgtgggacctaatacaatggctgcaggcggtggcgctccaatggcagacaataacgaaggcgccgacggagtgggtagttcctcaggaaattggcattgcgattccacatggctgggcgacagagtcatcaccaccagcacccgcacctgggccctgcccacctacaacaaccacctctacaagcaaatctccaacgggacctcgggaggaagcaccaacgacaacacctacttcggctacagcaccccctgggggtattttgacttcaacagattccactgccacttttcaccacgtgactggcagcgactcatcaacaacaactggggattccggcccaagaggctcaacttcaagctcttcaacatccaagtcaaggaggtcacgcagaatgaaggcaccaagaccatcgccaataaccttaccagcacgattcaggtctttacggactcggaataccagctcccgtacgtgctcggctcggcgcaccagggctgcctgcctccgttcccggcggacgtcttcatgattcctcagtacgggtacctgactctgaacaatggcagtcaggctgtgggccggtcgtccttctactgcctggagtactttccttctcaaatgctgagaacgggcaacaactttgaattcagctacaacttcgaggacgtgcccttccacagcagctacgcgcacagccagagcctggaccggctgatgaaccctctcatcgaccagtacttgtactacctgtcccggactcaaagcacgggcggtactgcaggaactcagcagttgctattttctcaggccgggcctaacaacatgtcggctcaggccaagaactggctacccggtccctgctaccggcagcaacgcgtctccacgacactgtcgcagaacaacaacagcaactttgcctggacgggtgccaccaagtatcatctgaatggcagagactctctggtgaatcctggcgttgccatggctacccacaaggacgacgaagagcgattttttccatccagcggagtcttaatgtttgggaaacagggagctggaaaagacaacgtggactatagcagcgtgatgctaaccagcgaggaagaaataaagaccaccaacccagtggccacagaacagtacggcgtggtggccgataacctgcaacagcaaaacgccgctcctattgtaggggccgtcaatagtcaaggagccttacctggcatggtgtggcagaaccgggacgtgtacctgcagggtcccatctgggccaagattcctcatacggacggcaactttcatccctcgccgctgatgggaggctttggactgaagcatccgcctcctcagatcctgattaaaaacacacctgttcccgcggatcctccgaccaccttcaatcaggccaagctggcttctttcatcacgcagtacagtaccggccaggtcagcgtggagatcgagtgggagctgcagaaggagaacagcaaacgctggaacccagagattcagtacacttccaactactacaaatctacaaatgtggactttgctgtcaatactgagggtacttattccgagcctcgccccattggcacccgttacctcacccgtaatctg

SEQ ID NO: 1888 - DNA, 2217 bp, Artificial Sequence
  Description of Artificial Sequence: Synthetic polynucleotide
atggctgccgatggttatcttccagattggctcgaggacaacctctctgagggcattcgcgagtggtgggacctgaaacctggagccccgaaacccaaagccaaccagcaaaggcaggacaacggccggggtctggtgcttcctggctacaggtacctcggacccttcaacggactcgacaagggggagcccgtcaacgcggcggacgcagcggccctcgagcacgacagggcctacgaccagcagctccaagcgggtgacaatccgtacctgcggtataatcacgccgacgccgagtttcaggagcgtctgcaagaagatacgtcttttgggggcaacctcgggcgcgcagtcttccaggccaaaaagcgggttctcgaacctctgggcctggttgaatcgccggttaggacggctcctggaaagaagagaccggtagagccatcaccccagcgctctccagactcctctacgggcatcggcaagaaaggccagcagcccgcaagaaagagactcaattttgggcagactggcgactcagagtcagtccccgaccctcaaccaatcggagaaccaccagcagccccctctggtgtgggacctaatacaatggctgcaggcggtggcgctccaatggcagacaataacgaaggcgccgacggagtgggtagttcctcaggaaattggcattgcgattccacatggctgggcgacagagtcatcaccaccagcacccgcacctgggccctgcccacctacaacaaccacctctacaggcaaatctccaacgggacctcgggaggaagcaccaacgacaacacctacttcggctacagcaccccctgggggtattttgacttcaacagattccactgccacttttcaccacgtgactggcagcgactcatcaacaacaactggggattccggcccaagaggctcaacttcaagctcttcaacatccaagtcaaggaggtcacgcagaatgaaggcaccaggaccatcgccaataaccttaccagcacgattcaggtctttacggactcggaataccagctcccgtacgtgctcggctcggcgcaccagggctgcctgcctccgttcccggcggacgtcttcatgattcctcagtacgggtacctgactctgaacaatggcagtcaggctgtgggccggtcgtccttctactgcctggagtactttccttctcaaatgctgagaacgggcaacaactttgaattcagctacaacttcgaggacgtgcccttccacagcagctacgcgcacagccagagcctggaccggctgatgaaccctctcatcgaccagtacttgtactacctgtcccggactcaaagcacgggcggtactgcaggaactcagcagttgctattttctcaggccgggcctaacaacatgtcggctcaggccaagaactggctacccggtccctgctaccggcagcaacgcgtctccacgacactgtcgcagaacaacaacagcaactttgcctggacgggtgccaccaagtatcatctgaatggcagagactctctggtgaatcctggcgttgccatggctacccacagggacgacgaagagcgattttttccatccagcggagtcttaatgtttgggagacagggagctggaagagacaacgtggactatagcagcgtgatgctaaccagcgaggaagaaataaggaccaccaacccagtggccacagaacagtacggcgtggtggccgataacctgcaacagcaaaacgccgctcctattgtaggggccgtcaatagtcaaggagccttacctggcatggtgtggcagaaccgggacgtgtacctgcagggtcccatctgggccaagattcctcatacggacggcaactttcatccctcgccgctgatgggaggctttggactgaagcatccgcctcctcagatcctgattaaaaacacacctgttcccgcggatcctccgaccaccttcaatcaggccaagctggcttctttcatcacgcagtacagtaccggccaggtcagcgtggagatcgagtgggagctgcagaaggagaacagcaaacgctggaacccagagattcagtacacttccaactactacaaatctacaaatgtggactttgctgtcaatactgagggtacttattccgagcctcgccccattggcacccgttacctcacccgtaatctgtaa

SEQ ID NO: 1889 - DNA, 2217 bp, Artificial Sequence
  Description of Artificial Sequence: Synthetic polynucleotide
atggctgccgatggttatcttccagattggctcgaggacaacctctctgagggcattcgcgagtggtgggacctgaaacctggagccccgaaacccaaagccaaccagcaaaggcaggacaacggccggggtctggtgcttcctggctacaggtacctcggacccttcaacggactcgacaagggggagcccgtcaacgcggcggacgcagcggccctcgagcacgacagggcctacgaccagcagctccaagcgggtgacaatccgtacctgcggtataatcacgccgacgccgagtttcaggagcgtctgcaagaagatacgtcttttgggggcaacctcgggcgcgcagtcttccaggccaaaaagcgggttctcgaacctctgggcctggttgaatcgccggttaggacggctcctggaaagaagagaccggtagagccatcaccccagcgctctccagactcctctacgggcatcggcaagagaggccagcagcccgcaagaaagagactcaattttgggcagactggcgactcagagtcagtccccgaccctcaaccaatcggagaaccaccagcagccccctctggtgtgggacctaatacaatggctgcaggcggtggcgctccaatggcagacaataacgaaggcgccgacggagtgggtagttcctcaggaaattggcattgcgattccacatggctgggcgacagagtcatcaccaccagcacccgcacctgggccctgcccacctacaacaaccacctctacaggcaaatctccaacgggacctcgggaggaagcaccaacgacaacacctacttcggctacagcaccccctgggggtattttgacttcaacagattccactgccacttttcaccacgtgactggcagcgactcatcaacaacaactggggattccggcccaagaggctcaacttcaagctcttcaacatccaagtcaaggaggtcacgcagaatgaaggcaccaggaccatcgccaataaccttaccagcacgattcaggtctttacggactcggaataccagctcccgtacgtgctcggctcggcgcaccagggctgcctgcctccgttcccggcggacgtcttcatgattcctcagtacgggtacctgactctgaacaatggcagtcaggctgtgggccggtcgtccttctactgcctggagtactttccttctcaaatgctgagaacgggcaacaactttgaattcagctacaacttcgaggacgtgcccttccacagcagctacgcgcacagccagagcctggaccggctgatgaaccctctcatcgaccagtacttgtactacctgtcccggactcaaagcacgggcggtactgcaggaactcagcagttgctattttctcaggccgggcctaacaacatgtcggctcaggccaagaactggctacccggtccctgctaccggcagcaacgcgtctccacgacactgtcgcagaacaacaacagcaactttgcctggacgggtgccaccaagtatcatctgaatggcagagactctctggtgaatcctggcgttgccatggctacccacagggacgacgaagagcgattttttccatccagcggagtcttaatgtttgggaaacagggagctggaagagacaacgtggactatagcagcgtgatgctaaccagcgaggaagaaataaggaccaccaacccagtggccacagaacagtacggcgtggtggccgataacctgcaacagcaaaacgccgctcctattgtaggggccgtcaatagtcaaggagccttacctggcatggtgtggcagaaccgggacgtgtacctgcagggtcccatctgggccaagattcctcatacggacggcaactttcatccctcgccgctgatgggaggctttggactgaagcatccgcctcctcagatcctgattaaaaacacacctgttcccgcggatcctccgaccaccttcaatcaggccaagctggcttctttcatcacgcagtacagtaccggccaggtcagcgtggagatcgagtgggagctgcagaaggagaacagcaaacgctggaacccagagattcagtacacttccaactactacaaatctacaaatgtggactttgctgtcaatactgagggtacttattccgagcctcgccccattggcacccgttacctcacccgtaatctgtaa

SEQ ID NO: 1890 - DNA, 2217 bp, Artificial Sequence
  Description of Artificial Sequence: Synthetic polynucleotide
atggctgccgatggttatcttccagattggctcgaggacaacctctctgagggcattcgcgagtggtgggacctgaaacctggagccccgaaacccaaagccaaccagcaaaggcaggacaacggccggggtctggtgcttcctggctacaggtacctcggacccttcaacggactcgacaagggggagcccgtcaacgcggcggacgcagcggccctcgagcacgacagggcctacgaccagcagctccaagcgggtgacaatccgtacctgcggtataatcacgccgacgccgagtttcaggagcgtctgcaagaagatacgtcttttgggggcaacctcgggcgcgcagtcttccaggccaaaaagcgggttctcgaacctctgggcctggttgaatcgccggttaggacggctcctggaaagaagagaccggtagagccatcaccccagcgctctccagactcctctacgggcatcggcaagagaggccagcagcccgcaaaaaagagactcaattttgggcagactggcgactcagagtcagtccccgaccctcaaccaatcggagaaccaccagcagccccctctggtgtgggacctaatacaatggctgcaggcggtggcgctccaatggcagacaataacgaaggcgccgacggagtgggtagttcctcaggaaattggcattgcgattccacatggctgggcgacagagtcatcaccaccagcacccgcacctgggccctgcccacctacaacaaccacctctacaggcaaatctccaacgggacctcgggaggaagcaccaacgacaacacctacttcggctacagcaccccctgggggtattttgacttcaacagattccactgccacttttcaccacgtgactggcagcgactcatcaacaacaactggggattccggcccaagaggctcaacttcaagctcttcaacatccaagtcaaggaggtcacgcagaatgaaggcaccaggaccatcgccaataaccttaccagcacgattcaggtctttacggactcggaataccagctcccgtacgtgctcggctcggcgcaccagggctgcctgcctccgttcccggcggacgtcttcatgattcctcagtacgggtacctgactctgaacaatggcagtcaggctgtgggccggtcgtccttctactgcctggagtactttccttctcaaatgctgagaacgggcaacaactttgaattcagctacaacttcgaggacgtgcccttccacagcagctacgcgcacagccagagcctggaccggctgatgaaccctctcatcgaccagtacttgtactacctgtcccggactcaaagcacgggcggtactgcaggaactcagcagttgctattttctcaggccgggcctaacaacatgtcggctcaggccaagaactggctacccggtccctgctaccggcagcaacgcgtctccacgacactgtcgcagaacaacaacagcaactttgcctggacgggtgccaccaagtatcatctgaatggcagagactctctggtgaatcctggcgttgccatggctacccacagggacgacgaagagcgattttttccatccagcggagtcttaatgtttgggagacagggagctggaagagacaacgtggactatagcagcgtgatgctaaccagcgaggaagaaataaggaccaccaacccagtggccacagaacagtacggcgtggtggccgataacctgcaacagcaaaacgccgctcctattgtaggggccgtcaatagtcaaggagccttacctggcatggtgtggcagaaccgggacgtgtacctgcagggtcccatctgggccaagattcctcatacggacggcaactttcatccctcgccgctgatgggaggctttggactgaagcatccgcctcctcagatcctgattaaaaacacacctgttcccgcggatcctccgaccaccttcaatcaggccaagctggcttctttcatcacgcagtacagtaccggccaggtcagcgtggagatcgagtgggagctgcagaaggagaacagcaaacgctggaacccagagattcagtacacttccaactactacaaatctacaaatgtggactttgctgtcaatactgagggtacttattccgagcctcgccccattggcacccgttacctcacccgtaatctgtaa

SEQ ID NO: 1891 - DNA, 2217 bp, Artificial Sequence
  Description of Artificial Sequence: Synthetic polynucleotide
atggctgccgatggttatcttccagattggctcgaggacaacctctctgagggcattcgcgagtggtgggacctgaaacctggagccccgaaacccaaagccaaccagcaaaggcaggacaacggccggggtctggtgcttcctggctacaggtacctcggacccttcaacggactcgacaagggggagcccgtcaacgcggcggacgcagcggccctcgagcacgacagggcctacgaccagcagctccaagcgggtgacaatccgtacctgcggtataatcacgccgacgccgagtttcaggagcgtctgcaagaagatacgtcttttgggggcaacctcgggcgcgcagtcttccaggccaaaaagcgggttctcgaacctctgggcctggttgaatcgccggttaggacggctcctggaaagaagagaccggtagagccatcaccccagcgctctccagactcctctacgggcatcggcaagagaggccagcagcccgcaaaaaagagactcaattttgggcagactggcgactcagagtcagtccccgaccctcaaccaatcggagaaccaccagcagccccctctggtgtgggacctaatacaatggctgcaggcggtggcgctccaatggcagacaataacgaaggcgccgacggagtgggtagttcctcaggaaattggcattgcgattccacatggctgggcgacagagtcatcaccaccagcacccgcacctgggccctgcccacctacaacaaccacctctacaggcaaatctccaacgggacctcgggaggaagcaccaacgacaacacctacttcggctacagcaccccctgggggtattttgacttcaacagattccactgccacttttcaccacgtgactggcagcgactcatcaacaacaactggggattccggcccaagaggctcaacttcaagctcttcaacatccaagtcaaggaggtcacgcagaatgaaggcaccaggaccatcgccaataaccttaccagcacgattcaggtctttacggactcggaataccagctcccgtacgtgctcggctcggcgcaccagggctgcctgcctccgttcccggcggacgtcttcatgattcctcagtacgggtacctgactctgaacaatggcagtcaggctgtgggccggtcgtccttctactgcctggagtactttccttctcaaatgctgagaacgggcaacaactttgaattcagctacaacttcgaggacgtgcccttccacagcagctacgcgcacagccagagcctggaccggctgatgaaccctctcatcgaccagtacttgtactacctgtcccggactcaaagcacgggcggtactgcaggaactcagcagttgctattttctcaggccgggcctaacaacatgtcggctcaggccaagaactggctacccggtccctgctaccggcagcaacgcgtctccacgacactgtcgcagaacaacaacagcaactttgcctggacgggtgccaccaagtatcatctgaatggcagagactctctggtgaatcctggcgttgccatggctacccacagggacgacgaagagcgattttttccatccagcggagtcttaatgtttgggaaacagggagctggaagagacaacgtggactatagcagcgtgatgctaaccagcgaggaagaaataaggaccaccaacccagtggccacagaacagtacggcgtggtggccgataacctgcaacagcaaaacgccgctcctattgtaggggccgtcaatagtcaaggagccttacctggcatggtgtggcagaaccgggacgtgtacctgcagggtcccatctgggccaagattcctcatacggacggcaactttcatccctcgccgctgatgggaggctttggactgaagcatccgcctcctcagatcctgattaaaaacacacctgttcccgcggatcctccgaccaccttcaatcaggccaggctggcttctttcatcacgcagtacagtaccggccaggtcagcgtggagatcgagtgggagctgcagaaggagaacagcaaacgctggaacccagagattcagtacacttccaactactacaaatctacaaatgtggactttgctgtcaatactgagggtacttattccgagcctcgccccattggcacccgttacctcacccgtaatctgtaa

SEQ ID NO: 1892 - DNA, 2217 bp, Artificial Sequence
  Description of Artificial Sequence: Synthetic polynucleotide
atggctgccgatggttatcttccagattggctcgaggacaacctctctgagggcattcgcgagtggtgggacctgaaacctggagccccgaaacccaaagccaaccagcaaaggcaggacaacggccggggtctggtgcttcctggctacaggtacctcggacccttcaacggactcgacaagggggagcccgtcaacgcggcggacgcagcggccctcgagcacgacagggcctacgaccagcagctccaagcgggtgacaatccgtacctgcggtataatcacgccgacgccgagtttcaggagcgtctgcaagaagatacgtcttttgggggcaacctcgggcgcgcagtcttccaggccaaaaagcgggttctcgaacctctgggcctggttgaatcgccggttaggacggctcctggaaagaagagaccggtagagccatcaccccagcgctctccagactcctctacgggcatcggcaagaaaggccagcagcccgcaaaaaagagactcaattttgggcagactggcgactcagagtcagtccccgaccctcaaccaatcggagaaccaccagcagccccctctggtgtgggacctaatacaatggctgcaggcggtggcgctccaatggcagacaataacgaaggcgccgacggagtgggtagttcctcaggaaattggcattgcgattccacatggctgggcgacagagtcatcaccaccagcacccgcacctgggccctgcccacctacaacaaccacctctacaggcaaatctccaacgggacctcgggaggaagcaccaacgacaacacctacttcggctacagcaccccctgggggtattttgacttcaacagattccactgccacttttcaccacgtgactggcagcgactcatcaacaacaactggggattccggcccaagaggctcaacttcaagctcttcaacatccaagtcaaggaggtcacgcagaatgaaggcaccaggaccatcgccaataaccttaccagcacgattcaggtctttacggactcggaataccagctcccgtacgtgctcggctcggcgcaccagggctgcctgcctccgttcccggcggacgtcttcatgattcctcagtacgggtacctgactctgaacaatggcagtcaggctgtgggccggtcgtccttctactgcctggagtactttccttctcaaatgctgagaacgggcaacaactttgaattcagctacaacttcgaggacgtgcccttccacagcagctacgcgcacagccagagcctggaccggctgatgaaccctctcatcgaccagtacttgtactacctgtcccggactcaaagcacgggcggtactgcaggaactcagcagttgctattttctcaggccgggcctaacaacatgtcggctcaggccaagaactggctacccggtccctgctaccggcagcaacgcgtctccacgacactgtcgcagaacaacaacagcaactttgcctggacgggtgccaccaagtatcatctgaatggcagagactctctggtgaatcctggcgttgccatggctacccacagggacgacgaagagcgattttttccatccagcggagtcttaatgtttgggagacagggagctggaagagacaacgtggactatagcagcgtgatgctaaccagcgaggaagaaataaggaccaccaacccagtggccacagaacagtacggcgtggtggccgataacctgcaacagcaaaacgccgctcctattgtaggggccgtcaatagtcaaggagccttacctggcatggtgtggcagaaccgggacgtgtacctgcagggtcccatctgggccaagattcctcatacggacggcaactttcatccctcgccgctgatgggaggctttggactgaagcatccgcctcctcagatcctgattaaaaacacacctgttcccgcggatcctccgaccaccttcaatcaggccaggctggcttctttcatcacgcagtacagtaccggccaggtcagcgtggagatcgagtgggagctgcagaaggagaacagcaaacgctggaacccagagattcagtacacttccaactactacaaatctacaaatgtggactttgctgtcaatactgagggtacttattccgagcctcgccccattggcacccgttacctcacccgtaatctgtaa

SEQ ID NO: 1893 - protein, 744 aa, Artificial Sequence
  Description of Artificial Sequence: Synthetic polypeptide
MAADGYLPDWLEDTLSEGIRQWWKLKPGPPPPKPAERHKDDSRGLVLPGYKYLGPFNGLDKGEPVNEADAAALEHDKAYDRQLDSGDNPYLKYNHADAEFQERLKEDTSFGGNLGRAVFQAKKRVLEPLGLVEEPVKTAPGKKRPVEHSPVEPDSSSGTGKAGQQPARKRLNFGQTGDADSVPDPQPLGQPPAAPSGLGTNTMATGSGAPMADNNEGADGVGNSSGNWHCDSTWMGDRVITTSTRTWALPTYNNHLYKQISSQSGASNDNHYFGYSTPWGYFDFNRFHCHFSPRDWQRLINNNWGFRPKRLNFKLFNIQVKEVTQNDGTTTIANNLTSTVQVFTDSEYQLPYVLGSAHQGCLPPFPADVFMVPQYGYLTLNNGSQAVGRSSFYCLEYFPSQMLRTGNNFTFSYTFEDVPFHSSYAHSQSLDRLMNPLIDQYLYYLSRTNTPSGTTTQSRLQFSQAGASDIRDQSRNWLPGPCYRQQRVSKTSADNNNSEYSWTGATKYHLNGRDSLVNPGPAMASHKDDEEKFFPQSGVLIFGKQGSEKTNVDIEKVMITDEEEIRTTNPVATEQYGSVSTNLQRGQRGESGHGYFAQAATADVNTQGVLPGMVWQDRDVYLQGPIWAKIPHTDGHFHPSPLMGGFGLKHPPPQILIKNTPVPANPSTTFSAAKFASFITQYSTGQVSVEIEWELQKENSKRWNPEIQYTSNYNKSVNVDFTVDTNGVYSEPRPIGTRYLTRNL

SEQ ID NO: 1894 - DNA, 8359 bp, Artificial Sequence
  Description of Artificial Sequence: Synthetic polynucleotide
catcatcaataatataccttattttggattgaagccaatatgataatgagggggtggagtttgtgacgtggcgcggggcgtgggaacggggcgggtgacgtagtagctctagaggtcctgtattagaggtcacgtgagtgttttgcgacattttgcgacaccatgtggtcacgctgggtatttaagcccgagtgagcacgcagggtctccattttgaagcgggaggtttgaacgcgcagccgccatgccggggttttacgagattgtgattaaggtccccagcgaccttgacgagcatctgcccggcatttctgacagctttgtgaactgggtggccgagaaggaatgggagttgccgccagattctgacatggatctgaatctgattgagcaggcacccctgaccgtggccgagaagctgcagcgcgactttctgacggaatggcgccgtgtgagtaaggcaccggaggcccttttctttgtgcaatttgagaagggagagagctacttccacatgcacgtgctcgtggaaaccaccggggtgaaatccatggttttgggacgtttcctgagtcagattcgcgaaaaactgattcagagaatttaccgcgggatcgagccgactttgccaaactggttcgcggtcacaaagaccagaaatggcgccggaggcgggaacaaggtggtggatgagtgctacatccccaattacttgctccccaaaacccagcctgagctccagtgggcgtggactaatatggaacagtatttaagcgcctgtttgaatctcacggagcgtaaacggttggtggcgcagcatctgacgcacgtgtcgcagacgcaggagcagaacaaagagaatcagaatcccaattctgatgcgccggtgatcagatcaaaaacttcagccaggtacatggagctggtcgggtggctcgtggacaaggggattacctcggagaagcagtggatccaggaggaccaggcctcatacatctccttcaatgcggcctccaactcgcggtcccaaatcaaggctgccttggacaatgcgggaaagattatgagcctgactaaaaccgcccccgactacctggtgggccagcagcccgtggaggacatttccagcaatcggatttataaaattttggaactaaacgggtacgatccccaatatgcggcttccgtctttctgggatgggccacgaaaaagttcggcaagaggaacaccatctggctgtttgggcctgcaactaccgggaagaccaacatcgcggaggccatagcccacactgtgcccttctacgggtgcgtaaactggaccaatgagaactttcccttcaacgactgtgtcgacaagatggtgatctggtgggaggaggggaagatgaccgccaaggtcgtggagtcggccaaagccattctcggaggaagcaaggtgcgcgtggaccagaaatgcaagtcctcggcccagatagacccgactcccgtgatcgtcacctccaacaccaacatgtgcgccgtgattgacgggaactcaacgaccttcgaacaccagcagccgttgcaagaccggatgttcaaatttgaactcacccgccgtctggatcatgactttgggaaggtcaccaagcaggaagtcaaagactttttccggtgggcaaaggatcacgtggttgaggtggagcatgaattctacgtcaaaaagggtggagccaagaaaagacccgcccccagtgacgcagatataagtgagcccaaacgggtgcgcgagtcagttgcgcagccatcgacgtcagacgcggaagcttcgatcaactacgcagacaggtaccaaaacaaatgttctcgtcacgtgggcatgaatctgatgctgtttccctgcagacaatgcgagagaatgaatcagaattcaaatatctgcttcactcacggacagaaagactgtttagagtgctttcccgtgtcagaatctcaacccgtttctgtcgtcaaaaaggcgtatcagaaactgtgctacattcatcatatcatgggaaaggtgccagacgcttgcactgcctgcgatctggtcaatgtggatttggatgactgcatctttgaacaataaatgatttaaatcaggtatggctgccgatggttatcttccagattggctcgaggacactctctctgaaggaataagacagtggtggaagctcaaacctggcccaccaccaccaaagcccgcagagcggcataaggacgacagcaggggtcttgtgcttcctgggtacaagtacctcggacccttcaacggactcgacaagggagagccggtcaacgaggcagacgccgcggccctcgagcacgacaaagcctacgaccggcagctcgacagcggagacaacccgtacctcaagtacaaccacgccgacgcggagtttcaggagcgccttaaagaagatacgtcttttgggggcaacctcggacgagcagtcttccaggcgaaaaagagggttcttgaacctctgggcctggttgaggaacctgttaagacggctccgggaaaaaagaggccggtagagcactctcctgtggagccagactcctcctcgggaaccggaaaggcgggccagcagcctgcaagaaaaagattgaattttggtcagactggagacgcagactcagtacctgacccccagcctctcggacagccaccagcagccccctctggtctgggaactaatacgatggctacaggcagtggcgcaccaatggcagacaataacgagggcgccgacggagtgggtaattcctcgggaaattggcattgcgattccacatggatgggcgacagagtcatcaccaccagcacccgaacctgggccctgcccacctacaacaaccacctctacaaacaaatttccagccaatcaggagcctcgaacgacaatcactactttggctacagcaccccttgggggtattttgacttcaacagattccactgccacttttcaccacgtgactggcaaagactcatcaacaacaactggggattccgacccaagagactcaacttcaagctctttaacattcaagtcaaagaggtcacgcagaatgacggtacgacgacgattgccaataaccttaccagcacggttcaggtgtttactgactcggagtaccagctcccgtacgtcctcggctcggcgcatcaaggatgcctcccgccgttcccagcagacgtcttcatggtgccacagtatggatacctcaccctgaacaacgggagtcaggcagtaggacgctcttcattttactgcctggagtactttccttctcagatgctgcgtaccggaaacaactttaccttcagctacacttttgaggacgttcctttccacagcagctacgctcacagccagagtctggaccgtctcatgaatcctctcatcgaccagtacctgtattacttgagcagaacaaacactccaagtggaaccaccacgcagtcaaggcttcagttttctcaggccggagcgagtgacattcgggaccagtctaggaactggcttcctggaccctgttaccgccagcagcgagtatcaaagacatctgcggataacaacaacagtgaatactcgtggactggagctaccaagtaccacctcaatggcagagactctctggtgaatccgggcccggccatggcaagccacaaggacgatgaagaaaagttttttcctcagagcggggttctcatctttgggaagcaaggctcagagaaaacaaatgtggacattgaaaaggtcatgattacagacgaagaggaaatcaggacaaccaatcccgtggctacggagcagtatggttctgtatctaccaacctccagagaggccagagaggcgagtctggtcatggttattttgcccaggcggccaccgcagatgtcaacacacaaggcgttcttccaggcatggtctggcaggacagagatgtgtaccttcaggggcccatctgggcaaagattccacacacggacggacattttcacccctctcccctcatgggtggattcggacttaaacaccctcctccacagattctcatcaagaacaccccggtacctgcgaatccttcgaccaccttcagtgcggcaaagtttgcttccttcatcacacagtactccacgggacaggtcagcgtggagatcgagtgggagctgcagaaggaaaacagcaaacgctggaatcccgaaattcagtacacttccaactacaacaagtctgttaatgtggactttactgtggacactaatggcgtgtattcagagcctcgccccattggcaccagatacctgactcgtaatctgtaattgcttgttaatcaataaaccgtttaattcgtttcagttgaactttggtctctgcgtatttctttcttatctagtttccatgctctagaggtcctgtattagaggtcacgtgagtgttttgcgacattttgcgacaccatgtggtcacgctgggtatttaagcccgagtgagcacgcagggtctccattttgaagcgggaggtttgaacgcgcagccaccacggcggggttttacgagattgtgattaaggtccccagcgaccttgacgagcatctgcccggcatttctgacagctttgtgaactgggtggccgagaaggaatgggagttgccgccagattctgacatggatctgaatctgattgagcaggcacccctgaccgtggccgagaagctgcatcgctggcgtaatagcgaagaggcccgcaccgatcgcccttcccaacagttgcgcagcctgaatggcgaatggcgattccgttgcaatggctggcggtaatattgttctggatattaccagcaaggccgatagtttgagttcttctactcaggcaagtgatgttattactaatcaaagaagtattgcgacaacggttaatttgcgtgatggacagactcttttactcggtggcctcactgattataaaaacacttctcaggattctggcgtaccgttcctgtctaaaatccctttaatcggcctcctgtttagctcccgctctgattctaacgaggaaagcacgttatacgtgctcgtcaaagcaaccatagtacgcgccctgtagcggcgcattaagcgcggcgggtgtggtggttacgcgcagcgtgaccgctacacttgccagcgccctagcgcccgctcctttcgctttcttcccttcctttctcgccacgttcgccggctttccccgtcaagctctaaatcgggggctccctttagggttccgatttagtgctttacggcacctcgaccccaaaaaacttgattagggtgatggttcacgtagtgggccatcgccctgatagacggtttttcgccctttgacgttggagtccacgttctttaatagtggactcttgttccaaactggaacaacactcaaccctatctcggtctattcttttgatttataagggattttgccgatttcggcctattggttaaaaaatgagctgatttaacaaaaatttaacgcgaattttaacaaaatattaacgtttacaatttaaatatttgcttatacaatcttcctgtttttggggcttttctgattatcaaccggggtacatatgattgacatgctagttttacgattaccgttcatcgattctcttgtttgctccagactctcaggcaatgacctgatagcctttgtagagacctctcaaaaatagctaccctctccggcatgaatttatcagctagaacggttgaatatcatattgatggtgatttgactgtctccggcctttctcacccgtttgaatctttacctacacattactcaggcattgcatttaaaatatatgagggttctaaaaatttttatccttgcgttgaaataaaggcttctcccgcaaaagtattacagggtcataatgtttttggtacaaccgatttagctttatgctctgaggctttattgcttaattttgctaattctttgccttgcctgtatgatttattggatgttggaattcctgatgcggtattttctccttacgcatctgtgcggtatttcacaccgcatatggtgcactctcagtacaatctgctctgatgccgcatagttaagccagccccgacacccgccaacacccgctgacgcgccctgacgggcttgtctgctcccggcatccgcttacagacaagctgtgaccgtctccgggagctgcatgtgtcagaggttttcaccgtcatcaccgaaacgcgcgagacgaaagggcctcgtgatacgcctatttttataggttaatgtcatgataataatggtttcttagacgtcaggtggcacttttcggggaaatgtgcgcggaacccctatttgtttatttttctaaatacattcaaatatgtatccgctcatgagacaataaccctgataaatgcttcaataatattgaaaaaggaagagtatgagtattcaacatttccgtgtcgcccttattcccttttttgcggcattttgccttcctgtttttgctcacccagaaacgctggtgaaagtaaaagatgctgaagatcagttgggtgcacgagtgggttacatcgaactggatctcaacagcggtaagatccttgagagttttcgccccgaagaacgttttccaatgatgagcacttttaaagttctgctatgtggcgcggtattatcccgtattgacgccgggcaagagcaactcggtcgccgcatacactattctcagaatgacttggttgagtactcaccagtcacagaaaagcatcttacggatggcatgacagtaagagaattatgcagtgctgccataaccatgagtgataacactgcggccaacttacttctgacaacgatcggaggaccgaaggagctaaccgcttttttgcacaacatgggggatcatgtaactcgccttgatcgttgggaaccggagctgaatgaagccataccaaacgacgagcgtgacaccacgatgcctgtagcaatggcaacaacgttgcgcaaactattaactggcgaactacttactctagcttcccggcaacaattaatagactggatggaggcggataaagttgcaggaccacttctgcgctcggcccttccggctggctggtttattgctgataaatctggagccggtgagcgtgggtctcgcggtatcattgcagcactggggccagatggtaagccctcccgtatcgtagttatctacacgacggggagtcaggcaactatggatgaacgaaatagacagatcgctgagataggtgcctcactgattaagcattggtaactgtcagaccaagtttactcatatatactttagattgatttaaaacttcatttttaatttaaaaggatctaggtgaagatcctttttgataatctcatgaccaaaatcccttaacgtgagttttcgttccactgagcgtcagaccccgtagaaaagatcaaaggatcttcttgagatcctttttttctgcgcgtaatctgctgcttgcaaacaaaaaaaccaccgctaccagcggtggtttgtttgccggatcaagagctaccaactctttttccgaaggtaactggcttcagcagagcgcagataccaaatactgtccttctagtgtagccgtagttaggccaccacttcaagaactctgtagcaccgcctacatacctcgctctgctaatcctgttaccagtggctgctgccagtggcgataagtcgtgtcttaccgggttggactcaagacgatagttaccggataaggcgcagcggtcgggctgaacggggggttcgtgcacacagcccagcttggagcgaacgacctacaccgaactgagatacctacagcgtgagctatgagaaagcgccacgcttcccgaagggagaaaggcggacaggtatccggtaagcggcagggtcggaacaggagagcgcacgagggagcttccagggggaaacgcctggtatctttatagtcctgtcgggtttcgccacctctgacttgagcgtcgatttttgtgatgctcgtcaggggggcggagcctatggaaaaacgccagcaacgcggcctttttacggttcctggccttttgctggccttttgctcacatgttctttcctgcgttatcccctgattctgtggataaccgtattaccgcctttgagtgagctgataccgctcgccgcagccgaacgaccgagcgcagcgagtcagtgagcgaggaagcggaagagcgcccaatacgcaaaccgcctctccccgcgcgttggccgattcattaatgcagaattcc

SEQ ID NO: 1895 - protein, 736 aa, Artificial Sequence
  Description of Artificial Sequence: Synthetic polypeptide
MAADGYLPDWLEDNLSEGIREWWDLKPGAPKPKANQQKQDDGRGLVLPGYKYLGPFNGLDKGEPVNAADAAALEHDKAYDQQLKAGDNPYLRYNHADAEFQERLQEDTSFGGNLGRAVFQAKKRVLEPLGLVEEGAKTAPGKKRPVEQSPQEPDSSSGIGKKGQQPAKKRLNFGQTGDSESVPDPQPLGEPPAAPSGVGSNTMAAGGGAPMADNNEGADGVGNASGNWHCDSTWLGDRVITTSTRTWALPTYNNHLYKQISSQSGASTNDNTYFGYSTPWGYFDFNRFHCHFSPRDWQRLINNNWGFRPKRLNFKLFNIQVKEVTTNDGTTTIANNLTSTVQVFTDSEYQLPYVLGSAHQGCLPPFPADVFMIPQYGYLTLNNGSQAVGRSSFYCLEYFPSQMLRTGNNFEFSYTFEDVPFHSSYAHSQSLDRLMNPLIDQYLYYLSRTQTTSGTAGNRTLQFSQAGPSSMANQAKNWLPGPCYRQQRVSKTANQNNNSNFAWTGATKYHLNGRDSLVNPGPAMATHKDDEDKFFPMSGVLIFGKQGAGNSNVDLDNVMITSEEEIKTTNPVATEQYGTVATNLQSSNTAPATGTVNSQGALPGMVWQNRDVYLQGPIWAKIPHTDGHFHPSPLMGGFGLKHPPPQILIKNTPVPANPPTTFSPAKFASFITQYSTGQVSVEIEWELQKENSKRWNPEIQYTSNYNKSTNVDFAVDTNGVYSEPRPIGTRYLTRNL

SEQ ID NO: 1896 - DNA, 2208 bp, Artificial Sequence
  Description of Artificial Sequence: Synthetic polynucleotide
atggctgccgatggttatcttccagattggctcgaggacaacctctctgagggcattcgcgagtggtgggacttgaaacctggagccccgaaacccaaagccaaccagcaaaagcaggacgacggccggggtctggtgcttcctggctacaagtacctcggacccttcaacggactcgacaagggggagcccgtcaacgcggcggacgcagcggccctcgagcacgacaaggcctacgaccagcagctcaaagcgggtgacaatccgtacctgcggtataaccacgccgacgccgagtttcaggagcgtctgcaagaagatacgtcttttgggggcaacctcgggcgagcagtcttccaggccaagaagcgggttctcgaacctctcggtctggttgaggaaggcgctaagacggctcctggaaagaagagaccggtagagcaatcaccccaggaaccagactcctcttcgggcatcggcaagaaaggccagcagcccgcgaagaagagactcaactttgggcagacaggcgactcagagtcagtgcccgaccctcaaccactcggagaaccccccgcagccccctctggtgtgggatctaatacaatggcagcaggcggtggcgctccaatggcagacaataacgaaggcgccgacggagtgggtaacgcctcaggaaattggcattgcgattccacatggctgggcgacagagtcatcaccaccagcacccgaacctgggccctccccacctacaacaaccacctctacaagcaaatctccagccaatcgggagcaagcaccaacgacaacacctacttcggctacagcaccccctgggggtattttgactttaacagattccactgccacttctcaccacgtgactggcagcgactcatcaacaacaactggggattccggcccaagagactcaacttcaagctcttcaacatccaggtcaaggaggtcacgacgaatgatggcaccacgaccatcgccaataaccttaccagcacggttcaggtctttacggactcggaataccagctcccgtacgtcctcggctctgcgcaccagggctgcctgcctccgttcccggcggacgtcttcatgattcctcagtacgggtacctgactctgaacaatggcagtcaggccgtgggccgttcctccttctactgcctggagtactttccttctcaaatgctgagaacgggcaacaactttgagttcagctacacgtttgaggacgtgccttttcacagcagctacgcgcacagccaaagcctggaccggctgatgaaccccctcatcgaccagtacctgtactacctgtctcggactcagaccacgagtggtaccgcaggaaatcggacgttgcaattttctcaggccgggcctagtagcatggcgaatcaggccaaaaactggctacccgggccctgctaccggcagcaacgcgtctccaagacagcgaatcaaaataacaacagcaactttgcctggaccggtgccaccaagtatcatctgaatggcagagactctctggtaaatcccggtcccgctatggcaacccacaaggacgacgaagacaaattttttccgatgagcggagtcttaatatttgggaaacagggagctggaaatagcaacgtggaccttgacaacgttatgataaccagtgaggaagaaattaaaaccaccaacccagtggccacagaacagtacggcacggtggccactaacctgcaatcgtcaaacaccgctcctgctacagggaccgtcaacagtcaaggagccttacctggcatggtctggcagaaccgggacgtgtacctgcagggtcctatctgggccaagattcctcacacggacggacactttcatccctcgccgctgatgggaggctttggactgaaacacccgcctcctcagatcctgattaagaatacacctgttcccgcgaatcctccaactaccttcagtccagctaagtttgcgtcgttcatcacgcagtacagcaccggacaggtcagcgtggaaattgaatgggagctgcagaaagaaaacagcaaacgctggaacccagagattcaatacacttccaactacaacaaatctacaaatgtggactttgctgttgacacaaatggcgtttattctgagcctcgccccatcggcacccgttacctcacccgtaatctg

SEQ ID NO: 1897 - protein, 737 aa, Artificial Sequence
  Description of Artificial Sequence: Synthetic polypeptide
MAADGYLPDWLEDNLSEGIREWWDLKPGAPKPKANQQKQDDGRGLVLPGYKYLGPFNGLDKGEPVNAADAAALEHDKAYDQQLKAGDNPYLRYNHADAEFQERLQEDTSFGGNLGRAVFQAKKRVLEPLGLVEEGAKTAPGKKRPVEQSPQEPDSSTGIGKKGQQPAKKRLNFGQTGDSESVPDPQPLGEPPAAPSGVGSNTMAAGGGAPMADNNEGADGVGNASGNWHCDSTWLGDRVITTSTRTWALPTYNNHLYKQISNSQSGGSTNDNTYFGYSTPWGYFDFNRFHCHFSPRDWQRLINNNWGFRPKRLNFKLFNIQVKEVTTNDGTTTIANNLTSTVQVFTDSEYQLPYVLGSAHQGCLPPFPADVFMIPQYGYLTLNNGSQAVGRSSFYCLEYFPSQMLRTGNNFEFSYTFEDVPFHSSYAHSQSLDRLMNPLIDQYLYYLSRTQTTGGTAGNRTLQFSQAGPSSMANQAKNWLPGPCYRQQRVSKTTNQNNNSNFAWTGATKYHLNGRDSLVNPGVAMATHKDDEDRFFPSSGVLIFGKQGAGNDNVDLDNVMITSEEEIKTTNPVATEEYGVVATNLQSANTAPQTGTVNSQGALPGMVWQNRDVYLQGPIWAKIPHTDGNFHPSPLMGGFGLKHPPPQILIKNTPVPANPPTTFSPAKFASFITQYSTGQVSVEIEWELQKENSKRWNPEIQYTSNYNKSTNVDFAVDTEGVYSEPRPIGTRYLTRNL

SEQ ID NO: 1898 - DNA, 2211 bp, Artificial Sequence
  Description of Artificial Sequence: Synthetic polynucleotide
atggctgccgatggttatcttccagattggctcgaggacaacctctctgagggcattcgcgagtggtgggacttgaaacctggagccccgaaacccaaagccaaccagcaaaagcaggacgacggccggggtctggtgcttcctggctacaagtacctcggacccttcaacggactcgacaagggggagcccgtcaacgcggcggacgcagcggccctcgagcacgacaaggcctacgaccagcagctcaaagcgggtgacaatccgtacctgcggtataaccacgccgacgccgagtttcaggagcgtctgcaagaagatacgtcttttgggggcaacctcgggcgagcagtcttccaggccaagaagcgggttctcgaacctctcggtctggttgaggaaggcgctaagacggctcctggaaagaagagaccggtagagcaatcaccccaggaaccagactcctctacgggcatcggcaagaaaggccagcagcccgcgaaaaagagactcaactttgggcagactggcgactcagagtcagtgcccgaccctcaaccactcggagaaccccccgcagccccctctggtgtgggatctaatacaatggctgcaggcggtggcgctccaatggcagacaataacgaaggcgccgacggagtgggtaatgcctcaggaaattggcattgcgattccacatggctgggcgacagagtcatcaccaccagcacccgaacctgggccctccccacctacaacaaccacctctacaagcaaatctccaacagccaatcgggaggaagcaccaacgacaacacctacttcggctacagcaccccctgggggtattttgactttaacagattccactgccacttctcaccacgtgactggcagcgactcatcaacaacaactggggattccggcccaagagactcaacttcaagctcttcaacatccaggtcaaggaggtcacgacgaatgatggcaccacgaccatcgccaataaccttaccagcacggttcaggtctttacggactcggaataccagctcccgtacgtcctcggctctgcgcaccagggctgcctgcctccgttcccggcggacgtcttcatgattcctcagtacgggtacctgactctgaacaatggcagtcaggccgtgggccgttcctccttctactgcctggagtactttccttctcaaatgctgagaacgggcaacaactttgagttcagctacacgtttgaggacgtgccttttcacagcagctacgcgcacagccaaagcctggaccggctgatgaaccccctcatcgaccagtacctgtactacctgtctcggactcagaccacgggaggtaccgcaggaaatcggacgttgcaattttctcaggccgggcctagtagcatggcgaatcaggccaaaaactggctacccgggccctgctaccggcagcaacgcgtctccaagacaacgaatcaaaataacaacagcaactttgcctggaccggtgccaccaagtatcatctgaatggcagagactctctggtaaatcccggtgtcgctatggcaacccacaaggacgacgaagaccgattttttccgtccagcggagtcttaatatttgggaaacagggagctggaaatgacaacgtggaccttgacaacgttatgataaccagtgaggaagaaattaaaaccaccaacccagtggccacagaagagtacggcgtggtggccactaacctgcaatcggcaaacaccgctcctcaaacagggaccgtcaacagtcaaggagccttacctggcatggtctggcagaaccgggacgtgtacctgcagggtcctatctgggccaagattcctcacacggacggaaactttcatccctcgccgctgatgggaggctttggactgaaacacccgcctcctcagatcctgattaagaatacacctgttcccgcgaatcctccaactaccttcagtccagctaagtttgcgtcgttcatcacgcagtacagcaccggacaggtcagcgtggaaattgaatgggagctgcagaaagaaaacagcaaacgctggaacccagagattcaatacacttccaactacaacaaatctacaaatgtggactttgctgttgacacagaaggcgtttattctgagcctcgccccatcggcacccgttacctcacccgtaatctg

SEQ ID NO: 1899 - protein, 738 aa, Artificial Sequence
  Description of Artificial Sequence: Synthetic polypeptide
MAADGYLPDWLEDNLSEGIREWWDLKPGAPKPKANQQKQDDGRGLVLPGYKYLGPFNGLDKGEPVNAADAAALEHDKAYDQQLKAGDNPYLRYNHADAEFQERLQEDTSFGGNLGRAVFQAKKRVLEPLGLVEEGAKTAPGKKRPVEQSPQREPDSSTGIGKKGQQPAKKRLNFGQTGDSESVPDPQPLGEPPAAPSGVGSNTMAAGGGAPMADNNEGADGVGNSSGNWHCDSTWLGDRVITTSTRTWALPTYNNHLYKQISNGTSGGSTNDNTYFGYSTPWGYFDFNRFHCHFSPRDWQRLINNNWGFRPKRLNFKLFNIQVKEVTTNEGTKTIANNLTSTVQVFTDSEYQLPYVLGSAHQGCLPPFPADVFMIPQYGYLTLNNGSQAVGRSSFYCLEYFPSQMLRTGNNFQFSYTFEDVPFHSSYAHSQSLDRLMNPLIDQYLYYLSRTQTTGGTAGTQTLQFSQAGPSSMANQAKNWLPGPCYRQQRVSTTTNQNNNSNFAWTGATKYHLNGRDSLVNPGVAMATHKDDEDRFFPSSGVLIFGKQGAGNDNVDYSNVMITSEEEIKTTNPVATEEYGVVATNLQSANTAPQTGTVNSQGALPGMVWQNRDVYLQGPIWAKIPHTDGNFHPSPLMGGFGLKHPPPQILIKNTPVPADPPTTFNQAKLNSFITQYSTGQVSVEIEWELQKENSKRWNPEIQYTSNYYKSTNVDFAVNTEGVYSEPRPIGTRYLTRNL

SEQ ID NO: 1900 - DNA, 2214 bp, Artificial Sequence
  Description of Artificial Sequence: Synthetic polynucleotide
atggctgccgatggttatcttccagattggctcgaggacaacctctctgagggcattcgcgagtggtgggacctgaaacctggagccccgaaacccaaagccaaccagcaaaagcaggacgacggccggggtctggtgcttcctggctacaagtacctcggacccttcaacggactcgacaagggggagcccgtcaacgcggcggacgcagcggccctcgagcacgacaaggcctacgaccagcagctcaaagcgggtgacaatccgtacctgcggtataatcacgccgacgccgagtttcaggagcgtctgcaagaagatacgtcttttgggggcaacctcgggcgagcagtcttccaggccaagaagcgggttctcgaacctctcggtctggttgaggaaggcgctaagacggctcctggaaagaagagaccggtagagcagtcaccacagcgtgagcccgactcctccacgggcatcggcaagaaaggccagcagcccgccaaaaagagactcaatttcggtcagactggcgactcagagtcagtccccgaccctcaacctctcggagaacctccagcagcgccctctggtgtgggatctaatacaatggctgcaggcggtggcgcaccaatggcagacaataacgaaggtgccgacggagtgggtaattcctcgggaaattggcattgcgattccacatggctgggcgacagagtcatcaccaccagcacccgaacctgggccctgcccacctacaacaaccacctctacaagcaaatctccaacgggacctcgggaggcagcaccaacgacaacacctactttggctacagcaccccctgggggtattttgactttaacagattccactgccacttctcaccacgtgactggcagcgactcatcaacaacaactggggattccggcccaagagactcaacttcaagctcttcaacatccaggtcaaagaggtcacgacgaatgaaggcaccaagaccatcgccaataacctcaccagcaccgtccaggtgtttacggactcggaataccagctgccgtacgtcctcggctctgcccaccagggctgcctgcctccgttcccggcggacgtcttcatgattcctcagtacggctacctgactctcaacaacggtagtcaggccgtgggacgttcctccttctactgcctggagtacttcccctctcagatgctgagaacgggcaacaactttcaattcagctacactttcgaggacgtgcctttccacagcagctacgcgcacagccagagtttggacaggctgatgaatcctctcatcgaccagtacctgtactacctgtcaagaacccagactacgggaggcacagcgggaacccagacgttgcagttttctcaggccgggcctagcagcatggcgaatcaggccaaaaactggctgcctggaccctgctacagacagcagcgcgtctccacgacaacgaatcaaaacaacaacagcaactttgcctggactggtgccaccaagtatcatctgaacggcagagactctctggtgaatccgggcgtcgccatggcaacccacaaggacgacgaggaccgcttcttcccatccagcggcgtcctcatatttggcaagcagggagctggaaatgacaacgtggactatagcaacgtgatgataaccagcgaggaagaaatcaagaccaccaaccccgtggccacagaagagtatggcgtggtggctactaacctacagtcggcaaacaccgctcctcaaacggggaccgtcaacagccagggagccttacctggcatggtctggcagaaccgggacgtgtacctgcagggtcctatttgggccaagattcctcacacagatggcaactttcacccgtctcctttaatgggcggctttggacttaaacatccgcctcctcagatcctcatcaaaaacactcctgttcctgcggatcctccaacaacgttcaaccaggccaagctgaattctttcatcacgcagtacagcaccggacaagtcagcgtggagatcgagtgggagctgcagaaggagaacagcaagcgctggaacccagagattcagtatacttccaactactacaaatctacaaatgtggactttgctgttaatactgagggtgtttactctgagcctcgccccattggcactcgttacctcacccgtaatctg

SEQ ID NO: 1901 - protein, 738 aa, Artificial Sequence
  Description of Artificial Sequence: Synthetic polypeptide
MAADGYLPDWLEDNLSEGIREWWDLKPGAPKPKANQQKQDDGRGLVLPGYKYLGPFNGLDKGEPVNAADAAALEHDKAYDQQLKAGDNPYLRYNHADAEFQERLQEDTSFGGNLGRAVFQAKKRVLEPLGLVEEGAKTAPGKKRPVEQSPQREPDSSTGIGKKGQQPARKRLNFGQTGDSESVPDPQPLGEPPAAPSGVGSNTMAAGGGAPMADNNEGADGVGSSSGNWHCDSTWLGDRVITTSTRTWALPTYNNHLYKQISNGTSGGSTNDNTYFGYSTPWGYFDFNRFHCHFSPRDWQRLINNNWGFRPKRLNFKLFNIQVKEVTQNEGTKTIANNLTSTIQVFTDSEYQLPYVLGSAHQGCLPPFPADVFMIPQYGYLTLNNGSQAVGRSSFYCLEYFPSQMLRTGNNFQFSYTFEDVPFHSSYAHSQSLDRLMNPLIDQYLYYLSRTQTTGGTAGTQTLQFSQAGPSNMANQAKNWLPGPCYRQQRVSTTTSQNNNSNFAWTGATKYHLNGRDSLVNPGVAMATHKDDEDRFFPSSGILIFGKQGAGKDNVDYSNVMLTSEEEIKTTNPVATEEYGVVADNLQQQNTAPQIGTVNSQGALPGMVWQNRDVYLQGPIWAKIPHTDGNFHPSPLMGGFGLKHPPPQILIKNTPVPADPPTTFNQAKLNSFITQYSTGQVSVEIEWELQKENSKRWNPEIQYTSNYYKSTNVDFAVNTEGVYSEPRPIGTRYLTRNL

SEQ ID NO: 1902 - DNA, 2214 bp, Artificial Sequence
  Description of Artificial Sequence: Synthetic polynucleotide
atggctgccgatggttatcttccagattggctcgaggacaacctctctgagggcattcgcgagtggtgggacctgaaacctggagccccgaaacccaaagccaaccagcaaaagcaggacgacggccggggtctggtgcttcctggctacaagtacctcggacccttcaacggactcgacaagggggagcccgtcaacgcggcggacgcagcggccctcgagcacgacaaggcctacgaccagcagctcaaagcgggtgacaatccgtacctgcggtataatcacgccgacgccgagtttcaggagcgtctgcaagaagatacgtcttttgggggcaacctcgggcgagcagtcttccaggccaagaagcgggttctcgaacctctcggtctggttgaggaaggcgctaagacggctcctggaaagaagagaccggtagagcagtcaccacagcgtgagcccgactcctccacgggcatcggcaagaaaggccagcagcccgccagaaagagactcaatttcggtcagactggcgactcagagtcagtccccgaccctcaacctctcggagaacctccagcagcgccctctggtgtgggatctaatacaatggctgcaggcggtggcgcaccaatggcagacaataacgaaggtgccgacggagtgggtagttcctcgggaaattggcattgcgattccacatggctgggcgacagagtcatcaccaccagcacccgaacctgggccctgcccacctacaacaaccacctctacaagcaaatctccaacgggacctcgggaggcagcaccaacgacaacacctactttggctacagcaccccctgggggtattttgactttaacagattccactgccacttctcaccacgtgactggcagcgactcatcaacaacaactggggattccggcccaagagactcaacttcaagctcttcaacatccaggtcaaagaggtcacgcagaatgaaggcaccaagaccatcgccaataacctcaccagcaccatccaggtgtttacggactcggaataccagctgccgtacgtcctcggctctgcccaccagggctgcctgcctccgttcccggcggacgtcttcatgattcctcagtacggctacctgactctcaacaacggtagtcaggccgtgggacgttcctccttctactgcctggagtacttcccctctcagatgctgagaacgggcaacaactttcaattcagctacactttcgaggacgtgcctttccacagcagctacgcgcacagccagagtttggacaggctgatgaatcctctcatcgaccagtacctgtactacctgtcaagaacccagactacgggaggcacagcgggaacccagacgttgcagttttctcaggccgggcctagcaacatggcgaatcaggccaaaaactggctgcctggaccctgctacagacagcagcgcgtctccacgacaacgtcgcaaaacaacaacagcaactttgcctggactggtgccaccaagtatcatctgaacggcagagactctctggtgaatccgggcgtcgccatggcaacccacaaggacgacgaggaccgcttcttcccatccagcggcatcctcatatttggcaagcagggagctggaaaagacaacgtggactatagcaacgtgatgctaaccagcgaggaagaaatcaagaccaccaaccccgtggccacagaagagtatggcgtggtggctgataacctacagcagcaaaacaccgctcctcaaatagggaccgtcaacagccagggagccttacctggcatggtctggcagaaccgggacgtgtacctgcagggtcctatttgggccaagattcctcacacagatggcaactttcacccgtctcctttaatgggcggctttggacttaaacatccgcctcctcagatcctcatcaaaaacactcctgttcctgcggatcctccaacaacgttcaaccaggccaagctgaattctttcatcacgcagtacagcaccggacaagtcagcgtggagatcgagtgggagctgcagaaggagaacagcaagcgctggaacccagagattcagtatacttccaactactacaaatctacaaatgtggactttgctgttaatactgagggtgtttactctgagcctcgccccattggcactcgttacctcacccgtaatctg

SEQ ID NO: 1903 - protein, 738 aa, Artificial Sequence
  Description of Artificial Sequence: Synthetic polypeptide
MAADGYLPDWLEDNLSEGIREWWDLKPGAPKPKANQQKQDDGRGLVLPGYKYLGPFNGLDKGEPVNAADAAALEHDKAYDQQLKAGDNPYLRYNHADAEFQERLQEDTSFGGNLGRAVFQAKKRVLEPLGLVEEGAKTAPGKKRPVEPSPQRSPDSSTGIGKKGQQPARKRLNFGQTGDSESVPDPQPIGEPPAAPSGVGSGTMAAGGGAPMADNNEGADGVGSSSGNWHCDSTWLGDRVITTSTRTWALPTYNNHLYKQISNGTSGGSTNDNTYFGYSTPWGYFDFNRFHCHFSPRDWQRLINNNWGFRPKRLNFKLFNIQVKEVTQNEGTKTIANNLTSTIQVFTDSEYQLPYVLGSAHQGCLPPFPADVFMIPQYGYLTLNNGSQAVGRSSFYCLEYFPSQMLRTGNNFEFSYTFEDVPFHSSYAHSQSLDRLMNPLIDQYLYYLSRTQSTGGTAGTQQLLFSQAGPSNMSAQAKNWLPGPCYRQQRVSTTLSQNNNSNFAWTGATKYHLNGRDSLVNPGVAMATHKDDEDRFFPSSGILMFGKQGAGKDNVDYSNVMLTSEEEIKTTNPVATEQYGVVADNLQQQNTAPIVGAVNSQGALPGMVWQNRDVYLQGPIWAKIPHTDGNFHPSPLMGGFGLKHPPPQILIKNTPVPADPPTTFNQAKLNSFITQYSTGQVSVEIEWELQKENSKRWNPEIQYTSNYYKSTNVDFAVNTEGVYSEPRPIGTRYLTRNL

SEQ ID NO: 1904 - DNA, 2214 bp, Artificial Sequence
  Description of Artificial Sequence: Synthetic polynucleotide
atggctgccgatggttatcttccagattggctcgaggacaacctctctgagggcattcgcgagtggtgggacctgaaacctggagccccgaaacccaaagccaaccagcaaaagcaggacgacggccggggtctggtgcttcctggctacaagtacctcggacccttcaacggactcgacaagggggagcccgtcaacgcggcggacgcagcggccctcgagcacgacaaggcctacgaccagcagctcaaagcgggtgacaatccgtacctgcggtataatcacgccgacgccgagtttcaggagcgtctgcaagaagatacgtcttttgggggcaacctcgggcgagcagtcttccaggccaagaagcgggttctcgaacctctcggtctggttgaggaaggcgctaagacggctcctggaaagaagagaccggtagagccgtcaccacagcgttcccccgactcctccacgggcatcggcaagaaaggccagcagcccgccagaaagagactcaatttcggtcagactggcgactcagagtcagtccccgaccctcaacctatcggagaacctccagcagcgccctctggtgtgggatctggtacaatggctgcaggcggtggcgcaccaatggcagacaataacgaaggtgccgacggagtgggtagttcctcgggaaattggcattgcgattccacatggctgggcgacagagtcatcaccaccagcacccgaacctgggccctgcccacctacaacaaccacctctacaagcaaatctccaacgggacctcgggaggcagcaccaacgacaacacctactttggctacagcaccccctgggggtattttgactttaacagattccactgccacttctcaccacgtgactggcagcgactcatcaacaacaactggggattccggcccaagagactcaacttcaagctcttcaacatccaggtcaaagaggtcacgcagaatgaaggcaccaagaccatcgccaataacctcaccagcaccatccaggtgtttacggactcggaataccagctgccgtacgtcctcggctctgcccaccagggctgcctgcctccgttcccggcggacgtcttcatgattcctcagtacggctacctgactctcaacaacggtagtcaggccgtgggacgttcctccttctactgcctggagtacttcccctctcagatgctgagaacgggcaacaactttgagttcagctacactttcgaggacgtgcctttccacagcagctacgcgcacagccagagtttggacaggctgatgaatcctctcatcgaccagtacctgtactacctgtcaagaacccagtctacgggaggcacagcgggaacccagcagttgctgttttctcaggccgggcctagcaacatgtcggctcaggccaaaaactggctgcctggaccctgctacagacagcagcgcgtctccacgacactgtcgcaaaacaacaacagcaactttgcctggactggtgccaccaagtatcatctgaacggcagagactctctggtgaatccgggcgtcgccatggcaacccacaaggacgacgaggaccgcttcttcccatccagcggcatcctcatgtttggcaagcagggagctggaaaagacaacgtggactatagcaacgtgatgctaaccagcgaggaagaaatcaagaccaccaaccccgtggccacagaacagtatggcgtggtggctgataacctacagcagcaaaacaccgctcctattgtgggggccgtcaacagccagggagccttacctggcatggtctggcagaaccgggacgtgtacctgcagggtcctatttgggccaagattcctcacacagatggcaactttcacccgtctcctttaatgggcggctttggacttaaacatccgcctcctcagatcctcatcaaaaacactcctgttcctgcggatcctccaacaacgttcaaccaggccaagctgaattctttcatcacgcagtacagcaccggacaagtcagcgtggagatcgagtgggagctgcagaaggagaacagcaagcgctggaacccagagattcagtatacttccaactactacaaatctacaaatgtggactttgctgttaatactgagggtgtttactctgagcctcgccccattggcactcgttacctcacccgtaatctg

SEQ ID NO: 1905 - protein, 738 aa, Artificial Sequence
  Description of Artificial Sequence: Synthetic polypeptide
MAADGYLPDWLEDNLSEGIREWWDLKPGAPKPKANQQKQDDGRGLVLPGYKYLGPFNGLDKGEPVNAADAAALEHDKAYDQQLKAGDNPYLRYNHADAEFQERLQEDTSFGGNLGRAVFQAKKRVLEPLGLVEEGAKTAPGKKRPVEPSPQRSPDSSTGIGKKGQQPAKKRLNFGQTGDSESVPDPQPIGEPPAGPSGLGSGTMAAGGGAPMADNNEGADGVGSSSGNWHCDSTWLGDRVITTSTRTWALPTYNNHLYKQISNGTSGGSTNDNTYFGYSTPWGYFDFNRFHCHFSPRDWQRLINNNWGFRPKRLNFKLFNIQVKEVTQNEGTKTIANNLTSTIQVFTDSEYQLPYVLGSAHQGCLPPFPADVFMIPQYGYLTLNNGSQAVGRSSFYCLEYFPSQMLRTGNNFEFSYTFEDVPFHSSYAHSQSLDRLMNPLIDQYLYYLSRTQSTGGTAGTQQLLFSQAGPSNMSAQAKNWLPGPCYRQQRVSTTLSQNNNSNFAWTGATKYHLNGRDSLVNPGVAMATHKDDEERFFPSSGVLMFGKQGAGKDNVDYSSVMLTSEEEIKTTNPVATEQYGVVADNLQQQNTAPIVGAVNSQGALPGMVWQNRDVYLQGPIWAKIPHTDGNFHPSPLMGGFGLKHPPPQILIKNTPVPADPPTTFSQAKLASFITQYSTGQVSVEIEWELQKENSKRWNPEIQYTSNYYKSTNVDFAVNTEGTYSEPRPIGTRYLTRNL

SEQ ID NO: 1906 - DNA, 2214 bp, Artificial Sequence
  Description of Artificial Sequence: Synthetic polynucleotide
atggctgccgatggttatcttccagattggctcgaggacaacctctctgagggcattcgcgagtggtgggacttgaaacctggagccccgaaacccaaagccaaccagcaaaagcaggacgacggccggggtctggtgcttcctggctacaagtacctcggacccttcaacggactcgacaagggggagcccgtcaacgcggcggacgcagcggccctcgagcacgacaaggcctacgaccagcagctcaaagcgggtgacaatccgtacctgcggtataaccacgccgacgccgagtttcaggagcgtctgcaagaagatacgtcttttgggggcaacctcgggcgagcagtcttccaggccaagaagcgggttctcgaacctctcggtctggttgaggaaggcgctaagacggctcctggaaagaagagaccggtagagccatcaccccagcgttctccagactcctctacgggcatcggcaagaaaggccagcagcccgcgaaaaagagactcaactttgggcagactggcgactcagagtcagtgcccgaccctcaaccaatcggagaaccccccgcaggcccctctggtctgggatctggtacaatggctgcaggcggtggcgctccaatggcagacaataacgaaggcgccgacggagtgggtagttcctcaggaaattggcattgcgattccacatggctgggcgacagagtcatcaccaccagcacccgaacctgggccctccccacctacaacaaccacctctacaagcaaatctccaacgggacttcgggaggaagcaccaacgacaacacctacttcggctacagcaccccctgggggtattttgactttaacagattccactgccacttctcaccacgtgactggcagcgactcatcaacaacaactggggattccggcccaagagactcaacttcaagctcttcaacatccaggtcaaggaggtcacgcagaatgaaggcaccaagaccatcgccaataaccttaccagcacgattcaggtctttacggactcggaataccagctcccgtacgtcctcggctctgcgcaccagggctgcctgcctccgttcccggcggacgtcttcatgattcctcagtacgggtacctgactctgaacaatggcagtcaggccgtgggccgttcctccttctactgcctggagtactttccttctcaaatgctgagaacgggcaacaactttgagttcagctacacgtttgaggacgtgccttttcacagcagctacgcgcacagccaaagcctggaccggctgatgaaccccctcatcgaccagtacctgtactacctgtctcggactcagtccacgggaggtaccgcaggaactcagcagttgctattttctcaggccgggcctagtaacatgtcggctcaggccaaaaactggctacccgggccctgctaccggcagcaacgcgtctccacgacactgtcgcaaaataacaacagcaactttgcctggaccggtgccaccaagtatcatctgaatggcagagactctctggtaaatcccggtgtcgctatggcaacccacaaggacgacgaagagcgattttttccgtccagcggagtcttaatgtttgggaaacagggagctggaaaagacaacgtggactatagcagcgttatgctaaccagtgaggaagaaattaaaaccaccaacccagtggccacagaacagtacggcgtggtggccgataacctgcaacagcaaaacaccgctcctattgtaggggccgtcaacagtcaaggagccttacctggcatggtctggcagaaccgggacgtgtacctgcagggtcctatctgggccaagattcctcacacggacggaaactttcatccctcgccgctgatgggaggctttggactgaaacacccgcctcctcagatcctgattaagaatacacctgttcccgcggatcctccaactaccttcagtcaagctaagctggcgtcgttcatcacgcagtacagcaccggacaggtcagcgtggaaattgaatgggagctgcagaaagaaaacagcaaacgctggaacccagagattcaatacacttccaactactacaaatctacaaatgtggactttgctgttaacacagaaggcacttattctgagcctcgccccatcggcacccgttacctcacccgtaatctg

SEQ ID NO: 1907 - protein, 737 aa, Artificial Sequence
  Description of Artificial Sequence: Synthetic polypeptide
MAADGYLPDWLEDNLSEGIREWWDLKPGAPKPKANQQKQDDGRGLVLPGYKYLGPFNGLDKGEPVNAADAAALEHDKAYDQQLKAGDNPYLRYNHADAEFQERLQEDTSFGGNLGRAVFQAKKRVLEPLGLVEEGAKTAPGKKRPVEPSPQRSPDSSTGIGKKGQQPAKKRLNFGQTGDSESVPDPQPLGEPPAAPSGVGSGTMAAGGGAPMADNNEGADGVGNASGNWHCDSTWLGDRVITTSTRTWALPTYNNHLYKQISSQSAGSTNDNTYFGYSTPWGYFDFNRFHCHFSPRDWQRLINNNWGFRPKKLRFKLFNIQVKEVTTNDGVTTIANNLTSTVQVFSDSEYQLPYVLGSAHQGCLPPFPADVFMIPQYGYLTLNNGSQSVGRSSFYCLEYFPSQMLRTGNNFEFSYTFEDVPFHSSYAHSQSLDRLMNPLIDQYLYYLARTQSTTGGTAGNRELQFYQAGPSTMAEQAKNWLPGPCYRQQRVSKTLDQNNNSNFAWTGATKYHLNGRNSLVNPGVAMATHKDDEDRFFPSSGVLIFGKTGAANKTTLENVLMTNEEEIKTTNPVATEEYGVVSSNLQSANTAPQTQTVNSQGALPGMVWQNRDVYLQGPIWAKIPHTDGNFHPSPLMGGFGLKHPPPQILIKNTPVPANPPEVFTPAKFASFITQYSTGQVSVEIEWELQKENSKRWNPEIQYTSNYDKSTNVDFAVDSEGVYSEPRPIGTRYLTRNL

SEQ ID NO: 1908 - DNA, 2211 bp, Artificial Sequence
  Description of Artificial Sequence: Synthetic polynucleotide
atggctgccgatggttatcttccagattggctcgaggacaacctctctgagggcattcgcgagtggtgggacctgaaacctggagccccgaaacccaaagccaaccagcaaaagcaggacgacggccggggtctggtgcttcctggctacaagtacctcggacccttcaacggactcgacaagggggagcccgtcaacgcggcggacgcagcggccctcgagcacgacaaggcctacgaccagcagctcaaagcgggtgacaatccgtacctgcggtataaccacgccgacgccgagtttcaggagcgtctgcaagaagatacgtcatttgggggcaacctcgggcgagcagtcttccaggccaagaagcgggttctcgaacctctcggtctggttgaggaaggcgctaagacggctcctggaaagaagagaccggtagagccgtcacctcagcgttcccccgactcctccacgggcatcggcaagaaaggccagcagcccgccaaaaagagactcaatttcggtcagactggcgactcagagtcagtccccgaccctcaacctctcggagaacctccagcagcgccctctggtgtgggatctggtacaatggctgcaggcggtggcgcaccaatggcagacaataacgaaggtgccgacggagtgggtaatgcctcaggaaattggcattgcgattccacatggctgggcgacagagtcattaccaccagcacccgaacctgggccctgcccacctacaacaaccacctctacaagcaaatctccagtcaaagtgcaggtagtaccaacgacaacacctacttcggctacagcaccccctgggggtattttgactttaacagattccactgccacttctcaccacgtgactggcagcgactcatcaacaacaactggggattccggcccaagaagctgcggttcaagctcttcaacatccaggtcaaggaggtcacgacgaatgacggcgttacgaccatcgctaataaccttaccagcacggttcaggtattctcggactcggaataccagctgccgtacgtcctcggctctgcgcaccagggctgcctgcctccgttcccggcggacgtcttcatgattcctcagtacggctacctgactctcaacaatggcagtcagtctgtgggacgttcctccttctactgcctggagtacttcccctctcagatgctgagaacgggcaacaactttgagttcagctacaccttcgaggacgtgcctttccacagcagctacgcacacagccagagcctggaccggctgatgaatcccctcatcgaccagtacttgtactacctggccagaacacagagtaccacaggaggcacagctggcaatcgggaactgcagttttaccaggccgggccttcaactatggccgaacaagccaagaattggttacctggaccttgctaccggcaacaaagagtctccaaaacgctggatcaaaacaacaacagcaactttgcttggactggtgccaccaaatatcacctgaacggcagaaactcgttggttaatcccggcgtcgccatggcaactcacaaggacgacgaggaccgctttttcccatccagcggagtcctgatttttggaaaaactggagcagctaacaaaactacattggaaaatgtgttaatgacaaatgaagaagaaattaaaactactaatcctgtagccacggaagaatacggggtagtcagcagcaacttacaatcggctaatactgcaccccagacacaaactgtcaacagccagggagccttacctggcatggtctggcagaaccgggacgtgtacctgcagggtcccatctgggccaagattcctcacacggatggcaactttcacccgtctcctttgatgggcggctttggacttaaacatccgcctcctcagatcctgatcaagaacactcccgttcccgctaatcctccggaggtgtttactcctgccaagtttgcttcgttcatcacacagtacagcaccggacaagtcagcgtggaaatcgagtgggagctgcagaaggaaaacagcaagcgctggaacccggagattcagtacacctccaactatgataagtcgactaatgtggactttgccgttgacagcgagggtgtttactctgagcctcgccctattggcactcgttacctcacccgtaatctg

SEQ ID NO: 1909 - protein, 735 aa, Artificial Sequence
  Description of Artificial Sequence: Synthetic polypeptide
MAADGYLPDWLEDNLSEGIREWWDLKPGAPKPKANQQKQDDGRGLVLPGYKYLGPFNGLDKGEPVNAADAAALEHDKAYDQQLKAGDNPYLRYNHADAEFQERLQEDTSFGGNLGRAVFQAKKRVLEPLGLVEEGAKTAPGKKRPVEQSPQEPDSSSGIGKSGQQPAKKRLNFGQTGDSESVPDPQPLGEPPAAPSGVGSNTMASGGGAPMADNNEGADGVGNASGNWHCDSTWLGDRVITTSTRTWALPTYNNHLYKQISSQSGASNDNHYFGYSTPWGYFDFNRFHCHFSPRDWQRLINNNWGFRPKRLNFKLFNIQVKEVTTNDGTTTIANNLTSTVQVFTDSEYQLPYVLGSAHQGCLPPFPADVFMIPQYGYLTLNNGSQAVGRSSFYCLEYFPSQMLRTGNNFTFSYTFEDVPFHSSYAHSQSLDRLMNPLIDQYLYYLSRTQTTSGTAQNRELQFSQAGPSSMANQAKNWLPGPCYRQQRVSKTANDNNNSNFAWTGATKYHLNGRDSLVNPGPAMASHKDDEDKFFPMSGVLIFGKQGAGASNVDLDNVMITDEEEIKTTNPVATEQYGTVATNLQSSNTAPATGTVNSQGALPGMVWQDRDVYLQGPIWAKIPHTDGHFHPSPLMGGFGLKHPPPQILIKNTPVPANPPTTFSPAKFASFITQYSTGQVSVEIEWELQKENSKRWNPEIQYTSNYNKSANVDFTVDTNGVYSEPRPIGTRYLTRNL

SEQ ID NO: 1910 - DNA, 2205 bp, Artificial Sequence
  Description of Artificial Sequence: Synthetic polynucleotide
atggctgccgatggttatcttccagattggctcgaggacaacctctctgagggcattcgcgagtggtgggacttgaaacctggagccccgaaacccaaagccaaccagcaaaagcaggacgacggccggggtctggtgcttcctggctacaagtacctcggacccttcaacggactcgacaagggggagcccgtcaacgcggcggatgcagcggccctcgagcacgacaaggcctacgaccagcagctcaaagcgggtgacaatccgtacctgcggtataaccacgccgacgccgagtttcaggagcgtctgcaagaagatacgtcttttgggggcaacctcgggcgagcagtcttccaggccaagaagagggttctcgaacctcttggtctggttgaggaaggtgctaagacggctcctggaaagaaacgtccggtagagcagtcgccacaagagccagactcctcctcgggcattggcaagtcaggccagcagcccgctaaaaagagactcaattttggtcagactggcgactcagagtcagtccccgacccacaacctctcggagaacctccagcagccccctctggtgtgggatctaatacaatggcttcaggcggtggcgcaccaatggcagacaataacgaaggcgccgacggagtgggtaatgcctcaggaaattggcattgcgattccacatggctgggcgacagagtcatcaccaccagcacccgaacatgggccttgcccacctataacaaccacctctacaagcaaatctccagtcaatcaggggccagcaacgacaaccactacttcggctacagcaccccctgggggtattttgatttcaacagattccactgccatttctcaccacgtgactggcagcgactcatcaacaacaattggggattccggcccaagagactcaacttcaagctcttcaacatccaagtcaaggaggtcacgacgaatgatggcaccacgaccatcgctaataaccttaccagcacggttcaagtcttcacggactcggagtaccagttgccgtacgtcctcggctctgcgcaccagggctgcctccctccgttcccggcggacgtgttcatgattccgcagtacggctacctaacgctcaacaatggcagccaggcagtgggacggtcatccttttactgcctggaatatttcccatcgcagatgctgagaacgggcaataactttaccttcagctacaccttcgaggacgtgcctttccacagcagctacgcgcacagccagagcctggaccggctgatgaatcctctcatcgaccagtacctgtattacctgagcagaactcagactacgtccggaactgcccaaaacagggagttgcagtttagccaggcgggtccatctagcatggctaatcaggccaaaaactggctacctggaccctgttaccggcagcagcgcgtttctaaaacagcaaatgacaacaacaacagcaactttgcctggactggtgctacaaaatatcaccttaatgggcgtgattctttagtcaaccctggccctgctatggcctcacacaaagacgacgaagacaagttctttcccatgagcggtgtcttgatttttggaaagcagggcgccggagcttcaaacgttgatttggacaatgtcatgatcacagacgaagaggaaatcaaaaccactaaccccgtggccaccgaacaatatgggactgtggcaaccaatctccagagcagcaacacagcccctgcgaccggaactgtgaattctcagggagccttacctggaatggtgtggcaagacagagacgtatacctgcagggtcctatttgggccaaaattcctcacacggatggacactttcacccgtctcctctcatgggcggctttggacttaagcacccgcctcctcagatcctcatcaaaaacacgcctgttcctgcgaatcctccgacaacgttttcgcctgcaaagtttgcttcattcatcacccagtattccacaggacaagtgagcgtggagattgaatgggagctgcagaaagaaaacagcaaacgctggaatcccgaaatacagtatacatctaactataataaatctgccaacgttgatttcactgtggacaccaatggagtttatagtgagcctcgccccattggcacccgttacctcacccgtaacctg

SEQ ID NO: 1911 - protein, 735 aa, Artificial Sequence
  Description of Artificial Sequence: Synthetic polypeptide
MAADGYLPDWLEDNLSEGIREWWDLKPGAPQPKANQQHQDDGRGLVLPGYKYLGPFNGLDKGEPVNEADAAALEHDKAYDQQLKAGDNPYLKYNHADAEFQERLQEDTSFGGNLGRAVFQAKKRVLEPLGLVEEAAKTAPGKKRPVEQSPQEPDSSSGIGKSGQQPARKRLNFGQTGDSESVPDPQPLGEPPAAPSGVGSNTMASGGGAPMADNNEGADGVGNSSGNWHCDSTWLGDRVITTSTRTWALPTYNNHLYKQISSQSGASNDNHYFGYSTPWGYFDFNRFHCHFSPRDWQRLINNNWGFRPKKLNFKLFNIQVKEVTQNDGTTTIANNLTSTVQVFTDSEYQLPYVLGSAHQGCLPPFPADVFMIPQYGYLTLNNGSQAVGRSSFYCLEYFPSQMLRTGNNFTFSYTFEDVPFHSSYAHSQSLDRLMNPLIDQYLYYLSRTQTTSGTTQQSRLQFSQAGPSSMAQQAKNWLPGPCYRQQRVSKTANDNNNSNFAWTGATKYHLNGRDSLVNPGPAMASHKDDEEKFFPMHGVLIFGKQGTGASNVDLDNVMITDEEEIRTTNPVATEQYGTVATNLQSSNTAPATGTVNSQGALPGMVWQDRDVYLQGPIWAKIPHTDGHFHPSPLMGGFGLKHPPPQILIKNTPVPANPPTTFSPAKFASFITQYSTGQVSVEIEWELQKENSKRWNPEIQYTSNYNKSVNVDFTVDTNGVYSEPRPIGTRYLTRNL

SEQ ID NO: 1912 - DNA, 2205 bp, Artificial Sequence
  Description of Artificial Sequence: Synthetic polynucleotide
atggctgctgacggttatcttccagattggctcgaggacaacctttctgaaggcattcgtgagtggtgggatctgaaacctggagcccctcaacccaaagcgaaccaacaacaccaggacgacggtcggggtcttgtgcttccgggttacaaatacctcggaccctttaacggactcgacaaaggagagccggtcaacgaggcggacgcggcagccctcgaacacgacaaagcttacgaccagcagctcaaggccggtgacaacccgtacctcaagtacaaccacgccgacgccgagtttcaggagcgtcttcaagaagatacgtcttttgggggcaaccttggcagagcagtcttccaggccaaaaagagggtccttgagcctcttggtctggttgaggaagcagctaaaacggctcctggaaagaagaggcctgtagaacagtctcctcaggaaccggactcatcatctggtattggcaaatcgggccaacagcctgccagaaaaagactaaatttcggtcagactggagactcagagtcagtcccagaccctcaacctctcggagaaccaccagcagccccctcaggtgtgggatctaatacaatggcttcaggcggtggcgcaccaatggcagacaataacgagggtgccgatggagtgggtaattcctcaggaaattggcattgcgattccacatggctgggcgacagagtcatcaccaccagcaccagaacctgggccctgcccacttacaacaaccatctctacaagcaaatctccagccaatcaggagcttcaaacgacaaccactactttggctacagcaccccttgggggtattttgactttaacagattccactgccacttctcaccacgtgactggcagcgactcattaacaacaactggggattccggcccaagaaactcaacttcaagctcttcaacatccaagttaaagaggtcacgcagaacgatggcacgacgactattgccaataaccttaccagcacggttcaagtgtttacggactcggagtatcagctcccgtacgtgctcgggtcggcgcaccaaggctgtctcccgccgtttccagcggacgtcttcatgatccctcagtatggatacctcaccctgaacaacggaagtcaagcggtgggacgctcatccttttactgcctggagtacttcccttcgcagatgctaaggactggaaataacttcacattcagctataccttcgaggatgtaccttttcacagcagctacgctcacagccagagtttggatcgcttgatgaatcctcttattgatcagtatctgtactacctgagcagaacgcaaacaacctctggaacaacccaacaatcacggctgcaatttagccaggctgggccttcgtctatggctcagcaggccaaaaattggctacctgggccctgctaccggcaacagagagtttcaaagactgctaacgacaacaacaacagtaactttgcttggacaggggccaccaaatatcatctcaatggccgcgactcgctggtgaatccaggaccagctatggccagtcacaaggacgatgaagaaaaatttttccctatgcacggcgttctaatatttggcaaacaagggacaggggcaagtaacgtagatttagataatgtaatgattacggatgaagaagagattcgtaccaccaatcctgtggcaacagagcagtatggaactgtggcaactaacttgcagagctcaaatacagctcccgcgactggaactgtcaatagtcagggggccttacctggcatggtgtggcaagatcgtgacgtgtaccttcaaggacctatctgggcaaagattcctcacacggatggacactttcatccttctcctctgatgggaggctttggactgaaacatccgcctcctcaaatcttgatcaaaaatactccggtaccggcaaatcctccgacgactttcagcccggccaagtttgcttcatttatcactcagtactccactggacaggtcagcgtggaaattgagtgggagctacagaaagaaaacagcaaacgttggaatccagagattcagtacacttccaactacaacaagtctgttaatgtggactttactgtagacactaatggtgtttatagtgaacctcgccctattggaacccggtatctcacacgaaacttg

SEQ ID NO: 1913 - protein, 736 aa, Artificial Sequence
  Description of Artificial Sequence: Synthetic polypeptide
MAADGYLPDWLEDNLSEGIREWWDLKPGAPKPKANQQKQDDGRGLVLPGYKYLGPFNGLDKGEPVNAADAAALEHDKAYDQQLKAGDNPYLRYNHADAEFQERLQEDTSFGGNLGRAVFQAKKRVLEPLGLVEEGAKTAPGKKRPVEQSPQEPDSSSGIGKKGQQPARKRLNFGQTGDSESVPDPQPLGEPPAAPSGVGSNTMAAGGGAPMADNNEGADGVGNASGNWHCDSTWLGDRVITTSTRTWALPTYNNHLYKQISSQSGGSTNDNTYFGYSTPWGYFDFNRFHCHFSPRDWQRLINNNWGFRPKRLNFKLFNIQVKEVTTNDGTTTIANNLTSTVQVFTDSEYQLPYVLGSAHQGCLPPFPADVFMIPQYGYLTLNNGSQAVGRSSFYCLEYFPSQMLRTGNNFEFSYTFEDVPFHSSYAHSQSLDRLMNPLIDQYLYYLSRTQTTSGTAGNRTLQFSQAGPSSMANQAKNWLPGPCYRQQRVSKTANQNNNSNFAWTGATKYHLNGRDSLVNPGPAMATHKDDEDKFFPMSGVLIFGKQGAGNSNVDLDNVMITNEEEIKTTNPVATEQYGTVATNLQSANTAPATGTVNSQGALPGMVWQDRDVYLQGPIWAKIPHTDGHFHPSPLMGGFGLKHPPPQILIKNTPVPANPPTTFSPAKFASFITQYSTGQVSVEIEWELQKENSKRWNPEIQYTSNYNKSTNVDFAVDTNGVYSEPRPIGTRYLTRNL

SEQ ID NO: 1914 - protein, 736 aa, Artificial Sequence
  Description of Artificial Sequence: Synthetic polypeptide
MAADGYLPDWLEDNLSEGIREWWDLKPGAPKPKANQQKQDDGRGLVLPGYKYLGPFNGLDKGEPVNAADAAALEHDKAYDQQLKAGDNPYLRYNHADAEFQERLQEDTSFGGNLGRAVFQAKKRVLEPLGLVEEGAKTAPGKKRPVEQSPQEPDSSSGIGKKGQQPAKKRLNFGQTGDSESVPDPQPLGEPPAAPSGVGSNTMASGGGAPMADNNEGADGVGNASGNWHCDSTWLGDRVITTSTRTWALPTYNNHLYKQISSQSGASTNDNTYFGYSTPWGYFDFNRFHCHFSPRDWQRLINNNWGFRPKRLNFKLFNIQVKEVTTNDGTTTIANNLTSTVQVFTDSEYQLPYVLGSAHQGCLPPFPADVFMIPQYGYLTLNNGSQAVGRSSFYCLEYFPSQMLRTGNNFQFSYTFEDVPFHSSYAHSQSLDRLMNPLIDQYLYYLSRTQTTSGTAGNRELQFSQAGPSSMANQAKNWLPGPCYRQQRVSKTTNQNNNSNFAWTGATKYHLNGRDSLVNPGPAMATHKDDEDKFFPMSGVLIFGKQGAGNSNVDLDNVMITNEEEIKTTNPVATEEYGTVATNLQSANTAPATGTVNSQGALPGMVWQNRDVYLQGPIWAKIPHTDGHFHPSPLMGGFGLKHPPPQILIKNTPVPANPPTTFSPAKFASFITQYSTGQVSVEIEWELQKENSKRWNPEIQYTSNYNKSTNVDFAVDTNGVYSEPRPIGTRYLTRNL

SEQ ID NO: 1915 - protein, 736 aa, Artificial Sequence
  Description of Artificial Sequence: Synthetic polypeptide
MAADGYLPDWLEDNLSEGIREWWDLKPGAPKPKANQQKQDDGRGLVLPGYKYLGPFNGLDKGEPVNAADAAALEHDKAYDQQLKAGDNPYLRYNHADAEFQERLQEDTSFGGNLGRAVFQAKKRVLEPLGLVEEGAKTAPGKKRPVEQSPQEPDSSSGIGKKGQQPARKRLNFGQTGDSESVPDPQPLGEPPAAPSGVGSNTMAAGGGAPMADNNEGADGVGNASGNWHCDSTWLGDRVITTSTRTWALPTYNNHLYKQISSQSGGSTNDNTYFGYSTPWGYFDFNRFHCHFSPRDWQRLINNNWGFRPKRLNFKLFNIQVKEVTTNDGTTTIANNLTSTVQVFTDSEYQLPYVLGSAHQGCLPPFPADVFMIPQYGYLTLNNGSQAVGRSSFYCLEYFPSQMLRTGNNFEFSYTFEDVPFHSSYAHSQSLDRLMNPLIDQYLYYLSRTQTTSGTAGNRELQFSQAGPSSMANQAKNWLPGPCYRQQRVSKTTNQNNNSNFAWTGATKYHLNGRDSLVNPGPAMATHKDDEDKFFPMSGVLIFGKQGAGNSNVDLDNVMITSEEEIKTTNPVATEEYGTVATNLQSSNTAPATGTVNSQGALPGMVWQERDVYLQGPIWAKIPHTDGHFHPSPLMGGFGLKHPPPQILIKNTPVPANPPTTFSPAKFASFITQYSTGQVSVEIEWELQKENSKRWNPEIQYTSNYNKSTNVDFAVDTNGVYSEPRPIGTRYLTRNL

SEQ ID NO: 1916 - protein, 736 aa, Artificial Sequence
  Description of Artificial Sequence: Synthetic polypeptide
MAADGYLPDWLEDNLSEGIREWWDLKPGAPKPKANQQKQDDGRGLVLPGYKYLGPFNGLDKGEPVNAADAAALEHDKAYDQQLKAGDNPYLRYNHADAEFQERLQEDTSFGGNLGRAVFQAKKRVLEPLGLVEEGAKTAPGKKRPVEQSPQEPDSSSGIGKKGQQPARKRLNFGQTGDSESVPDPQPLGEPPAAPSGVGSNTMASGGGAPMADNNEGADGVGNASGNWHCDSTWLGDRVITTSTRTWALPTYNNHLYKQISSQSGGSTNDNTYFGYSTPWGYFDFNRFHCHFSPRDWQRLINNNWGFRPKKLNFKLFNIQVKEVTTNDGTTTIANNLTSTVQVFTDSEYQLPYVLGSAHQGCLPPFPADVFMIPQYGYLTLNNGSQAVGRSSFYCLEYFPSQMLRTGNNFEFSYTFEDVPFHSSYAHSQSLDRLMNPLIDQYLYYLSRTQTTSGTAGNRELQFSQAGPSSMANQAKNWLPGPCYRQQRVSKTTNQNNNSNFAWTGATKYHLNGRDSLVNPGPAMATHKDDEDKFFPMSGVLIFGKQGAGNSNVDLDNVMITSEEEIKTTNPVATEEYGTVATNLQSANTAPATGTVNSQGALPGMVWQDRDVYLQGPIWAKIPHTDGHFHPSPLMGGFGLKHPPPQILIKNTPVPANPPTTFSPAKFASFITQYSTGQVSVEIEWELQKENSKRWNPEIQYTSNYNKSTNVDFAVDTNGVYSEPRPIGTRYLTRNL

SEQ ID NO: 1917 - protein, 736 aa, Artificial Sequence
  Description of Artificial Sequence: Synthetic polypeptide
MAADGYLPDWLEDNLSEGIREWWDLKPGAPKPKANQQKQDDGRGLVLPGYKYLGPFNGLDKGEPVNAADAAALEHDKAYDQQLKAGDNPYLRYNHADAEFQERLQEDTSFGGNLGRAVFQAKKRVLEPLGLVEEGAKTAPGKKRPVEQSPQEPDSSSGIGKKGQQPARKRLNFGQTGDSESVPDPQPLGEPPAAPSGVGSNTMAAGGGAPMADNNEGADGVGNASGNWHCDSTWLGDRVITTSTRTWALPTYNNHLYKQISSQSGGSTNDNTYFGYSTPWGYFDFNRFHCHFSPRDWQRLINNNWGFRPKKLNFKLFNIQVKEVTTNDGTTTIANNLTSTVQVFTDSEYQLPYVLGSAHQGCLPPFPADVFMIPQYGYLTLNNGSQAVGRSSFYCLEYFPSQMLRTGNNFQFSYTFEDVPFHSSYAHSQSLDRLMNPLIDQYLYYLSRTQTTSGTAGNRTLQFSQAGPSSMANQAKNWLPGPCYRQQRVSKTTNQNNNSNFAWTGATKYHLNGRDSLVNPGPAMATHKDDEDKFFPMSGVLIFGKQGAGNSNVDLDNVMITNEEEIKTTNPVATEEYGTVATNLQSANTAPATGTVNSQGALPGMVWQDRDVYLQGPIWAKIPHTDGHFHPSPLMGGFGLKHPPPQILIKNTPVPANPPTTFSPAKFASFITQYSTGQVSVEIEWELQKENSKRWNPEIQYTSNYNKSTNVDFAVDTNGVYSEPRPIGTRYLTRNL

SEQ ID NO: 1918 - protein, 736 aa, Artificial Sequence
  Description of Artificial Sequence: Synthetic polypeptide
MAADGYLPDWLEDNLSEGIREWWDLKPGAPKPKANQQKQDDGRGLVLPGYKYLGPFNGLDKGEPVNAADAAALEHDKAYDQQLKAGDNPYLRYNHADAEFQERLQEDTSFGGNLGRAVFQAKKRVLEPLGLVEEGAKTAPGKKRPVEQSPQEPDSSSGIGKKGQQPAKKRLNFGQTGDSESVPDPQPLGEPPAAPSGVGSNTMAAGGGAPMADNNEGADGVGNASGNWHCDSTWLGDRVITTSTRTWALPTYNNHLYKQISSQSGGSTNDNTYFGYSTPWGYFDFNRFHCHFSPRDWQRLINNNWGFRPKKLNFKLFNIQVKEVTTNDGTTTIANNLTSTVQVFTDSEYQLPYVLGSAHQGCLPPFPADVFMIPQYGYLTLNNGSQAVGRSSFYCLEYFPSQMLRTGNNFEFSYTFEDVPFHSSYAHSQSLDRLMNPLIDQYLYYLSRTQTTSGTAGNRTLQFSQAGPSSMANQAKNWLPGPCYRQQRVSKTANQNNNSNFAWTGATKYHLNGRDSLVNPGPAMATHKDDEDKFFPMSGVLIFGKQGAGNSNVDLDNVMITSEEEIKTTNPVATEQYGTVATNLQSSNTAPATGTVNSQGALPGMVWQNRDVYLQGPIWAKIPHTDGHFHPSPLMGGFGLKHPPPQILIKNTPVPANPPTTFSPAKFASFITQYSTGQVSVEIEWELQKENSKRWNPEIQYTSNYNKSTNVDFAVDTNGVYSEPRPIGTRYLTRNL

SEQ ID NO: 1919 - protein, 736 aa, Artificial Sequence
  Description of Artificial Sequence: Synthetic polypeptide
MAADGYLPDWLEDNLSEGIREWWDLKPGAPKPKANQQKQDDGRGLVLPGYKYLGPFNGLDKGEPVNAADAAALEHDKAYDQQLKAGDNPYLRYNHADAEFQERLQEDTSFGGNLGRAVFQAKKRVLEPLGLVEEGAKTAPGKKRPVEQSPQEPDSSSGIGKKGQQPAKKRLNFGQTGDSESVPDPQPLGEPPAAPSGVGSNTMASGGGAPMADNNEGADGVGNASGNWHCDSTWLGDRVITTSTRTWALPTYNNHLYKQISSQSGGSTNDNTYFGYSTPWGYFDFNRFHCHFSPRDWQRLINNNWGFRPKKLNFKLFNIQVKEVTTNDGTTTIANNLTSTVQVFTDSEYQLPYVLGSAHQGCLPPFPADVFMIPQYGYLTLNNGSQAVGRSSFYCLEYFPSQMLRTGNNFEFSYTFEDVPFHSSYAHSQSLDRLMNPLIDQYLYYLSRTQTTSGTAGNRTLQFSQAGPSSMANQAKNWLPGPCYRQQRVSKTANQNNNSNFAWTGATKYHLNGRDSLVNPGPAMATHKDDEDKFFPMSGVLIFGKQGAGNSNVDLDNVMITSEEEIKTTNPVATEEYGTVATNLQSSNTAPATGTVNSQGALPGMVWQNRDVYLQGPIWAKIPHTDGHFHPSPLMGGFGLKHPPPQILIKNTPVPANPPTTFSPAKFASFITQYSTGQVSVEIEWELQKENSKRWNPEIQYTSNYNKSTNVDFAVDTNGVYSEPRPIGTRYLTRNL

SEQ ID NO: 1920 - protein, 736 aa, Artificial Sequence
  Description of Artificial Sequence: Synthetic polypeptide
MAADGYLPDWLEDNLSEGIREWWDLKPGAPKPKANQQKQDDGRGLVLPGYKYLGPFNGLDKGEPVNAADAAALEHDKAYDQQLKAGDNPYLRYNHADAEFQERLQEDTSFGGNLGRAVFQAKKRVLEPLGLVEEGAKTAPGKKRPVEQSPQEPDSSSGIGKKGQQPAKKRLNFGQTGDSESVPDPQPLGEPPAAPSGVGSNTMASGGGAPMADNNEGADGVGNASGNWHCDSTWLGDRVITTSTRTWALPTYNNHLYKQISSQSGGSTNDNTYFGYSTPWGYFDFNRFHCHFSPRDWQRLINNNWGFRPKKLNFKLFNIQVKEVTTNDGTTTIANNLTSTVQVFTDSEYQLPYVLGSAHQGCLPPFPADVFMIPQYGYLTLNNGSQAVGRSSFYCLEYFPSQMLRTGNNFQFSYTFEDVPFHSSYAHSQSLDRLMNPLIDQYLYYLSRTQTTSGTAGNRELQFSQAGPSSMANQAKNWLPGPCYRQQRVSKTTNQNNNSNFAWTGATKYHLNGRDSLVNPGPAMATHKDDEDKFFPMSGVLIFGKQGAGNSNVDLDNVMITNEEEIKTTNPVATEQYGTVATNLQSANTAPATGTVNSQGALPGMVWQDRDVYLQGPIWAKIPHTDGHFHPSPLMGGFGLKHPPPQILIKNTPVPANPPTTFSPAKFASFITQYSTGQVSVEIEWELQKENSKRWNPEIQYTSNYNKSTNVDFAVDTNGVYSEPRPIGTRYLTRNL

SEQ ID NO: 1921 - DNA, 2211 bp, Artificial Sequence
  Description of Artificial Sequence: Synthetic polynucleotide
atggctgccgatggttatcttccagattggctcgaggacaacctctctgagggcattcgcgagtggtgggacttgaaacctggagccccgaaacccaaagccaaccagcaaaagcaggacgacggccggggtctggtgcttcctggctacaagtacctcggacccttcaacggactcgacaagggggagcccgtcaacgcggcggacgcagcggccctcgagcacgacaaggcctacgaccagcagctcaaagcgggtgacaatccgtacctgcggtataaccacgccgacgccgagtttcaggagcgtctgcaagaagatacgtcttttgggggcaacctcgggcgagcagtcttccaggccaagaagcgggttctcgaacctctcggtctggttgaggaaggcgctaagacggctcctggaaagaagagaccggtagagcaatcaccccaggaaccagactcctcttcgggcatcggcaagaaaggccagcagcccgcgaaaaagagactcaactttgggcagacaggcgactcagagtcagtgcccgaccctcaaccactcggagaaccccccgcagccccctctggtgtgggatctaatacaatggctgcaggcggtggcgctccaatggcagacaataacgaaggcgccgacggagtgggtaacgcctcaggaaattggcattgcgattccacatggctgggcgacagagtcatcaccaccagcacccgaacctgggccctccccacctacaacaaccacctctacaagcaaatctccagccaatcgggagcaagcaccaacgacaacacctacttcggctacagcaccccctgggggtattttgactttaacagattccactgccacttctcaccacgtgactggcagcgactcatcaacaacaactggggattccggcccaagagactcaacttcaagctcttcaacatccaggtcaaggaggtcacgacgaatgatggcaccacgaccatcgccaataaccttaccagcacggttcaggtctttacggactcggaataccagctcccgtacgtcctcggctctgcgcaccagggctgcctgcctccgttcccggcggacgtcttcatgattcctcagtacgggtacctgactctgaacaatggcagtcaggccgtgggccgttcctccttctactgcctggagtactttccttctcaaatgctgagaacgggcaacaactttgagttcagctacacgtttgaggacgtgccttttcacagcagctacgcgcacagccaaagcctggaccggctgatgaaccccctcatcgaccagtacctgtactacctgtctcggactcagaccacgagtggtaccgcaggaaatcggacgttgcaattttctcaggccgggcctagtagcatggcgaatcaggccaaaaactggctacccgggccctgctaccggcagcaacgcgtctccaagacagcgaatcaaaataacaacagcaactttgcctggaccggtgccaccaagtatcatctgaatggcagagactctctggtaaatcccggtcccgctatggcaacccacaaggacgacgaagacaaattttttccgatgagcggagtcttaatatttgggaaacagggagctggaaatagcaacgtggaccttgacaacgttatgataaccagtgaggaagaaattaaaaccaccaacccagtggccacagaacagtacggcacggtggccactaacctgcaatcgtcaaacaccgctcctgctacagggaccgtcaacagtcaaggagccttacctggcatggtctggcagaaccgggacgtgtacctgcagggtcctatctgggccaagattcctcacacggacggacactttcatccctcgccgctgatgggaggctttggactgaaacacccgcctcctcagatcctgattaagaatacacctgttcccgcgaatcctccaactaccttcagtccagctaagtttgcgtcgttcatcacgcagtacagcaccggacaggtcagcgtggaaattgaatgggagctgcagaaagaaaacagcaaacgctggaacccagagattcaatacacttccaactacaacaaatctacaaatgtggactttgctgttgacacaaatggcgtttattctgagcctcgccccatcggcacccgttacctcacccgtaatctgtaa

SEQ ID NO: 1922 - protein, 738 aa, Artificial Sequence; identical to SEQ ID NO: 7
  Description of Artificial Sequence: Synthetic polypeptide

SEQ ID NO: 1923 - DNA, 2211 bp, Artificial Sequence
  Description of Artificial Sequence: Synthetic polynucleotide
atggctgccgatggttatcttccagattggctcgaggacaacctctctgagggcattcgcgagtggtgggacttgaaacctggagccccgaaacccaaagccaaccagcaaaagcaggacgacggccggggtctggtgcttcctggctacaagtacctcggacccttcaacggactcgacaagggggagcccgtcaacgcggcggacgcagcggccctcgagcacgacaaggcctacgaccagcagctcaaagcgggtgacaatccgtacctgcggtataaccacgccgacgccgagtttcaggagcgtctgcaagaagatacgtcttttgggggcaacctcgggcgagcagtcttccaggccaagaagcgggttctcgaaccttttggtctggttgaggaaggcgctaagacggctcctggaaagaaacgtccggtagagcagtcgccacaagagccagactcctcctcgggcatcggcaagacaggccagcagcccgctaaaaagagactcaattttggtcagactggcgactcagagtcagtccccgacccacaacctctcggagaacctccagcaacccccgctgctgtgggacctactacaatggcttcaggcggtggcgcaccaatggcagacaataacgaaggcgccgacggagtgggtaatgcctcaggaaattggcattgcgattccacatggctgggcgacagagtcatcaccaccagcacccgcacctgggccttgcccacctacaataaccacctctacaagcaaatctccagtgcttcaacgggggccagcaacgacaaccactacttcggctacagcaccccctgggggtattttgatttcaacagattccactgccacttttcaccgcgtgactggcagcgactcatcaacaacaattggggattccggcccaagagactcaacttcaagctcttcaacatccaagtcaaggaggtcacgacgagtgatggcgtcacaaccatcgctaataaccttaccagcacggttcaagtcttctcggactcggagtaccagcttccgtacgtcctcggctctgcgcaccagggctgcctccctccgttcccggcggacgtgttcatgattccgcaatacggctacctgacgctcaacaatggcagccaagccgtgggacgttcatccttttactgcctggaatatttcccttctcagatgctgagaacgggcaacaactttaccttcagctacacctttgaggaagtgcctttccacagcagctacgcgcacagccagagcctggaccggctgatgaatcctctcatcgaccaatacctgtattacctgaacagaactcaaaatcagtccggaagtgcccaaaacaaggacttgctgtttagccgtgggtctccagctggcatgtctgttcagcccaaaaactggctacctggaccctgttatcggcagcagcgcgtttctaaaacaaaaacaggcaacaacaacagcaattttacctggactggtgcttcaaaatataacctcaatgggcatgaatccatcatcaaccctggcactgctatggcctcacacaaagacgacgaagacaagttctttcccatgagcggtgtcatgatttttggaaaagagagcgccggagcttcaaacactgcattggacaatgtcatgattacagacgaagaggaaattaaagccactaaccctgtggccaccgaaagatttgggaccgtggcagtcaatttccagagcagcagcacacaccctgcgaccggagatgtgcatgttatgggagcattacctggcatggtgtggcaagatagagacgtgtacctgcagggtcccatctgggccaaaattcctcacacagatggacactttcacccgtctcctcttatgggcggctttggactcaagcacccgcctcctcagatcctcatcaaaaacacgcctgttcctgcgaatcctccggcggagttttcagctacaaagtttgcttcattcatcacccaatactccacaggacaagtgagtgtggaaattgaatgggagctgcagaaagaaaacagcaagcgctggaatcccgaagtgcagtacacatccaattatgcaaaatctgccaacgttgattttaccgtggacaacaatggactttatactgagcctcgccccattggcacccgttaccttacccgtcccctgtaa

SEQ ID NO: 1924 - DNA, 2211 bp, Artificial Sequence; identical to SEQ ID NO: 1923
  Description of Artificial Sequence: Synthetic polynucleotide

SEQ ID NO: 1925 - DNA, 2202 bp, Artificial Sequence
  Description of Artificial Sequence: Synthetic polynucleotide
atgactgacggttaccttccagattggctagaggacaacctctctgaaggcgttcgagagtggtgggcgctgcaacctggagcccctaaacccaaggcaaatcaacaacatcaggacaacgctcggggtcttgtgcttccgggttacaaatacctcggacccggcaacggacttgacaagggggaacccgtcaacgcagcggacgcggcagccctcgaacacgacaaggcctacgaccagcagctcaaggccggtgacaacccctacctcaagtacaaccacgccgacgccgagtttcaggagcgtcttcaagaagatacgtcttttgggggcaacctcggacgagcagtcttccaggccaaaaagaggatccttgagcctctgggtctggttgaggaagcggctaagacggctcctggaaaaaagagacctgtagagcaatctccagcagaaccggactcctcttcgggcatcggcaaatcaggccagcagcccgctagaaaaagactgaattttggtcagactggcgacacagagtcagtcccagaccctcaaccactcggacaacctcccgcagccccctctggtgtgggatctactacaatggcttcaggcggtggcgcaccaatggcagacaataacgagggtgccgatggagtgggtaattcctcaggaaattggcattgcgattcccaatggctgggcgacagagtcatcaccaccagcacccgcacctgggccctgcccacctacaacaatcacctctacaagcaaatctccagccaatcaggagccaccaacgacaaccactactttggctacagcaccccctgggggtattttgacttcaacagattccactgccacttttcaccacgtgactggcaaagactcatcaacaacaactggggattccgacccaagagactcaacttcaagctctttaacattcaagtcaaagaggtcacgcagaatgacggtacgacgacgattgccaataaccttaccagcacggttcaggtgtttactgactccgagtaccagctcccgtacgtcctcggctcggcgcatcagggatgcctcccgccgttcccagcagacgtcttcatggtcccacagtatggatacctcaccctgaacaacgggagtcaggcggtaggacgctcttccttttactgcctggagtactttccttctcagatgctgcgtactggaaacaactttcagtttagctacacttttgaagacgtgcctttccacagcagctacgctcacagccaaagtctggaccgtctcatgaatcctctgatcgaccagtacctgtactatctgaacaggacacaaacagccagtggaactcagcagtctcggctactgtttagccaagctggacccaccagtatgtctcttcaagctaaaaactggctgcctggaccttgctacagacagcagcgtctgtcaaagcaggcaaacgacaacaacaacagcaactttccctggactggtgccaccaaatatcatctgaatggccgggactcattggtgaacccgggccctgctatggccagtcacaaggatgacaaagaaaagtttttccccatgcatggaaccctgatatttggtaaagaaggaacaaatgccaacaacgcggatttggaaaatgtcatgattacagatgaagaagaaatccgcaccaccaatcccgtggctacggagcagtacgggactgtgtcaaataatttgcaaaactcaaacgctggtccaactactggaactgtcaatcaccaaggagcgttacctggtatggtgtggcaggatcgagacgtgtacctgcagggacccatttgggccaagattcctcacaccgatggacactttcatccttctccactgatgggaggttttgggctcaaacacccgcctcctcagatcatgatcaaaaacactcccgttccagccaatcctcccacaaactttagtgcggcaaagtttgcttccttcatcacacagtactccacggggcaggtcagcgtggagatcgagtgggagctgcagaaggagaacagcaaacgctggaatcccgaaattcagtacacttccaactacaacaaatctgttaatgtggactttactgtggacactaatggtgtgtattcagagcctcgccccattggcaccagatacctgactcgtaatctgtaa

SEQ ID NO: 1926 - DNA, 2211 bp, Artificial Sequence
  Description of Artificial Sequence: Synthetic polynucleotide
atggctgccgatggttatcttccagattggctcgaggacaacctctctgagggcattcgcgagtggtgggacttgaaacctggagccccgaaacccaaagccaaccagcaaaagcaggacgacggccggggtctggtgcttcctggctacaagtacctcggacccttcaacggactcgacaagggggagcccgtcaacgcggcggacgcagcggccctcgagcacgacaaggcctacgaccagcagctcaaagcgggtgacaatccgtacctgcggtataaccacgccgacgccgagtttcaggagcgtctgcaagaagatacgtcttttgggggcaacctcgggcgagcagtcttccaggccaagaagcgggttctcgaaccttttggtctggttgaggaaggcgctaagacggctcctggaaagaaacgtccggtagagcagtcgccacaagagccagactcctcctcgggcatcggcaagacaggccagcagcccgctaaaaagagactcaattttggtcagactggcgactcagagtcagtccccgacccacaacctctcggagaacctccagcaacccccgctgctgtgggacctactacaatggcttcaggcggtggcgcaccaatggcagacaataacgaaggcgccgacggagtgggtaatgcctcaggaaattggcattgcgattccacatggctgggcgacagagtcatcaccaccagcacccgcacctgggccttgcccacctacaataaccacctctacaagcaaatctccagtgcttcaacgggggccagcaacgacaaccactacttcggctacagcaccccctgggggtattttgatttcaacagattccactgccacttttcaccacgtgactggcagcgactcatcaacaacaattggggattccggcccaagagactcaacttcaagctcttcaacatccaagtcaaggaggtcacgacgaatgatggcgtcacaaccatcgctaataaccttaccagcacggttcaagtcttctcggactcggagtaccagcttccgtacgtcctcggctctgcgcaccagggctgcctccctccgttcccggcggacgtgttcatgattccgcaatacggctacctgacgctcaacaatggcagccaagccgtgggacgttcatccttttactgcctggaatatttcccttctcagatgctgagaacgggcaacaactttaccttcagctacacctttgaggaagtgcctttccacagcagctacgcgcacagccagagcctggaccggctgatgaatcctctcatcgaccaatacctgtattacctgaacagaactcaaaatcagtccggaagtgcccaaaacaaggacttgctgtttagccgtgggtctccagctggcatgtctgttcagcccaaaaactggctacctggaccctgttatcggcagcagcgcgtttctaaaacaaaaacagacaacaacaacagcaattttacctggactggtgcttcaaaatataacctcaatgggcgtgaatccatcatcaaccctggcactgctatggcctcacacaaagacgacgaagacaagttctttcccatgagcggtgtcatgatttttggaaaagagagcgccggagcttcaaacactgcattggacaatgtcatgattacagacgaagaggaaattaaagccactaaccctgtggccaccgaaagatttgggaccgtggcagtcaatttccagagcagcagcacagaccctgcgaccggagatgtgcatgttatgggagcattacctggcatggtgtggcaagatagagacgtgtacctgcagggtcccatctgggccaaaattcctcacacagatggacactttcacccgtctcctcttatgggcggctttggactcaagcacccgcctcctcagatcctcatcaaaaacacgcctgttcctgcgaatcctccggcggagttttcagctacaaagtttgcttcattcatcacccaatactccacaggacaagtgagtgtggaaattgaatgggagctgcagaaagaaaacagcaagcgctggaatcccgaagtgcagtacacatccaattatgcaaaatctgccaacgttgattttaccgtggacaacaatggactttatactgagcctcgccccattggcacccgttaccttacccgtcccctgtaa

SEQ ID NO: 1927 - DNA, 2211 bp, Artificial Sequence
  Description of Artificial Sequence: Synthetic polynucleotide
atggctgccgatggttatcttccagattggctcgaggacaacctctctgagggcattcgcaagtggtgggacttgaaacctggagccccgaaacccaaagccaaccagcaaaagcaggacgacggccggggtctggtgcttcctggctacaagtacctcggacccttcaacggactcgacaagggggagcccgtcaacgcggcggacgcagcggccctcgagcacgacaaggcctacgaccagcagctcaaagcgggtgacaatccgtacctgcggtataaccacgccgacgccgagtttcaggagcgtctgcaagaagatacgtcttttgggggcaacctcgggagagcagtcttccaggccaagaagcgggttctcgaaccttttggtctggttgaggaaggcgctaagacggctcctggaaagaaacgtccggtagagcagtcgccacaagagccagactcctcctcgggcatcggcaagacaggccagcagcccgctaaaaagagactcaattttggtcagactggcgactcagagtcagtccccgacccacaacctctcggagaacctccagcaacccccgctgctgtgggacctactacaatggcttcaggcggtggcgcaccaatggcagacaataacgaaggcgccgacggagtgggtaatgcctcaggaaattggcattgcgattccacatggctgggcgacagagtcatcaccaccagcacccgcacctgggccttgcccacctacaataaccacctctacaagcaaatctccagtgcttcaacgggggccagcaacgacaaccactacttcggctacagcaccccctgggggtattttgatttcaacagattccactgccacttttcaccacgtgactggcagcgactcatcaacaacaattggggattccggcccaagagactcaacttcaagctcttcaacatccaagtcaaggaggtcacgacgaatgatggcgtcacaaccatcgctaataaccttaccagcacggttcaagtcttctcggactcggagtaccagcttccgtacgtcctcggctctgcgcaccagggctgcctccctccgttcccggcggacgtgttcatgattccgcaatacggctacctgacgctcaacaatggcagccaagccgtgggacgttcatccttttactgcctggaatatttcccttctcagatgctgagaacgggcaacaactttaccttcagctacacctttgaggaagtgcctttccacagcagctacgcgcacagccagagcctggaccggctgatgaatcctctcatcgaccaatacctgtattacctgaacagaactcaaaatcagtccggaagtgcccaaaacaaggacttgctgtttagccgtgggtctccagctggcatgtctgttcagcccaaaaactggctacctggaccctgttatcggcagcagcgcgtttctaaaacaaaaacagacaacaacaacagcaattttacctggactggtgcttcaaaatataacctcaatgggcgtgaatccatcatcaaccctggcactgctatggcctcacacaaagacgacaaagacaagttctttcccatgagcggtgtcatgatttttggaaaagagagcgccggagcttcaaacactgcattggacaatgtcatgattacagacgaagaggaaattaaagccactaaccctgtggccaccgaaagatttgggaccgtggcagtcaatttccagagcagcagcacagaccctgcgaccggagatgtgcatgttatgggagcattacctggcatggtgtggcaagatagagacgtgtacctgcagggtcccatttgggccaaaattcctcacacagatggacactttcacccgtctcctcttatgggcggctttggactcaagcacccgcctcctcagatcctcatcaaaaacacacctgttcctgcgaatcctccggcggagttttcagctacaaagtttgcttcattcatcacccaatactccacaggacaagtgagtgtggaaattgaatgggagctgcagaaagaaaacagcaagcgctggaatcccgaagtgcagtacacatccaattatgcaaaatctgccaacgttgattttaccgtggacaacaatggactttatactgagcctcgccccattggcacccgttaccttacccgtcccctgtaa

SEQ ID NO: 1928 - DNA, 2211 bp, Artificial Sequence
  Description of Artificial Sequence: Synthetic polynucleotide
atggctgccgatggttatcttccagattggctcgaggacaacctctctgagggcattcgcgagtggtgggacttgaaacctggagccccgaaacccaaagccaaccagcaaaagcaggacaacggccggggtctggtgcttcctggctacaagtacctcggacccttcaacggactcgacaagggggagcccgtcaacgcggcggacgcagcggccctcgagcacgacaaggcctacgaccagcagctcaaagcgggtgacaatccgtacctgcggtataaccacgccgacgccgagtttcaggagcgtctgcaagaagatacgtcttttgggggcaacctcgggcgagcagtcttccaggccaagaagcgggttctcgaaccttttggtctggttgaggaaggcgctaagacggctcctggaaagaaacgtccggtagagcagtcgccacaagagccagactcctcctcgggcatcggcaagacaggccagcagcccgctaaaaagagactcaattttggtcagactggcgactcagagtcagtccccgacccacaacctctcggagaacctccagcaacccccgctgctgtgggacctactacaatggcttcaggcggtggcgcaccaatggcagacaataacgaaggcgccgacggagtgggtaatgcctcaggaaattggcattgcgattccacatggctgggcgacagagtcatcaccaccagcacccgcacctgggccttgcccacctacaataaccacctctacaagcaaatctccagtgcttcaacgggggccagcaacgacaaccactacttcggctacagcaccccctgggggtattttgatttcaacagattccactgccacttttcaccacgtgactggcagcgactcatcaacaacaattggggattccggcccaagagactcaacttcaagctcttcaacatccaagtcaaggaggtcacgacgaatgatggcgtcacaaccatcgctaataaccttaccagcacggttcaagtcttctcggactcggagtaccagcttccgtacgtcctcggctctgcgcaccagggctgcctccctccgttcccggcggacgtgttcatgattccgcaatacggctacctgacgctcaacaatggcagccaagccgtgggacgttcatccttttactgcctggaatatttcccttctcagatgctgagaacgggcaacaactttaccttcagctacacctttgaggaagtgcctttccacagcagctacgcgcacagccagagcctggaccggctgatgaatcctctcatcgaccaatacctgtattacctgaacagaactcaaaatcagtccggaagtgcccaaaacaaggacttgctgtttagccgtgggtctccagctggcatgtctgttcagcccaaaaactggctacctggaccctgttatcggcagcagcgcgtttctaaaacaaaaacagacaacaacaacagcaattttacctggactggtgcttcaaaatataacctcaatgggcgtgaatccatcatcaaccctggcactgctatggcctcacacaaagacgacgaagacaagttctttcccatgagcggtgtcatgatttttggaaaagagagcgccggagcttcaaacactgcattggacaatgtcatgattacagacgaagaggaaattaaagccactaaccctgtggccaccgaaagatttgggaccgtggcagtcaatttccagagcagcagcacacaccctgcgaccggagatgtgcatgttatgggagcattacctggcatggtgtggcaagatagagacgtgtacctgcagggtcccatctgggccaaaattcctcacacagatggacactttcacccgtctcctcttatgggcggctttggactcaagcacccgcctcctcagatcctcatcaaaaacacgcctgttcctgcgaatcctccggcggagttttcagctacaaagtttgcttcattcatcacccaatactccacaggacaagtgagtgtggaaattgaatgggagctgcagaaagaaaacagcaagcgctggaatcccgaagtgcagtacacatccaattatgcaaaatctgccaacgttgattttaccgtggacaacaatggactttatactgagcctcgccccattggcacccgttaccttacccgtcccctgtaa

SEQ ID NO: 1929 - DNA, 2211 bp, Artificial Sequence
  Description of Artificial Sequence: Synthetic polynucleotide
atggctgccgatggttatcttccagattggctcgaggacaacctctctgagggcattcgcgagtggtgggacttgaaacctggagccccgaaacccaaagccaaccagcaaaagcaggacgacggccggggtctggtgcttcctggctacaagtacctcggacccttcaacggactcgacaagggggagcccgtcaacgcggcggacgcagcggccctcgagcacgacaaggcctacgaccagcagctcaaagcgggtgacaatccgtacctgcggtataaccacgccgacgccgagtttcaggagcgtctgcaagaagatacgtcttttgggggcaacctcgggcgagcagtcttccaggccaaaaagcgggttctcgaaccttttggtctggttgaggaaggcgctaagacggctcctggaaagaaacgtccggtagagcagtcgccacaagagccagactcctcctcgggcatcggcaagacaggccagcagcccgctaaaaagagactcaattttggtcagactggcgactcagagtcagtccccgacccacaacctctcggagaacctccagcaacccccgctgctgtgggacctactacaatggcttcaggcggtggcgcaccaatggcagacaataacgaaggcgccgacggagtgggtaatgcctcaggaaattggcattgcgattccacatggctgggcgacagagtcatcaccaccagcacccgcacctgggccttgcccacctacaataaccacctctacaagcaaatctccagtgcttcaacgggggccagcaacgacaaccactacttcggctacagcaccccctgggggtattttgatttcaacagattccactgccacttttcaccacgtgactggcagcgactcatcaacaacaattggggattccggcccaagagactcaacttcaagctcttcaacatccaagtcaaggaggtcacgacgaatgatggcgtcacaaccatcgctaataaccttaccagcacggttcaagtcttctcggactcggagtaccagcttccgtacgtcctcggctctgcgcaccagggctgcctccctccgttcccggcggacgtgttcatgattccgcaatacggctacctgacgctcaacaatggcagccaagccgtgggacgttcatccttttattgcctggaatatttcccatcgcagatgctgagaacgggcaataactttaccttcagctacacctttgaggacgtgcctttccacagcagctacgcgcacagccagagcctggaccggctgatgaatcctctcatcgaccagtacctgtattacctgaacagaactcagaaccagtccggaagtgcccaaaacaaggacttgctgtttagccgggggtctccagctggcatgtctgttcagctcaaaaactggctacctggaccctgttatcggcagcagcgcgtttctaaaacaaaaacagacaacaacaacagcaattttacctggactggtgcttcaaaatataaccttaatgggcgtgaatccatcatcaaccctggcactgctatggcctcacacaaagacgacgaagacaagttctttcccatgagcggtgtcatgatttttggaaaagagagcgccggagcttcaaacactgcattggacaatgtcatgattacagacgaagaggaaattaaagccactaaccctgtggccaccgaaagatttgggaccgtggcagtcaatttccagagcagcagcacagaccctgcgaccggagatgtgcatgttatgggagcattacctggcatggtgtggcaagatagagacgtgtacctgcagggtcccatttgggccaaaattcctcacacagatggacactttcacccgtctcctcttatgggcggctttggactcaaacacccgcctcctcagatcctcatcaaaaacacacctgttcctgcgaatcctccggcggagttttcagctacaaagtttgcttcattcatcacccaatactccacaggacaagtgagcgtggaaattgaatgggagctgcagaaagaaaacagcaagcgctggaatcccgaagtgcagtacacatccaattatgcaaaatctgccaacgttgattttaccgtggacaacaatggactttatactgagcctcgccccattggcacccgttaccttacccgtcccctgtaa

SEQ ID NO: 1930 - DNA, 2211 bp, Artificial Sequence
  Description of Artificial Sequence: Synthetic polynucleotide
atggctgccgatggttatcttccagattggctcgaggacaacctctctgagggcattcgcgagtggtgggacttgaaacctggagccccgaaacccaaagccaaccagcaaaagcaggacgacggccggggtctggtgcttcctggctacaagtacctcggacccttcaacggactcgacaagggggagcccgtcaacgcggcggacgcagcggccctcgagcacgacaaggcctacgaccagcagctcaaagcgggtgacaatccgtacctgcggtataaccacgccgacgccgagtttcaggagcgtctgcaagaagatacgtcttttgggggcaacctcgggcgagcagtcttccaggccaagaagcgggttctcgaaccttttggtctggttgaggaaggtgctaagacggctcctggaaagaagagaccggtagagcagtcgccccaagaaccagactcctcatcgggcatcggcaaatcaggccagcagcccgctaaaaagagactcaattttggtcagactggcgactcagagtcagtccccgacccacaacctctcggagaacctccagcaacccccgctgctgtgggacctactacaatggcttcaggcggtggcgcaccaatggcagacaataacgaaggcgccgacggagtgggtaatgcctcaggaaattggcattgcgattccacatggctgggcgacagagtcattaccaccagcacccgaacctgggccctgcccacctataacaaccacctctacaaacaaatctccagcgcttcaacgggggccagcaacgacaaccactacttcggctacagcaccccctgggggtattttgattttaacagattccactgccacttctcaccacgtgactggcagcgactcatcaacaacaattggggattccggcccaagagactcaacttcaagctcttcaacatccaagtcaaggaggtcacgacgaacgatggcgtcacgaccatcgctaataaccttaccagcacggttcaagtcttctcggactcggagtaccagttgccgtacgtcctcggctctgcgcaccagggctgcctccctccgttcccggcggacgtgttcatgattccgcagtacggctacctaacactcaacaatggcagccaggccgtgggacgttcatccttttactgcctggaatatttcccatcgcagatgctgagaacgggcaataactttaccttcagctacacattcgaggacgtgcctttccacagcagctacgcgcacagccaaagcctggaccggctgatgaatcctctcatcgaccagtacttgtattacctaaacagaactcaaaatcagtccggaagtgcccaaaacaaggacttgctgtttagccgggggtctccagctggcatgtctgttcagcccaaaaactggctacctggaccctgttatcggcagcagcgcgtttctaaaacaaaaacagacaacaacaacagcaactttacctggactggtgcttcaaaatataaccttaatgggcgtgaatctataatcaaccctggcactgctatggcttcacacaaagacgacgaagacaagttctttccaatgagcggtgtcatgatttttggcaaggagagcgccggagcttcaaacactgcattggacaatgtcatgattacagacgaagaggaaattaaagccactaaccctgtggccaccgaaagatttgggaccgtggcagtcaatttccagagcagcagcacagaccctgcgaccggagatgtgcatgttatgggagcattacctggcatggtgtggcaagatagagacgtgtacctgcagggtccaatttgggccaaaattcctcacacagatggacactttcacccgtctcctcttatgggcggctttggacttaagcacccgcctcctcagatcctcatcaaaaacacgcctgttcctgcgaatcctccggcagagttttcggctacaaagtttgcttcattcatcacccagtattccacaggacaagtgagtgtggaaattgaatgggagttgcagaaagaaaacagcaagcgttggaatcccgaagtgcagtacacatctaattatgcaaaatctgccaacgttgatttcactgtggacaacaatggactttatactgagcctcgccccattggcacccgttacctcacccgtcccctgtaa

SEQ ID NO: 1931 - DNA, 2211 bp, Artificial Sequence
  Description of Artificial Sequence: Synthetic polynucleotide
atggctgccgatggttatcttccagattggctcgaggacaacctctctgagggcattcgcgagtggtgggacttgaaacctggagccccgaaacccaaagccaaccagcaaaagcaggacgacggccggggtctggtgcttcctggctacaagtacctcggacccttcaacggactcgacaagggggagcccgtcaacgcggcggacgcagcggccctcgagcacgacaaggcctacgaccagcagctcaaagcgggtgacaatccgtacctgcggtataaccacgccgacgccgagtttcaggagcgtctgcaagaagatacgtcttttgggggcaacctcgggcgagcagtcttccaggccaagaagagggttctcgaaccttttggtctggttgaggaaggtgctaagacggctcctggaaagaaacgtccggtagagcagtcaccccaagaaccagactcctcctcgggcattggcaaatcaggccagcagcccgctaaaaagagactcaattttggtcagactggcgactcagagtcagtccccgacccacaacctctcggagaacctccagcaacccccgctgctttgggacctactacaatggcttcaggcggtggcgcaccaatggcagacaataacgaaggcgccgacggagtgggtaatgcctcaggaaattggcattgcgattccacatggctgggcgacagagtcatcaccaccagcacccgcacctgggccttgcccacctacaataaccacctctacaagcaaatctccagtgcttcaacgggggccagcaacgacaaccactacttcggctacagcaccccctgggggtattttgatttcaacagattccactgccatttctcaccacgtgactggcagcgactcatcaacaacaactggggattccggcccaagagactcaacttcaagctcttcaacatccaagtcaaggaggtcacgacgaacgatggcgtcacgaccatcgctaataaccttaccagcacggttcaagtcttctcggactcggagtaccagcttccgtacgtcctcggctctgcgcaccagggctgcctccctccgttcccggcggacgtgttcatgattccgcagtacggctacctgacgctcaacaatggcagcaaagccgtgggacgttcatccttttactgcctggaatatttcccttctcagatgctgagaacgggcaacaactttaccttcagctacacctttgaggaagtgcctttccacagcagctacgcgcacagccagagcctggaccggctgatgaatcctctcatcgaccaatacctgtattacctgaacagaactcaaaatcagtccggaagtgcccaaaacaaggacttgctgtttagccgtgggtctccagctggcatgtctgttcagcccaaaaactggctacctggaccctgttatcggcagcagcgcgtttctaaaacaaaaacagacaacaacaacagcaattttacctggactggtgcttcaaaatataacctcaatgggcgtgaatccatcatcaaccctggcactgctatggcctcacacaaagacgacgaagacaagttctttcccatgagcggtgtcatgatttttggaaaagagagcgccggagcttcaaacactgcattggacaatgtcatgattacagacgaagaggaaattaaagccactaaccctgtggccaccgaaagatttgggaccgtggcagtcaatttccagagcagcagcacagaccctgcgaccggagatgtgcatgttatgggagcattacctggcatggtgtggcaagatagagacgtgtacctgcagggtcccatttgggccaaaattcctcacacggatggacactttcacccgtctcctcttatgggcggctttggactcaagcacccgcctcctcagatcctcatcaaaaacacacctgttcctgcgaatcctccggcagagttttcggctacaaagtttgcttcattcatcacccagtactccacaggacaagtgagcgtggaaattgaatgggagttgcagaaagaaaacagtaagcgctggaatcccgaagtgcagtacacatctaattatgcaaaatctgccaacgttgacttcactgtggacaacaatggactttatactgagcctcgccccattggcacccgttacctcacccgtcccctgtaa

SEQ ID NO: 1932 - DNA, 2970 bp, Artificial Sequence
  Description of Artificial Sequence: Synthetic polynucleotide
agatgaccgccaaggtcgtagagtccgccaaggccattctgggcggcagcaaggtgcgcgtggaccaaaaatgcaaggcctctgcgcagatcgaccccacccccgtgatcgtcacctccaacaccaacatgtgcgccgtgattgacgggaacagcaccaccttcgagcaccagcagcccctgcaggaccggatgttcaagtttgaactcacccgccgcctcgactacgactttggcaaggtcaccaagcaggaagtcaaggactttttccggtgggcggctgatcacgtgactgacgtggctcatgagttttacgtcacaaagggtggagctaagaaaaggcccgccccctctgacgaggatataagcgagcccaagcggccgcgcgtgtcatttgcgcagccggagacgtcagacgcggaagctcccggagacttcgccgacaggtaccaaaacaaatgttctcgtcacgcgggtatgctgcagatgctctttccctgcaagacgtgcgagagaatgaatcagaattccaacgtctgcttcacgcacggtcagaaagattgcggggagtgctttcccgggtcagaatctcaaccggtttctgtcgtcagaaaaacgtatcagaaactgtgcatccttcatcagctccggggggcacccgagatcgcctgctctgcttgcgaccaactcaaccccgatttggacgattgccaatttgagcaataaatgactgaaatcaggtatggctgctgacggttatcttccagattggctcgaggacaacctctctgaaggcattcgcgagtggtgggcgctgaaacctggagctccacaacccaaggccaaccaacagcatcaggacaacggcaggggtcttgtgcttcctgggtacaagtacctcggacccttcaacggactcgacaagggagagccggtcaacgaggcagacgccgcggccctcgagcacgacaaggcctacgacaagcagctcgagcagggggacaacccgtatctcaagtacaaccacggcgacgccgagttccagcagcgcttggcgaccgacacctcttttgggggcaacctcgggcgagcagtcttccaggccaaaaagaggattctcgagcctctgggtctggttgaagagggcgttaaaacggctcctggaaagaaacgcccattagaaaagactccaaatcggccgaccaacccggactctgggaaggccccggccaagaaaaagcaaaaagacggcgaaccagccgactctgctagaaggacactcgactttgaagactctggagcaggagacggaccccctgagggatcatcttccggagaaatgtctcatgatgctgagatgcgtgcggcgccaggcggaaatgctgtcgaggcgggacaaggtgccgatggagtgggtaatgcctccggtgattggcattgcgattccacctggtcagagggccgagtcaccaccaccagcacccgaacctgggtcctacccacgtacaacaaccacctgtacctgcgaatcggaacaacggccaacagcaacacctacaacggattctccaccccctggggatactttgactttaaccgcttccactgccacttttccccacgcgactggcagcgactcatcaacaacaactggggactcaggccgaaatcgatgcgtgttaaaatcttcaacatacaggtcaaggaggtcacgacgtcaaacggcgagactacggtcgctaataaccttaccagcacggttcagatctttgcggattcgacgtatgaactcccatacgtgatggacgccggtcaggaggggagctttcctccgtttcccaacgacgtctttatggttccccaatacggatactgcggagttgtcactggaaaaaaccagaaccagacagacagaaatgccttttactgcctggaatactttccatcccaaatgctaagaactggcaacaattttgaagtcagttaccaatttgaaaaagttcctttccattcaatgtacgcgcacagccagagcctggacagaatgatgaatcctttactggatcagtacctgtggcatctgcaatcgaccactaccggaaattcccttaatcaaggaacagctaccaccacgtacgggaaaattaccactggagactttgcctactacaggaaaaactggttgcctggagcctgcattaaacaacaaaaattttcaaagaatgccaatcaaaactacaagattcccgccagcgggggagacgcccttttaaagtatgacacgcataccactctaaatgggcgatggagtaacatggctcctggacctccaatggcaaccgcaggtgccggggactcggattttagcaacagccagctgatctttgccggacccaatccgagcggtaacacgaccacatcttcaaacaatttgttgtttacctcagaagaggagattgccacaacaaacccacgagacacggacatgtttggacagattgcagataataatcaaaatgccaccaccgcccctcacatcgctaacctggacgctatgggaattgttcccggaatggtctggcaaaacagagacatctactaccagggccctatttgggccaaggtccctcacacggacggacactttcacccttcgccgctgatgggaggatttggactgaaacacccgcctccacagattttcatcaaaaacacccccgtacccgccaatcccaatactacctttagcgctgcaaggattaattcttttctgacgcagtacagcaccggacaagttgccgttcagatcgactgggaaattcagaaggagcattccaaacgctggaatcccgaagttcaatttacttcaaactacggcactcaaaattctatgctgtgggctcccgacaatgctggcaactaccacgaactccgggctattgggtcccgtttcctcacccaccacttgtaa

SEQ ID NO: 1933 - protein, 736 aa, Artificial Sequence
  Description of Artificial Sequence: Synthetic polypeptide
MAADGYLPDWLEDNLSEGIREWWDLKPGAPKPKANQQKQDDGRGLVLPGYKYLGPFNGLDKGEPVNAADAAALEHDKAYDQQLKAGDNPYLRYNHADAEFQERLQEDTSFGGNLGRAVFQAKKRVLEPFGLVEEGAKTAPGKKRPVEQSPQEPDSSSGIGKTGQQPAKKRLNFGQTGDSESVPDPQPLGEPPATPAAVGPTTMASGGGAPMADNNEGADGVGNASGNWHCDSTWLGDRVITTSTRTWALPTYNNHLYKQISSASTGASNDNHYFGYSTPWGYFDFNRFHCHFSPRDWQRLINNNWGFRPKRLNFKLFNIQVKEVTTSDGVTTIANNLTSTVQVFSDSEYQLPYVLGSAHQGCLPPFPADVFMIPQYGYLTLNNGSQAVGRSSFYCLEYFPSQMLRTGNNFTFSYTFEEVPFHSSYAHSQSLDRLMNPLIDQYLYYLNRTQNQSGSAQNKDLLFSRGSPAGMSVQPKNWLPGPCYRQQRVSKTKTGNNNSNFTWTGASKYNLNGHESIINPGTAMASHKDDEDKFFPMSGVMIFGKESAGASNTALDNVMITDEEEIKATNPVATERFGTVAVNFQSSSTHPATGDVHVMGALPGMVWQDRDVYLQGPIWAKIPHTDGHFHPSPLMGGFGLKHPPPQILIKNTPVPANPPAEFSATKFASFITQYSTGQVSVEIEWELQKENSKRWNPEVQYTSNYAKSANVDFTVDNNGLYTEPRPIGTRYLTRPL

SEQ ID NO: 1934 - protein, 736 aa, Artificial Sequence; identical to SEQ ID NO: 1933
  Description of Artificial Sequence: Synthetic polypeptide

SEQ ID NO: 1935 - protein, 733 aa, Artificial Sequence
  Description of Artificial Sequence: Synthetic polypeptide
MTDGYLPDWLEDNLSEGVREWWALQPGAPKPKANQQHQDNARGLVLPGYKYLGPGNGLDKGEPVNAADAAALEHDKAYDQQLKAGDNPYLKYNHADAEFQERLQEDTSFGGNLGRAVFQAKKRILEPLGLVEEAAKTAPGKKRPVEQSPAEPDSSSGIGKSGQQPARKRLNFGQTGDTESVPDPQPLGQPPAAPSGVGSTTMASGGGAPMADNNEGADGVGNSSGNWHCDSQWLGDRVITTSTRTWALPTYNNHLYKQISSQSGATNDNHYFGYSTPWGYFDFNRFHCHFSPRDWQRLINNNWGFRPKRLNFKLFNIQVKEVTQNDGTTTIANNLTSTVQVFTDSEYQLPYVLGSAHQGCLPPFPADVFMVPQYGYLTLNNGSQAVGRSSFYCLEYFPSQMLRTGNNFQFSYTFEDVPFHSSYAHSQSLDRLMNPLIDQYLYYLNRTQTASGTQQSRLLFSQAGPTSMSLQAKNWLPGPCYRQQRLSKQANDNNNSNFPWTGATKYHLNGRDSLVNPGPAMASHKDDKEKFFPMHGTLIFGKEGTNANNADLENVMITDEEEIRTTNPVATEQYGTVSNNLQNSNAGPTTGTVNHQGALPGMVWQDRDVYLQGPIWAKIPHTDGHFHPSPLMGGFGLKHPPPQIMIKNTPVPANPPTNFSAAKFASFITQYSTGQVSVEIEWELQKENSKRWNPEIQYTSNYNKSVNVDFTVDTNGVYSEPRPIGTRYLTRNL

SEQ ID NO: 1936 - protein, 736 aa, Artificial Sequence; identical to SEQ ID NO: 757
  Description of Artificial Sequence: Synthetic polypeptide

SEQ ID NO: 1937 - protein, 736 aa, Artificial Sequence
  Description of Artificial Sequence: Synthetic polypeptide
MAADGYLPDWLEDNLSEGIRKWWDLKPGAPKPKANQQKQDDGRGLVLPGYKYLGPFNGLDKGEPVNAADAAALEHDKAYDQQLKAGDNPYLRYNHADAEFQERLQEDTSFGGNLGRAVFQAKKRVLEPFGLVEEGAKTAPGKKRPVEQSPQEPDSSSGIGKTGQQPAKKRLNFGQTGDSESVPDPQPLGEPPATPAAVGPTTMASGGGAPMADNNEGADGVGNASGNWHCDSTWLGDRVITTSTRTWALPTYNNHLYKQISSASTGASNDNHYFGYSTPWGYFDFNRFHCHFSPRDWQRLINNNWGFRPKRLNFKLFNIQVKEVTTNDGVTTIANNLTSTVQVFSDSEYQLPYVLGSAHQGCLPPFPADVFMIPQYGYLTLNNGSQAVGRSSFYCLEYFPSQMLRTGNNFTFSYTFEEVPFHSSYAHSQSLDRLMNPLIDQYLYYLNRTQNQSGSAQNKDLLFSRGSPAGMSVQPKNWLPGPCYRQQRVSKTKTDNNNSNFTWTGASKYNLNGRESIINPGTAMASHKDDKDKFFPMSGVMIFGKESAGASNTALDNVMITDEEEIKATNPVATERFGTVAVNFQSSSTDPATGDVHVMGALPGMVWQDRDVYLQGPIWAKIPHTDGHFHPSPLMGGFGLKHPPPQILIKNTPVPANPPAEFSATKFASFITQYSTGQVSVEIEWELQKENSKRWNPEVQYTSNYAKSANVDFTVDNNGLYTEPRPIGTRYLTRPL

SEQ ID NO: 1938 - protein, 736 aa, Artificial Sequence
  Description of Artificial Sequence: Synthetic polypeptide
MAADGYLPDWLEDNLSEGIREWWDLKPGAPKPKANQQKQDNGRGLVLPGYKYLGPFNGLDKGEPVNAADAAALEHDKAYDQQLKAGDNPYLRYNHADAEFQERLQEDTSFGGNLGRAVFQAKKRVLEPFGLVEEGAKTAPGKKRPVEQSPQEPDSSSGIGKTGQQPAKKRLNFGQTGDSESVPDPQPLGEPPATPAAVGPTTMASGGGAPMADNNEGADGVGNASGNWHCDSTWLGDRVITTSTRTWALPTYNNHLYKQISSASTGASNDNHYFGYSTPWGYFDFNRFHCHFSPRDWQRLINNNWGFRPKRLNFKLFNIQVKEVTTNDGVTTIANNLTSTVQVFSDSEYQLPYVLGSAHQGCLPPFPADVFMIPQYGYLTLNNGSQAVGRSSFYCLEYFPSQMLRTGNNFTFSYTFEEVPFHSSYAHSQSLDRLMNPLIDQYLYYLNRTQNQSGSAQNKDLLFSRGSPAGMSVQPKNWLPGPCYRQQRVSKTKTDNNNSNFTWTGASKYNLNGRESIINPGTAMASHKDDEDKFFPMSGVMIFGKESAGASNTALDNVMITDEEEIKATNPVATERFGTVAVNFQSSSTHPATGDVHVMGALPGMVWQDRDVYLQGPIWAKIPHTDGHFHPSPLMGGFGLKHPPPQILIKNTPVPANPPAEFSATKFASFITQYSTGQVSVEIEWELQKENSKRWNPEVQYTSNYAKSANVDFTVDNNGLYTEPRPIGTRYLTRPL

SEQ ID NO: 1939 - protein, 736 aa, Artificial Sequence
  Description of Artificial Sequence: Synthetic polypeptide
MAADGYLPDWLEDNLSEGIREWWDLKPGAPKPKANQQKQDDGRGLVLPGYKYLGPFNGLDKGEPVNAADAAALEHDKAYDQQLKAGDNPYLRYNHADAEFQERLQEDTSFGGNLGRAVFQAKKRVLEPFGLVEEGAKTAPGKKRPVEQSPQEPDSSSGIGKTGQQPAKKRLNFGQTGDSESVPDPQPLGEPPATPAAVGPTTMASGGGAPMADNNEGADGVGNASGNWHCDSTWLGDRVITTSTRTWALPTYNNHLYKQISSASTGASNDNHYFGYSTPWGYFDFNRFHCHFSPRDWQRLINNNWGFRPKRLNFKLFNIQVKEVTTNDGVTTIANNLTSTVQVFSDSEYQLPYVLGSAHQGCLPPFPADVFMIPQYGYLTLNNGSQAVGRSSFYCLEYFPSQMLRTGNNFTFSYTFEDVPFHSSYAHSQSLDRLMNPLIDQYLYYLNRTQNQSGSAQNKDLLFSRGSPAGMSVQLKNWLPGPCYRQQRVSKTKTDNNNSNFTWTGASKYNLNGRESIINPGTAMASHKDDEDKFFPMSGVMIFGKESAGASNTALDNVMITDEEEIKATNPVATERFGTVAVNFQSSSTDPATGDVHVMGALPGMVWQDRDVYLQGPIWAKIPHTDGHFHPSPLMGGFGLKHPPPQILIKNTPVPANPPAEFSATKFASFITQYSTGQVSVEIEWELQKENSKRWNPEVQYTSNYAKSANVDFTVDNNGLYTEPRPIGTRYLTRPL

SEQ ID NO: 1940 - protein, 736 aa, Artificial Sequence
  Description of Artificial Sequence: Synthetic polypeptide
MAADGYLPDWLEDNLSEGIREWWDLKPGAPKPKANQQKQDDGRGLVLPGYKYLGPFNGLDKGEPVNAADAAALEHDKAYDQQLKAGDNPYLRYNHADAEFQERLQEDTSFGGNLGRAVFQAKKRVLEPFGLVEEGAKTAPGKKRPVEQSPQEPDSSSGIGKSGQQPAKKRLNFGQTGDSESVPDPQPLGEPPATPAAVGPTTMASGGGAPMADNNEGADGVGNASGNWHCDSTWLGDRVITTSTRTWALPTYNNHLYKQISSASTGASNDNHYFGYSTPWGYFDFNRFHCHFSPRDWQRLINNNWGFRPKRLNFKLFNIQVKEVTTNDGVTTIANNLTSTVQVFSDSEYQLPYVLGSAHQGCLPPFPADVFMIPQYGYLTLNNGSQAVGRSSFYCLEYFPSQMLRTGNNFTFSYTFEDVPFHSSYAHSQSLDRLMNPLIDQYLYYLNRTQNQSGSAQNKDLLFSRGSPAGMSVQPKNWLPGPCYRQQRVSKTKTDNNNSNFTWTGASKYNLNGRESIINPGTAMASHKDDEDKFFPMSGVMIFGKGSAGASNTALDNVMITDEEEIKATNPVATERFGTVAVNFQSSSTDPATGDVHVMGALPGMVWQDRDVYLQGPIWAKIPHTDGHFHPSPLMGGFGLKHPPPQILIKNTPVPANPPAEFSATKFASFITQYSTGQVSVEIEWELQKENSKRWNPEVQYTSNYAKSANVDFTVDNNGLYTEPRPIGTRYLTRPL

SEQ ID NO: 1941 - protein, 736 aa, Artificial Sequence; identical to SEQ ID NO: 688
  Description of Artificial Sequence: Synthetic polypeptide

SEQ ID NO: 1942 - protein, 742 aa, Artificial Sequence
  Description of Artificial Sequence: Synthetic polypeptide
MAADGYLPDWLEDNLSEGIREWWALKPGAPQPKANQQHQDNGRGLVLPGYKYLGPFNGLDKGEPVNEADAAALEHDKAYDKQLEQGDNPYLKYNHADAEFQQRLATDTSFGGNLGRAVFQAKKRILEPLGLVEEGVKTAPGKKRPLEKTPNRPTNPDSGKAPAKKKQKDGEPADSARRTLDFEDSGAGDGPPEGSSSGEMSHDAEMRAAPGGNAVEAGQGADGVGNASGDWHCDSTWSEGRVTTTSTRTWVLPTYNNHLYLRIGTTANSNTYNGFSTPWGYFDFNRFHCHFSPRDWQRLINNNWGLRPKSMRVKIFNIQVKEVTTSNGETTVANNLTSTVQIFADSTYELPYVMDAGQEGSFPPFPNDVFMVPQYGYCGVVTGKNQNQTDRNAFYCLEYFPSQMLRTGNNFEVSYQFEKVPFHSMYAHSQSLDRMMNPLLDQYLWHLQSTTTGNSLNQGTATTTYGKITTGDFAYYRKNWLPGACIKQQKFSKNANQNYKIPASGGDALLKYDTHTTLNGRWSNMAPGPPMATAGAGDSDFSNSQLIFAGPNPSGNTTTSSNNLLFTSEEEIATTNPRDTDMFGQIADNNQNATTAPHIANLDAMGIVPGMVWQNRDIYYQGPIWAKVPHTDGHFHPSPLMGGFGLKHPPPQIFIKNTPVPANPNTTFSAARINSFLTQYSTGQVAVQIDWEIQKEHSKRWNPEVQFTSNYGTQNSMLWAPDNAGNYHELRAIGSRFLTHHL

SEQ ID NO: 1943 - DNA, 2211 bp, Artificial Sequence
  Description of Artificial Sequence: Synthetic polynucleotide
atggctgccgatggttatcttccagattggctcgaggacaacctctctgagggcattcgcgagtggtgggacttgaaacctggagccccgaagcccaaagccaaccagcaaaagcaggacgacggccggggtctggtgcttcctggctacaagtacctcggacccttcaacggactcgacaagggggagcccgtcaacgcggcggacgcagcggccctcgagcacgacaaggcctacgaccagcagctcaaagcgggtgacaatccgtacctgcggtataaccacgccgacgccgagtttcaggagcgtctgcaagaagatacgtcttttgggggcaacctcgggcgagcagtcttccaggccaagaagcgggttctcgaacctctcggtctggttgaggaaggcgctaaggcggctcctggaaagaaacgtccggtagagcagtcgccacaagagccagactcctcctcgggcatcggcaagacaggccagcagcccgctaaaaagagactcaattttggtcagactggcgactcagagtcagtccccgatccacaacctctcggagaacctccagcagccccctcaggtctgggacctaatacaatggcttcaggcggtggcgctccaatggcagacaataacgaaggcgccgacggagtgggtaattcctcgggaaattggcattgcgattccacatggctgggggacagagtcatcaccaccagcacccgaacctgggccctgcccacctacaacaaccacctctacaagcaaatctccaacggcacctcgggaggaagcaccaacgacaacacctattttggctacagcaccccctgggggtattttgacttcaacagattccactgtcacttttcaccacgtgactggcaacgactcatcaacaacaattggggattccggcccaaaagactcaacttcaagctgttcaacatccaggtcaaggaagtcacgacgaacgaaggcaccaagaccatcgccaataatctcaccagcaccgtgcaggtctttacggactcggagtaccagttaccgtacgtgctaggatccgctcaccagggatgtctgcctccgttcccggcggacgtcttcatggttcctcagtacggctatttaactttaaacaatggaagccaagccctgggacgttcctccttctactgtctggagtatttcccatcgcagatgctgagaaccggcaacaactttcagttcagctacaccttcgaggacgtgcctttccacagcagctacgcgcacagccagagcctggacaggctgatgaatcccctcatcgaccagtacctgtactacctggtcagaacgcaaacgactggaactggagggacgcagactctggcattcagccaagcgggtcctagctcaatggccaaccaggctagaaattgggtgcccggaccttgctaccggcagcagcgcgtctccacgacaaccaaccagaacaacaacagcaactttgcctggacgggagctgccaagtttaagctgaacggccgagactctctaatgaatccgggcgtggcaatggcttcccacaaggatgacgacgaccgcttcttcccttcgagcggggtcctgatttttggcaagcaaggagccgggaacgatggagtggattacagccaagtgctgattacagatgaggaagaaatcaaggctaccaaccccgtggccacagaagaatatggagcagtggccatcaacaaccaggccgccaatacgcaggcgcagaccggactcgtgcacaaccagggggtgattcccggcatggtgtggcagaatagagacgtgtacctgcagggtcccatctgggccaaaattcctcacacggacggcaactttcacccgtctcccctgatgggcggctttggactgaagcacccgcctcctcaaattctcatcaagaacacaccggttccagcggacccgccgcttaccttcaaccaggccaagctgaactctttcatcacgcagtacagcaccggacaggtcagcgtggaaatcgagtgggagctgcagaaagaaaacagcaaacgctggaatccagagattcaatacacttccaactactacaaatctacaaatgtggactttgctgtcaacacggagggggtttatagcgagcctcgccccattggcacccgttacctcacccgcaacctgtaa

SEQ ID NO: 1944 - DNA, 2592 bp, Artificial Sequence
  Description of Artificial Sequence: Synthetic polynucleotide
ctggctgccgatggttatcttccagattggctcgaggacaacctctctgagggcattcgcgagtggtgggacttgaaacctggagccccgaagcccaaagccaaccagcaaaagcaggacgacggccggggtctggtgcttcctggctacaagtacctcggacccttcaacggactcgacaagggggagcccgtcaacgcggcggacgcagcggccctcgagcacgacaaggcctacgaccagcagctcaaagcgggtgacaatccgtacctgcggtataaccacgccgacgccgagtttcaggagcgtctgcaagaagatacgtcttttgggggcaacctcgggcgagcagtcttccaggccaagaagcgggttctcgaacctctcggtctggttgaggaaggcgctaagatggaagtgcagctccaagccagtggtggcggactggtgcaggcaggaggcagcttgaggctcagctgtgccgccagcggcttcaagatcacccactacaccatgggctggttccggcaggcccctggcaaggagagggagttcgtgagcaggattacctggggtggtgacaacaccttctacagcaacagcgtgaagggcaggttcaccatcagcagggacaacgccaagaacaccgtgtacctgcagatgaacagcctgaagcccgaggacaccgccgactactactgtgcagccggcagtaccagcaccgctacccccctgagggtggactactggggcaaaggcactcaggtgacagtgtcttcaggagggggtggcagcgctcctggaaagaaacgtccggtagagcagtcgccacaagagccagactcctcctcgggcatcggcaagacaggccagcagcccgctaaaaagagactcaattttggtcagactggcgactcagagtcagtccccgatccacaacctctcggagaacctccagcagccccctcaggtctgggacctaatacaatggcttcaggcggtggcgctccaatggcagacaataacgaaggcgccgacggagtgggtaattcctcgggaaattggcattgcgattccacatggctgggggacagagtcatcaccaccagcacccgaacctgggccctgcccacctacaacaaccacctctacaagcaaatctccaacggcacctcgggaggaagcaccaacgacaacacctattttggctacagcaccccctgggggtattttgacttcaacagattccactgtcacttttcaccacgtgactggcaacgactcatcaacaacaattggggattccggcccaaaagactcaacttcaagctgttcaacatccaggtcaaggaagtcacgacgaacgaaggcaccaagaccatcgccaataatctcaccagcaccgtgcaggtctttacggactcggagtaccagttaccgtacgtgctaggatccgctcaccagggatgtctgcctccgttcccggcggacgtcttcatggttcctcagtacggctatttaactttaaacaatggaagccaagccctgggacgttcctccttctactgtctggagtatttcccatcgcagatgctgagaaccggcaacaactttcagttcagctacaccttcgaggacgtgcctttccacagcagctacgcgcacagccagagcctggacaggctgatgaatcccctcatcgaccagtacctgtactacctggtcagaacgcaaacgactggaactggagggacgcagactctggcattcagccaagcgggtcctagctcaatggccaaccaggctagaaattgggtgcccggaccttgctaccggcagcagcgcgtctccacgacaaccaaccagaacaacaacagcaactttgcctggacgggagctgccaagtttaagctgaacggccgagactctctaatgaatccgggcgtggcaatggcttcccacaaggatgacgacgaccgcttcttcccttcgagcggggtcctgatttttggcaagcaaggagccgggaacgatggagtggattacagccaagtgctgattacagatgaggaagaaatcaaggctaccaaccccgtggccacagaagaatatggagcagtggccatcaacaaccaggccgccaatacgcaggcgcagaccggactcgtgcacaaccagggggtgattcccggcatggtgtggcagaatagagacgtgtacctgcagggtcccatctgggccaaaattcctcacacggacggcaactttcacccgtctcccctgatgggcggctttggactgaagcacccgcctcctcaaattctcatcaagaacacaccggttccagcggacccgccgcttaccttcaaccaggccaagctgaactctttcatcacgcagtacagcaccggacaggtcagcgtggaaatcgagtgggagctgcagaaagaaaacagcaaacgctggaatccagagattcaatacacttccaactactacaaatctacaaatgtggactttgctgtcaacacggagggggtttatagcgagcctcgccccattggcacccgttacctcacccgcaacctgtaa

SEQ ID NO: 1945 - DNA, 2601 bp, Artificial Sequence
  Description of Artificial Sequence: Synthetic polynucleotide
ctggctgccgatggttatcttccagattggctcgaggacaacctctctgagggcattcgcgagtggtgggacttgaaacctggagccccgaagcccaaagccaaccagcaaaagcaggacgacggccggggtctggtgcttcctggctacaagtacctcggacccttcaacggactcgacaagggggagcccgtcaacgcggcggacgcagcggccctcgagcacgacaaggcctacgaccagcagctcaaagcgggtgacaatccgtacctgcggtataaccacgccgacgccgagtttcaggagcgtctgcaagaagatacgtcttttgggggcaacctcgggcgagcagtcttccaggccaagaagcgggttctcgaacctctcggtctggttgaggaaggcgctaagatggaggtgcagctgcaggcttctggaggaggactggtgcaggctggagggagtctgaggctgtcttgcagtgcctcagtgaggactttctccatctacgccatgggctggtttaggcaggctcccgggaaggagcgcgaattcgtggccggaatcaaccggtctggcgacgtgaccaagtacgctgatttcgtgaaaggccggtttagcatttccagagacaacgccaagaatatggtgtatctgcagatgaactccctgaaacctgaagacacagctctgtactattgtgccgctacttgggcctacgataccgtgggggctctgacatcaggatataatttttggggccaggggacccaggtgacagtgagctccggaggaggaggaagcgctcctggaaagaaacgtccggtagagcagtcgccacaagagccagactcctcctcgggcatcggcaagacaggccagcagcccgctaaaaagagactcaattttggtcagactggcgactcagagtcagtccccgatccacaacctctcggagaacctccagcagccccctcaggtctgggacctaatacaatggcttcaggcggtggcgctccaatggcagacaataacgaaggcgccgacggagtgggtaattcctcgggaaattggcattgcgattccacatggctgggggacagagtcatcaccaccagcacccgaacctgggccctgcccacctacaacaaccacctctacaagcaaatctccaacggcacctcgggaggaagcaccaacgacaacacctattttggctacagcaccccctgggggtattttgacttcaacagattccactgtcacttttcaccacgtgactggcaacgactcatcaacaacaattggggattccggcccaaaagactcaacttcaagctgttcaacatccaggtcaaggaagtcacgacgaacgaaggcaccaagaccatcgccaataatctcaccagcaccgtgcaggtctttacggactcggagtaccagttaccgtacgtgctaggatccgctcaccagggatgtctgcctccgttcccggcggacgtcttcatggttcctcagtacggctatttaactttaaacaatggaagccaagccctgggacgttcctccttctactgtctggagtatttcccatcgcagatgctgagaaccggcaacaactttcagttcagctacaccttcgaggacgtgcctttccacagcagctacgcgcacagccagagcctggacaggctgatgaatcccctcatcgaccagtacctgtactacctggtcagaacgcaaacgactggaactggagggacgcagactctggcattcagccaagcgggtcctagctcaatggccaaccaggctagaaattgggtgcccggaccttgctaccggcagcagcgcgtctccacgacaaccaaccagaacaacaacagcaactttgcctggacgggagctgccaagtttaagctgaacggccgagactctctaatgaatccgggcgtggcaatggcttcccacaaggatgacgacgaccgcttcttcccttcgagcggggtcctgatttttggcaagcaaggagccgggaacgatggagtggattacagccaagtgctgattacagatgaggaagaaatcaaggctaccaaccccgtggccacagaagaatatggagcagtggccatcaacaaccaggccgccaatacgcaggcgcagaccggactcgtgcacaaccagggggtgattcccggcatggtgtggcagaatagagacgtgtacctgcagggtcccatctgggccaaaattcctcacacggacggcaactttcacccgtctcccctgatgggcggctttggactgaagcacccgcctcctcaaattctcatcaagaacacaccggttccagcggacccgccgcttaccttcaaccaggccaagctgaactctttcatcacgcagtacagcaccggacaggtcagcgtggaaatcgagtgggagctgcagaaagaaaacagcaaacgctggaatccagagattcaatacacttccaactactacaaatctacaaatgtggactttgctgtcaacacggagggggtttatagcgagcctcgccccattggcacccgttacctcacccgcaacctgtaa

SEQ ID NO: 1946 - DNA, 2367 bp, Artificial Sequence
  Description of Artificial Sequence: Synthetic polynucleotide
ctggctgccgatggttatcttccagattggctcgaggacaacctctctgagggcattcgcgagtggtgggacttgaaacctggagccccgaagcccaaagccaaccagcaaaagcaggacgacggccggggtctggtgcttcctggctacaagtacctcggacccttcaacggactcgacaagggggagcccgtcaacgcggcggacgcagcggccctcgagcacgacaaggcctacgaccagcagctcaaagcgggtgacaatccgtacctgcggtataaccacgccgacgccgagtttcaggagcgtctgcaagaagatacgtcttttgggggcaacctcgggcgagcagtcttccaggccaagaagcgggttctcgaacctctcggtctggttgaggaaggcgctaagatgccaagcagtgtaatcgatgcgctgcagtacaagctggagggcaccacgaggctgaccaggaagaggggtctgaagctggccacggccctcagccttagcaataagttcgtagagggcagccccagcggcggcggcggcagcggcggcggcggcagcgctcctggaaagaaacgtccggtagagcagtcgccacaagagccagactcctcctcgggcatcggcaagacaggccagcagcccgctaaaaagagactcaattttggtcagactggcgactcagagtcagtccccgatccacaacctctcggagaacctccagcagccccctcaggtctgggacctaatacaatggcttcaggcggtggcgctccaatggcagacaataacgaaggcgccgacggagtgggtaattcctcgggaaattggcattgcgattccacatggctgggggacagagtcatcaccaccagcacccgaacctgggccctgcccacctacaacaaccacctctacaagcaaatctccaacggcacctcgggaggaagcaccaacgacaacacctattttggctacagcaccccctgggggtattttgacttcaacagattccactgtcacttttcaccacgtgactggcaacgactcatcaacaacaattggggattccggcccaaaagactcaacttcaagctgttcaacatccaggtcaaggaagtcacgacgaacgaaggcaccaagaccatcgccaataatctcaccagcaccgtgcaggtctttacggactcggagtaccagttaccgtacgtgctaggatccgctcaccagggatgtctgcctccgttcccggcggacgtcttcatggttcctcagtacggctatttaactttaaacaatggaagccaagccctgggacgttcctccttctactgtctggagtatttcccatcgcagatgctgagaaccggcaacaactttcagttcagctacaccttcgaggacgtgcctttccacagcagctacgcgcacagccagagcctggacaggctgatgaatcccctcatcgaccagtacctgtactacctggtcagaacgcaaacgactggaactggagggacgcagactctggcattcagccaagcgggtcctagctcaatggccaaccaggctagaaattgggtgcccggaccttgctaccggcagcagcgcgtctccacgacaaccaaccagaacaacaacagcaactttgcctggacgggagctgccaagtttaagctgaacggccgagactctctaatgaatccgggcgtggcaatggcttcccacaaggatgacgacgaccgcttcttcccttcgagcggggtcctgatttttggcaagcaaggagccgggaacgatggagtggattacagccaagtgctgattacagatgaggaagaaatcaaggctaccaaccccgtggccacagaagaatatggagcagtggccatcaacaaccaggccgccaatacgcaggcgcagaccggactcgtgcacaaccagggggtgattcccggcatggtgtggcagaatagagacgtgtacctgcagggtcccatctgggccaaaattcctcacacggacggcaactttcacccgtctcccctgatgggcggctttggactgaagcacccgcctcctcaaattctcatcaagaacacaccggttccagcggacccgccgcttaccttcaaccaggccaagctgaactctttcatcacgcagtacagcaccggacaggtcagcgtggaaatcgagtgggagctgcagaaagaaaacagcaaacgctggaatccagagattcaatacacttccaactactacaaatctacaaatgtggactttgctgtcaacacggagggggtttatagcgagcctcgccccattggcacccgttacctcacccgcaacctgtaa

SEQ ID NO: 1947 - DNA, 2328 bp, Artificial Sequence
  Description of Artificial Sequence: Synthetic polynucleotide
ctggctgccgatggttatcttccagattggctcgaggacaacctctctgagggcattcgcgagtggtgggacttgaaacctggagccccgaagcccaaagccaaccagcaaaagcaggacgacggccggggtctggtgcttcctggctacaagtacctcggacccttcaacggactcgacaagggggagcccgtcaacgcggcggacgcagcggccctcgagcacgacaaggcctacgaccagcagctcaaagcgggtgacaatccgtacctgcggtataaccacgccgacgccgagtttcaggagcgtctgcaagaagatacgtcttttgggggcaacctcgggcgagcagtcttccaggccaagaagcgggttctcgaacctctcggtctggttgaggaaggcgctaagatgtataccatctggatgcccgagaaccccaggcccggtaccccctgcgacatcttcaccaacagcaggggcaagcgagccagcaacggcggcggcggcggcagcggcggcggcggcagcgctcctggaaagaaacgtccggtagagcagtcgccacaagagccagactcctcctcgggcatcggcaagacaggccagcagcccgctaaaaagagactcaattttggtcagactggcgactcagagtcagtccccgatccacaacctctcggagaacctccagcagccccctcaggtctgggacctaatacaatggcttcaggcggtggcgctccaatggcagacaataacgaaggcgccgacggagtgggtaattcctcgggaaattggcattgcgattccacatggctgggggacagagtcatcaccaccagcacccgaacctgggccctgcccacctacaacaaccacctctacaagcaaatctccaacggcacctcgggaggaagcaccaacgacaacacctattttggctacagcaccccctgggggtattttgacttcaacagattccactgtcacttttcaccacgtgactggcaacgactcatcaacaacaattggggattccggcccaaaagactcaacttcaagctgttcaacatccaggtcaaggaagtcacgacgaacgaaggcaccaagaccatcgccaataatctcaccagcaccgtgcaggtctttacggactcggagtaccagttaccgtacgtgctaggatccgctcaccagggatgtctgcctccgttcccggcggacgtcttcatggttcctcagtacggctatttaactttaaacaatggaagccaagccctgggacgttcctccttctactgtctggagtatttcccatcgcagatgctgagaaccggcaacaactttcagttcagctacaccttcgaggacgtgcctttccacagcagctacgcgcacagccagagcctggacaggctgatgaatcccctcatcgaccagtacctgtactacctggtcagaacgcaaacgactggaactggagggacgcagactctggcattcagccaagcgggtcctagctcaatggccaaccaggctagaaattgggtgcccggaccttgctaccggcagcagcgcgtctccacgacaaccaaccagaacaacaacagcaactttgcctggacgggagctgccaagtttaagctgaacggccgagactctctaatgaatccgggcgtggcaatggcttcccacaaggatgacgacgaccgcttcttcccttcgagcggggtcctgatttttggcaagcaaggagccgggaacgatggagtggattacagccaagtgctgattacagatgaggaagaaatcaaggctaccaaccccgtggccacagaagaatatggagcagtggccatcaacaaccaggccgccaatacgcaggcgcagaccggactcgtgcacaaccagggggtgattcccggcatggtgtggcagaatagagacgtgtacctgcagggtcccatctgggccaaaattcctcacacggacggcaactttcacccgtctcccctgatgggcggctttggactgaagcacccgcctcctcaaattctcatcaagaacacaccggttccagcggacccgccgcttaccttcaaccaggccaagctgaactctttcatcacgcagtacagcaccggacaggtcagcgtggaaatcgagtgggagctgcagaaagaaaacagcaaacgctggaatccagagattcaatacacttccaactactacaaatctacaaatgtggactttgctgtcaacacggagggggtttatagcgagcctcgccccattggcacccgttacctcacccgcaacctgtaa

SEQ ID NO: 1948 - DNA, 2298 bp, Artificial Sequence
  Description of Artificial Sequence: Synthetic polynucleotide
ctggctgccgatggttatcttccagattggctcgaggacaacctctctgagggcattcgcgagtggtgggacttgaaacctggagccccgaagcccaaagccaaccagcaaaagcaggacgacggccggggtctggtgcttcctggctacaagtacctcggacccttcaacggactcgacaagggggagcccgtcaacgcggcggacgcagcggccctcgagcacgacaaggcctacgaccagcagctcaaagcgggtgacaatccgtacctgcggtataaccacgccgacgccgagtttcaggagcgtctgcaagaagatacgtcttttgggggcaacctcgggcgagcagtcttccaggccaagaagcgggttctcgaacctctcggtctggttgaggaaggcgctaagatgaccttcttctacggcggcagcaggggcaagaggaacaacttcaagaccgaggagtacggcggcggcggcagcggcggcggcggcagcgctcctggaaagaaacgtccggtagagcagtcgccacaagagccagactcctcctcgggcatcggcaagacaggccagcagcccgctaaaaagagactcaattttggtcagactggcgactcagagtcagtccccgatccacaacctctcggagaacctccagcagccccctcaggtctgggacctaatacaatggcttcaggcggtggcgctccaatggcagacaataacgaaggcgccgacggagtgggtaattcctcgggaaattggcattgcgattccacatggctgggggacagagtcatcaccaccagcacccgaacctgggccctgcccacctacaacaaccacctctacaagcaaatctccaacggcacctcgggaggaagcaccaacgacaacacctattttggctacagcaccccctgggggtattttgacttcaacagattccactgtcacttttcaccacgtgactggcaacgactcatcaacaacaattggggattccggcccaaaagactcaacttcaagctgttcaacatccaggtcaaggaagtcacgacgaacgaaggcaccaagaccatcgccaataatctcaccagcaccgtgcaggtctttacggactcggagtaccagttaccgtacgtgctaggatccgctcaccagggatgtctgcctccgttcccggcggacgtcttcatggttcctcagtacggctatttaactttaaacaatggaagccaagccctgggacgttcctccttctactgtctggagtatttcccatcgcagatgctgagaaccggcaacaactttcagttcagctacaccttcgaggacgtgcctttccacagcagctacgcgcacagccagagcctggacaggctgatgaatcccctcatcgaccagtacctgtactacctggtcagaacgcaaacgactggaactggagggacgcagactctggcattcagccaagcgggtcctagctcaatggccaaccaggctagaaattgggtgcccggaccttgctaccggcagcagcgcgtctccacgacaaccaaccagaacaacaacagcaactttgcctggacgggagctgccaagtttaagctgaacggccgagactctctaatgaatccgggcgtggcaatggcttcccacaaggatgacgacgaccgcttcttcccttcgagcggggtcctgatttttggcaagcaaggagccgggaacgatggagtggattacagccaagtgctgattacagatgaggaagaaatcaaggctaccaaccccgtggccacagaagaatatggagcagtggccatcaacaaccaggccgccaatacgcaggcgcagaccggactcgtgcacaaccagggggtgattcccggcatggtgtggcagaatagagacgtgtacctgcagggtcccatctgggccaaaattcctcacacggacggcaactttcacccgtctcccctgatgggcggctttggactgaagcacccgcctcctcaaattctcatcaagaacacaccggttccagcggacccgccgcttaccttcaaccaggccaagctgaactctttcatcacgcagtacagcaccggacaggtcagcgtggaaatcgagtgggagctgcagaaagaaaacagcaaacgctggaatccagagattcaatacacttccaactactacaaatctacaaatgtggactttgctgtcaacacggagggggtttatagcgagcctcgccccattggcacccgttacctcacccgcaacctgtaa

SEQ ID NO: 1949 - DNA, 2211 bp, Artificial Sequence
  Description of Artificial Sequence: Synthetic polynucleotide
atggctgccgatggttatcttccagattggctcgaggacaaccttagtgaaggaattcgcgagtggtgggctttgaaacctggagcccctcaacccaaggcaaatcaacaacatcaagacaacgctcgaggtcttgtgcttccgggttacaaataccttggacccggcaacggactcgacaagggggagccggtcaacgcagcagacgcggcggccctcgagcacgacaaggcctacgaccagcagctcaaggccggagacaacccgtacctcaagtacaaccacgccgacgccgagttccaggagcggctcaaagaagatacgtcttttgggggcaacctcgggcgagcagtcttccaggccaaaaagaggcttcttgaacctcttggtctggttgaggaagcggctaaggcggctcctggaaagaagaggcctgtagagcagtctcctcaggaaccggactcctccgcgggtattggcaaatcgggtgcacagcccgctaaaaagagactcaatttcggtcagactggcgacacagagtcagtcccagaccctcaaccaatcggagaacctcccgcagccccctcaggtgtgggatctcttacaatggcttcaggtggtggcgcaccagtggcagacaataacgaaggtgccgatggagtgggtagttcctcgggaaattggcattgcgattcccaatggctgggggacagagtcatcaccaccagcacccgaacctgggccctgcccacctacaacaatcacctctacaagcaaatctccaacagcacatctggaggatcttcaaatgacaacgcctacttcggctacagcaccccctgggggtattttgacttcaacagattccactgccacttctcaccacgtgactggcagcgactcatcaacaacaactggggattccggcctaagcgactcaacttcaagctcttcaacattcaggtcaaagaggttacggacaacaatggagtcaagaccatcgccaataaccttaccagcacggtccaggtcttcacggactcagactatcagctcccgtacgtgctcgggtcggctcacgagggctgcctcccgccgttcccagcggacgttttcatgattcctcagtacgggtatctgacgcttaatgatggaagccaggccgtgggtcgttcgtccttttactgcctggaatatttcccgtcgcaaatgctaagaacgggtaacaacttccagttcaactacgagtttgagaacgtacctttccatagcagctacgctcacagccaaagcctggaccgactaatgaatccactcatcgaccaatacttgtactatctctcaaagactattaacgattctggacagaatcaacaaacgctaaaattcagtgtggccggacccagcaacatggctgtccagggaagaaactacatacctggacccagctaccgacaacaacgtgtctcaaccactgtgactcaaaacaacaacagcgaatttgcttggcctggagcttcttcttgggctctcaatggacgtaatagcttgatgaatcctggacctgctatggccagccacaaagaaggagaggaccgtttctttcctttgtctggatctttaatttttggcaaacaaggaactggaagagacaacgtggatgcggacgaagtcatgataaccaacgaagaagaaattaaaactactaacccggtagcaacggagtcctatggacaagtggccataaaccaccagagtgcccaagcacaggcgcagaccggctgggttcaaaaccaaggaatacttccgggtatggtttggcaggacagagatgtgtacctgcaaggacccatttgggccaaaattcctcacacggacggcaactttcacccttctccgctgatgggagggtttggaatgaagcacccgcctcctcagatcctcatcaaaaacacacctgtacctgcggatcctccaacggccttcaacaaggacaagctgaactctttcatcacccagtattctactggccaagtcagcgtggagatcgagtgggagctgcagaaggaaaacagcaagcgctggaacccggagatccagtacacttccaactattacaagtctaataatgttgaatttgctgttaatactgaaggtgtatatagtgaaccccgccccattggcaccagatacctgactcgtaatctgtaa

SEQ ID NO: 1950 - DNA, 2277 bp, Artificial Sequence
  Description of Artificial Sequence: Synthetic polynucleotide
ctggctgccgatggttatcttccagattggctcgaggacaaccttagtgaaggaattcgcgagtggtgggctttgaaacctggagcccctcaacccaaggcaaatcaacaacatcaagacaacgctcgaggtcttgtgcttccgggttacaaataccttggacccggcaacggactcgacaagggggagccggtcaacgcagcagacgcggcggccctcgagcacgacaaggcctacgaccagcagctcaaggccggagacaacccgtacctcaagtacaaccacgccgacgccgagttccaggagcggctcaaagaagatacgtcttttgggggcaacctcgggcgagcagtcttccaggccaaaaagaggcttcttgaacctcttggtctggttgaggaagcggctaagatgaacaaccagaagatcgtgaacctgaaggagaaggtggcccagctggaggccggcggcggcggcagcgctcctggaaagaagaggcctgtagagcagtctcctcaggaaccggactcctccgcgggtattggcaaatcgggtgcacagcccgctaaaaagagactcaatttcggtcagactggcgacacagagtcagtcccagaccctcaaccaatcggagaacctcccgcagccccctcaggtgtgggatctcttacaatggcttcaggtggtggcgcaccagtggcagacaataacgaaggtgccgatggagtgggtagttcctcgggaaattggcattgcgattcccaatggctgggggacagagtcatcaccaccagcacccgaacctgggccctgcccacctacaacaatcacctctacaagcaaatctccaacagcacatctggaggatcttcaaatgacaacgcctacttcggctacagcaccccctgggggtattttgacttcaacagattccactgccacttctcaccacgtgactggcagcgactcatcaacaacaactggggattccggcctaagcgactcaacttcaagctcttcaacattcaggtcaaagaggttacggacaacaatggagtcaagaccatcgccaataaccttaccagcacggtccaggtcttcacggactcagactatcagctcccgtacgtgctcgggtcggctcacgagggctgcctcccgccgttcccagcggacgttttcatgattcctcagtacgggtatctgacgcttaatgatggaagccaggccgtgggtcgttcgtccttttactgcctggaatatttcccgtcgcaaatgctaagaacgggtaacaacttccagttcaactacgagtttgagaacgtacctttccatagcagctacgctcacagccaaagcctggaccgactaatgaatccactcatcgaccaatacttgtactatctctcaaagactattaacgattctggacagaatcaacaaacgctaaaattcagtgtggccggacccagcaacatggctgtccagggaagaaactacatacctggacccagctaccgacaacaacgtgtctcaaccactgtgactcaaaacaacaacagcgaatttgcttggcctggagcttcttcttgggctctcaatggacgtaatagcttgatgaatcctggacctgctatggccagccacaaagaaggagaggaccgtttctttcctttgtctggatctttaatttttggcaaacaaggaactggaagagacaacgtggatgcggacgaagtcatgataaccaacgaagaagaaattaaaactactaacccggtagcaacggagtcctatggacaagtggccataaaccaccagagtgcccaagcacaggcgcagaccggctgggttcaaaaccaaggaatacttccgggtatggtttggcaggacagagatgtgtacctgcaaggacccatttgggccaaaattcctcacacggacggcaactttcacccttctccgctgatgggagggtttggaatgaagcacccgcctcctcagatcctcatcaaaaacacacctgtacctgcggatcctccaacggccttcaacaaggacaagctgaactctttcatcacccagtattctactggccaagtcagcgtggagatcgagtgggagctgcagaaggaaaacagcaagcgctggaacccggagatccagtacacttccaactattacaagtctaataatgttgaatttgctgttaatactgaaggtgtatatagtgaaccccgccccattggcaccagatacctgactcgtaatctgtaa

SEQ ID NO: 1951 - DNA, 2313 bp, Artificial Sequence
  Description of Artificial Sequence: Synthetic polynucleotide
ctggctgccgatggttatcttccagattggctcgaggacaaccttagtgaaggaattcgcgagtggtgggctttgaaacctggagcccctcaacccaaggcaaatcaacaacatcaagacaacgctcgaggtcttgtgcttccgggttacaaataccttggacccggcaacggactcgacaagggggagccggtcaacgcagcagacgcggcggccctcgagcacgacaaggcctacgaccagcagctcaaggccggagacaacccgtacctcaagtacaaccacgccgacgccgagttccaggagcggctcaaagaagatacgtcttttgggggcaacctcgggcgagcagtcttccaggccaaaaagaggcttcttgaacctcttggtctggttgaggaagcggctaagatgtataccatctggatgcccgagaaccccaggcccggtaccccctgcgacatcttcaccaacagcaggggcaagcgagccagcaacggcggcggcggcggcagcgctcctggaaagaagaggcctgtagagcagtctcctcaggaaccggactcctccgcgggtattggcaaatcgggtgcacagcccgctaaaaagagactcaatttcggtcagactggcgacacagagtcagtcccagaccctcaaccaatcggagaacctcccgcagccccctcaggtgtgggatctcttacaatggcttcaggtggtggcgcaccagtggcagacaataacgaaggtgccgatggagtgggtagttcctcgggaaattggcattgcgattcccaatggctgggggacagagtcatcaccaccagcacccgaacctgggccctgcccacctacaacaatcacctctacaagcaaatctccaacagcacatctggaggatcttcaaatgacaacgcctacttcggctacagcaccccctgggggtattttgacttcaacagattccactgccacttctcaccacgtgactggcagcgactcatcaacaacaactggggattccggcctaagcgactcaacttcaagctcttcaacattcaggtcaaagaggttacggacaacaatggagtcaagaccatcgccaataaccttaccagcacggtccaggtcttcacggactcagactatcagctcccgtacgtgctcgggtcggctcacgagggctgcctcccgccgttcccagcggacgttttcatgattcctcagtacgggtatctgacgcttaatgatggaagccaggccgtgggtcgttcgtccttttactgcctggaatatttcccgtcgcaaatgctaagaacgggtaacaacttccagttcaactacgagtttgagaacgtacctttccatagcagctacgctcacagccaaagcctggaccgactaatgaatccactcatcgaccaatacttgtactatctctcaaagactattaacgattctggacagaatcaacaaacgctaaaattcagtgtggccggacccagcaacatggctgtccagggaagaaactacatacctggacccagctaccgacaacaacgtgtctcaaccactgtgactcaaaacaacaacagcgaatttgcttggcctggagcttcttcttgggctctcaatggacgtaatagcttgatgaatcctggacctgctatggccagccacaaagaaggagaggaccgtttctttcctttgtctggatctttaatttttggcaaacaaggaactggaagagacaacgtggatgcggacgaagtcatgataaccaacgaagaagaaattaaaactactaacccggtagcaacggagtcctatggacaagtggccataaaccaccagagtgcccaagcacaggcgcagaccggctgggttcaaaaccaaggaatacttccgggtatggtttggcaggacagagatgtgtacctgcaaggacccatttgggccaaaattcctcacacggacggcaactttcacccttctccgctgatgggagggtttggaatgaagcacccgcctcctcagatcctcatcaaaaacacacctgtacctgcggatcctccaacggccttcaacaaggacaagctgaactctttcatcacccagtattctactggccaagtcagcgtggagatcgagtgggagctgcagaaggaaaacagcaagcgctggaacccggagatccagtacacttccaactattacaagtctaataatgttgaatttgctgttaatactgaaggtgtatatagtgaaccccgccccattggcaccagatacctgactcgtaatctgtaa

SEQ ID NO: 1952 - DNA, 2283 bp, Artificial Sequence
  Description of Artificial Sequence: Synthetic polynucleotide
ctggctgccgatggttatcttccagattggctcgaggacaaccttagtgaaggaattcgcgagtggtgggctttgaaacctggagcccctcaacccaaggcaaatcaacaacatcaagacaacgctcgaggtcttgtgcttccgggttacaaataccttggacccggcaacggactcgacaagggggagccggtcaacgcagcagacgcggcggccctcgagcacgacaaggcctacgaccagcagctcaaggccggagacaacccgtacctcaagtacaaccacgccgacgccgagttccaggagcggctcaaagaagatacgtcttttgggggcaacctcgggcgagcagtcttccaggccaaaaagaggcttcttgaacctcttggtctggttgaggaagcggctaagatgaccttcttctacggcggcagcaggggcaagaggaacaacttcaagaccgaggagtacggcggcggcggcagcgctcctggaaagaagaggcctgtagagcagtctcctcaggaaccggactcctccgcgggtattggcaaatcgggtgcacagcccgctaaaaagagactcaatttcggtcagactggcgacacagagtcagtcccagaccctcaaccaatcggagaacctcccgcagccccctcaggtgtgggatctcttacaatggcttcaggtggtggcgcaccagtggcagacaataacgaaggtgccgatggagtgggtagttcctcgggaaattggcattgcgattcccaatggctgggggacagagtcatcaccaccagcacccgaacctgggccctgcccacctacaacaatcacctctacaagcaaatctccaacagcacatctggaggatcttcaaatgacaacgcctacttcggctacagcaccccctgggggtattttgacttcaacagattccactgccacttctcaccacgtgactggcagcgactcatcaacaacaactggggattccggcctaagcgactcaacttcaagctcttcaacattcaggtcaaagaggttacggacaacaatggagtcaagaccatcgccaataaccttaccagcacggtccaggtcttcacggactcagactatcagctcccgtacgtgctcgggtcggctcacgagggctgcctcccgccgttcccagcggacgttttcatgattcctcagtacgggtatctgacgcttaatgatggaagccaggccgtgggtcgttcgtccttttactgcctggaatatttcccgtcgcaaatgctaagaacgggtaacaacttccagttcaactacgagtttgagaacgtacctttccatagcagctacgctcacagccaaagcctggaccgactaatgaatccactcatcgaccaatacttgtactatctctcaaagactattaacgattctggacagaatcaacaaacgctaaaattcagtgtggccggacccagcaacatggctgtccagggaagaaactacatacctggacccagctaccgacaacaacgtgtctcaaccactgtgactcaaaacaacaacagcgaatttgcttggcctggagcttcttcttgggctctcaatggacgtaatagcttgatgaatcctggacctgctatggccagccacaaagaaggagaggaccgtttctttcctttgtctggatctttaatttttggcaaacaaggaactggaagagacaacgtggatgcggacgaagtcatgataaccaacgaagaagaaattaaaactactaacccggtagcaacggagtcctatggacaagtggccataaaccaccagagtgcccaagcacaggcgcagaccggctgggttcaaaaccaaggaatacttccgggtatggtttggcaggacagagatgtgtacctgcaaggacccatttgggccaaaattcctcacacggacggcaactttcacccttctccgctgatgggagggtttggaatgaagcacccgcctcctcagatcctcatcaaaaacacacctgtacctgcggatcctccaacggccttcaacaaggacaagctgaactctttcatcacccagtattctactggccaagtcagcgtggagatcgagtgggagctgcagaaggaaaacagcaagcgctggaacccggagatccagtacacttccaactattacaagtctaataatgttgaatttgctgttaatactgaaggtgtatatagtgaaccccgccccattggcaccagatacctgactcgtaatctgtaa

SEQ ID NO: 1953 - DNA, 2283 bp, Artificial Sequence
  Description of Artificial Sequence: Synthetic polynucleotide
ctggctgccgatggttatcttccagattggctcgaggacaaccttagtgaaggaattcgcgagtggtgggctttgaaacctggagcccctcaacccaaggcaaatcaacaacatcaagacaacgctcgaggtcttgtgcttccgggttacaaataccttggacccggcaacggactcgacaagggggagccggtcaacgcagcagacgcggcggccctcgagcacgacaaggcctacgaccagcagctcaaggccggagacaacccgtacctcaagtacaaccacgccgacgccgagttccaggagcggctcaaagaagatacgtcttttgggggcaacctcgggcgagcagtcttccaggccaaaaagaggcttcttgaacctcttggtctggttgaggaagcggctaagatggcagctgcggccgccgcggctgcagcggctgcagccgccgcagctgcggctgcagcgggcggcggcggcagcgctcctggaaagaagaggcctgtagagcagtctcctcaggaaccggactcctccgcgggtattggcaaatcgggtgcacagcccgctaaaaagagactcaatttcggtcagactggcgacacagagtcagtcccagaccctcaaccaatcggagaacctcccgcagccccctcaggtgtgggatctcttacaatggcttcaggtggtggcgcaccagtggcagacaataacgaaggtgccgatggagtgggtagttcctcgggaaattggcattgcgattcccaatggctgggggacagagtcatcaccaccagcacccgaacctgggccctgcccacctacaacaatcacctctacaagcaaatctccaacagcacatctggaggatcttcaaatgacaacgcctacttcggctacagcaccccctgggggtattttgacttcaacagattccactgccacttctcaccacgtgactggcagcgactcatcaacaacaactggggattccggcctaagcgactcaacttcaagctcttcaacattcaggtcaaagaggttacggacaacaatggagtcaagaccatcgccaataaccttaccagcacggtccaggtcttcacggactcagactatcagctcccgtacgtgctcgggtcggctcacgagggctgcctcccgccgttcccagcggacgttttcatgattcctcagtacgggtatctgacgcttaatgatggaagccaggccgtgggtcgttcgtccttttactgcctggaatatttcccgtcgcaaatgctaagaacgggtaacaacttccagttcaactacgagtttgagaacgtacctttccatagcagctacgctcacagccaaagcctggaccgactaatgaatccactcatcgaccaatacttgtactatctctcaaagactattaacgattctggacagaatcaacaaacgctaaaattcagtgtggccggacccagcaacatggctgtccagggaagaaactacatacctggacccagctaccgacaacaacgtgtctcaaccactgtgactcaaaacaacaacagcgaatttgcttggcctggagcttcttcttgggctctcaatggacgtaatagcttgatgaatcctggacctgctatggccagccacaaagaaggagaggaccgtttctttcctttgtctggatctttaatttttggcaaacaaggaactggaagagacaacgtggatgcggacgaagtcatgataaccaacgaagaagaaattaaaactactaacccggtagcaacggagtcctatggacaagtggccataaaccaccagagtgcccaagcacaggcgcagaccggctgggttcaaaaccaaggaatacttccgggtatggtttggcaggacagagatgtgtacctgcaaggacccatttgggccaaaattcctcacacggacggcaactttcacccttctccgctgatgggagggtttggaatgaagcacccgcctcctcagatcctcatcaaaaacacacctgtacctgcggatcctccaacggccttcaacaaggacaagctgaactctttcatcacccagtattctactggccaagtcagcgtggagatcgagtgggagctgcagaaggaaaacagcaagcgctggaacccggagatccagtacacttccaactattacaagtctaataatgttgaatttgctgttaatactgaaggtgtatatagtgaaccccgccccattggcaccagatacctgactcgtaatctgtaa

SEQ ID NO: 1954 - protein, 726 aa, Artificial Sequence
  Description of Artificial Sequence: Synthetic polypeptide
MEVQLQASGGGLVQAGGSLRLSCAASGFKITHYTMGWFRQAPGKEREFVSRITWGGDNTFYSNSVKGRFTISRDNAKNTVYLQMNSLKPEDTADYYCAAGSTSTATPLRVDYWGKGTQVTVSSGGGGSAPGKKRPVEQSPQEPDSSSGIGKTGQQPAKKRLNFGQTGDSESVPDPQPLGEPPAAPSGLGPNTMASGGGAPMADNNEGADGVGNSSGNWHCDSTWLGDRVITTSTRTWALPTYNNHLYKQISNGTSGGSTNDNTYFGYSTPWGYFDFNRFHCHFSPRDWQRLINNNWGFRPKRLNFKLFNIQVKEVTTNEGTKTIANNLTSTVQVFTDSEYQLPYVLGSAHQGCLPPFPADVFMVPQYGYLTLNNGSQALGRSSFYCLEYFPSQMLRTGNNFQFSYTFEDVPFHSSYAHSQSLDRLMNPLIDQYLYYLVRTQTTGTGGTQTLAFSQAGPSSMANQARNWVPGPCYRQQRVSTTTNQNNNSNFAWTGAAKFKLNGRDSLMNPGVAMASHKDDDDRFFPSSGVLIFGKQGAGNDGVDYSQVLITDEEEIKATNPVATEEYGAVAINNQAANTQAQTGLVHNQGVIPGMVWQNRDVYLQGPIWAKIPHTDGNFHPSPLMGGFGLKHPPPQILIKNTPVPADPPLTFNQAKLNSFITQYSTGQVSVEIEWELQKENSKRWNPEIQYTSNYYKSTNVDFAVNTEGVYSEPRPIGTRYLTRNL

SEQ ID NO: 1955 - protein, 729 aa, Artificial Sequence
  Description of Artificial Sequence: Synthetic polypeptide
MEVQLQASGGGLVQAGGSLRLSCSASVRTFSIYAMGWFRQAPGKEREFVAGINRSGDVTKYADFVKGRFSISRDNAKNMVYLQMNSLKPEDTALYYCAATWAYDTVGALTSGYNFWGQGTQVTVSSGGGGSAPGKKRPVEQSPQEPDSSSGIGKTGQQPAKKRLNFGQTGDSESVPDPQPLGEPPAAPSGLGPNTMASGGGAPMADNNEGADGVGNSSGNWHCDSTWLGDRVITTSTRTWALPTYNNHLYKQISNGTSGGSTNDNTYFGYSTPWGYFDFNRFHCHFSPRDWQRLINNNWGFRPKRLNFKLFNIQVKEVTTNEGTKTIANNLTSTVQVFTDSEYQLPYVLGSAHQGCLPPFPADVFMVPQYGYLTLNNGSQALGRSSFYCLEYFPSQMLRTGNNFQFSYTFEDVPFHSSYAHSQSLDRLMNPLIDQYLYYLVRTQTTGTGGTQTLAFSQAGPSSMANQARNWVPGPCYRQQRVSTTTNQNNNSNFAWTGAAKFKLNGRDSLMNPGVAMASHKDDDDRFFPSSGVLIFGKQGAGNDGVDYSQVLITDEEEIKATNPVATEEYGAVAINNQAANTQAQTGLVHNQGVIPGMVWQNRDVYLQGPIWAKIPHTDGNFHPSPLMGGFGLKHPPPQILIKNTPVPADPPLTFNQAKLNSFITQYSTGQVSVEIEWELQKENSKRWNPEIQYTSNYYKSTNVDFAVNTEGVYSEPRPIGTRYLTRNL

SEQ ID NO: 1956 - protein, 651 aa, Artificial Sequence
  Description of Artificial Sequence: Synthetic polypeptide
MPSSVIDALQYKLEGTTRLTRKRGLKLATALSLSNKFVEGSPSGGGGSGGGGSAPGKKRPVEQSPQEPDSSSGIGKTGQQPAKKRLNFGQTGDSESVPDPQPLGEPPAAPSGLGPNTMASGGGAPMADNNEGADGVGNSSGNWHCDSTWLGDRVITTSTRTWALPTYNNHLYKQISNGTSGGSTNDNTYFGYSTPWGYFDFNRFHCHFSPRDWQRLINNNWGFRPKRLNFKLFNIQVKEVTTNEGTKTIANNLTSTVQVFTDSEYQLPYVLGSAHQGCLPPFPADVFMVPQYGYLTLNNGSQALGRSSFYCLEYFPSQMLRTGNNFQFSYTFEDVPFHSSYAHSQSLDRLMNPLIDQYLYYLVRTQTTGTGGTQTLAFSQAGPSSMANQARNWVPGPCYRQQRVSTTTNQNNNSNFAWTGAAKFKLNGRDSLMNPGVAMASHKDDDDRFFPSSGVLIFGKQGAGNDGVDYSQVLITDEEEIKATNPVATEEYGAVAINNQAANTQAQTGLVHNQGVIPGMVWQNRDVYLQGPIWAKIPHTDGNFHPSPLMGGFGLKHPPPQILIKNTPVPADPPLTFNQAKLNSFITQYSTGQVSVEIEWELQKENSKRWNPEIQYTSNYYKSTNVDFAVNTEGVYSEPRPIGTRYLTRNL

SEQ ID NO: 1957 - protein, 638 aa, Artificial Sequence
  Description of Artificial Sequence: Synthetic polypeptide
MYTIWMPENPRPGTPCDIFTNSRGKRASNGGGGGSGGGGSAPGKKRPVEQSPQEPDSSSGIGKTGQQPAKKRLNFGQTGDSESVPDPQPLGEPPAAPSGLGPNTMASGGGAPMADNNEGADGVGNSSGNWHCDSTWLGDRVITTSTRTWALPTYNNHLYKQISNGTSGGSTNDNTYFGYSTPWGYFDFNRFHCHFSPRDWQRLINNNWGFRPKRLNFKLFNIQVKEVTTNEGTKTIANNLTSTVQVFTDSEYQLPYVLGSAHQGCLPPFPADVFMVPQYGYLTLNNGSQALGRSSFYCLEYFPSQMLRTGNNFQFSYTFEDVPFHSSYAHSQSLDRLMNPLIDQYLYYLVRTQTTGTGGTQTLAFSQAGPSSMANQARNWVPGPCYRQQRVSTTTNQNNNSNFAWTGAAKFKLNGRDSLMNPGVAMASHKDDDDRFFPSSGVLIFGKQGAGNDGVDYSQVLITDEEEIKATNPVATEEYGAVAINNQAANTQAQTGLVHNQGVIPGMVWQNRDVYLQGPIWAKIPHTDGNFHPSPLMGGFGLKHPPPQILIKNTPVPADPPLTFNQAKLNSFITQYSTGQVSVEIEWELQKENSKRWNPEIQYTSNYYKSTNVDFAVNTEGVYSEPRPIGTRYLTRNL

SEQ ID NO: 1958 - protein, 628 aa, Artificial Sequence
  Description of Artificial Sequence: Synthetic polypeptide
MTFFYGGSRGKRNNFKTEEYGGGGSGGGGSAPGKKRPVEQSPQEPDSSSGIGKTGQQPAKKRLNFGQTGDSESVPDPQPLGEPPAAPSGLGPNTMASGGGAPMADNNEGADGVGNSSGNWHCDSTWLGDRVITTSTRTWALPTYNNHLYKQISNGTSGGSTNDNTYFGYSTPWGYFDFNRFHCHFSPRDWQRLINNNWGFRPKRLNFKLFNIQVKEVTTNEGTKTIANNLTSTVQVFTDSEYQLPYVLGSAHQGCLPPFPADVFMVPQYGYLTLNNGSQALGRSSFYCLEYFPSQMLRTGNNFQFSYTFEDVPFHSSYAHSQSLDRLMNPLIDQYLYYLVRTQTTGTGGTQTLAFSQAGPSSMANQARNWVPGPCYRQQRVSTTTNQNNNSNFAWTGAAKFKLNGRDSLMNPGVAMASHKDDDDRFFPSSGVLIFGKQGAGNDGVDYSQVLITDEEEIKATNPVATEEYGAVAINNQAANTQAQTGLVHNQGVIPGMVWQNRDVYLQGPIWAKIPHTDGNFHPSPLMGGFGLKHPPPQILIKNTPVPADPPLTFNQAKLNSFITQYSTGQVSVEIEWELQKENSKRWNPEIQYTSNYYKSTNVDFAVNTEGVYSEPRPIGTRYLTRNL

SEQ ID NO: 1959 - protein, 621 aa, Artificial Sequence
  Description of Artificial Sequence: Synthetic polypeptide
MNNQKIVNLKEKVAQLEAGGGGSAPGKKRPVEQSPQEPDSSAGIGKSGAQPAKKRLNFGQTGDTESVPDPQPIGEPPAAPSGVGSLTMASGGGAPVADNNEGADGVGSSSGNWHCDSQWLGDRVITTSTRTWALPTYNNHLYKQISNSTSGGSSNDNAYFGYSTPWGYFDFNRFHCHFSPRDWQRLINNNWGFRPKRLNFKLFNIQVKEVTDNNGVKTIANNLTSTVQVFTDSDYQLPYVLGSAHEGCLPPFPADVFMIPQYGYLTLNDGSQAVGRSSFYCLEYFPSQMLRTGNNFQFNYEFENVPFHSSYAHSQSLDRLMNPLIDQYLYYLSKTINDSGQNQQTLKFSVAGPSNMAVQGRNYIPGPSYRQQRVSTTVTQNNNSEFAWPGASSWALNGRNSLMNPGPAMASHKEGEDRFFPLSGSLIFGKQGTGRDNVDADEVMITNEEEIKTTNPVATESYGQVAINHQSAQAQAQTGWVQNQGILPGMVWQDRDVYLQGPIWAKIPHTDGNFHPSPLMGGFGMKHPPPQILIKNTPVPADPPTAFNKDKLNSFITQYSTGQVSVEIEWELQKENSKRWNPEIQYTSNYYKSNNVEFAVNTEGVYSEPRPIGTRYLTRNL

SEQ ID NO: 1960 - protein, 633 aa, Artificial Sequence
  Description of Artificial Sequence: Synthetic polypeptide
MYTIWMPENPRPGTPCDIFTNSRGKRASNGGGGGSAPGKKRPVEQSPQEPDSSAGIGKSGAQPAKKRLNFGQTGDTESVPDPQPIGEPPAAPSGVGSLTMASGGGAPVADNNEGADGVGSSSGNWHCDSQWLGDRVITTSTRTWALPTYNNHLYKQISNSTSGGSSNDNAYFGYSTPWGYFDFNRFHCHFSPRDWQRLINNNWGFRPKRLNFKLFNIQVKEVTDNNGVKTIANNLTSTVQVFTDSDYQLPYVLGSAHEGCLPPFPADVFMIPQYGYLTLNDGSQAVGRSSFYCLEYFPSQMLRTGNNFQFNYEFENVPFHSSYAHSQSLDRLMNPLIDQYLYYLSKTINDSGQNQQTLKFSVAGPSNMAVQGRNYIPGPSYRQQRVSTTVTQNNNSEFAWPGASSWALNGRNSLMNPGPAMASHKEGEDRFFPLSGSLIFGKQGTGRDNVDADEVMITNEEEIKTTNPVATESYGQVAINHQSAQAQAQTGWVQNQGILPGMVWQDRDVYLQGPIWAKIPHTDGNFHPSPLMGGFGMKHPPPQILIKNTPVPADPPTAFNKDKLNSFITQYSTGQVSVEIEWELQKENSKRWNPEIQYTSNYYKSNNVEFAVNTEGVYSEPRPIGTRYLTRNL

SEQ ID NO: 1961 - protein, 623 aa, Artificial Sequence
  Description of Artificial Sequence: Synthetic polypeptide
MTFFYGGSRGKRNNFKTEEYGGGGSAPGKKRPVEQSPQEPDSSAGIGKSGAQPAKKRLNFGQTGDTESVPDPQPIGEPPAAPSGVGSLTMASGGGAPVADNNEGADGVGSSSGNWHCDSQWLGDRVITTSTRTWALPTYNNHLYKQISNSTSGGSSNDNAYFGYSTPWGYFDFNRFHCHFSPRDWQRLINNNWGFRPKRLNFKLFNIQVKEVTDNNGVKTIANNLTSTVQVFTDSDYQLPYVLGSAHEGCLPPFPADVFMIPQYGYLTLNDGSQAVGRSSFYCLEYFPSQMLRTGNNFQFNYEFENVPFHSSYAHSQSLDRLMNPLIDQYLYYLSKTINDSGQNQQTLKFSVAGPSNMAVQGRNYIPGPSYRQQRVSTTVTQNNNSEFAWPGASSWALNGRNSLMNPGPAMASHKEGEDRFFPLSGSLIFGKQGTGRDNVDADEVMITNEEEIKTTNPVATESYGQVAINHQSAQAQAQTGWVQNQGILPGMVWQDRDVYLQGPIWAKIPHTDGNFHPSPLMGGFGMKHPPPQILIKNTPVPADPPTAFNKDKLNSFITQYSTGQVSVEIEWELQKENSKRWNPEIQYTSNYYKSNNVEFAVNTEGVYSEPRPIGTRYLTRNL

SEQ ID NO: 1962 - protein, 623 aa, Artificial Sequence
  Description of Artificial Sequence: Synthetic polypeptide
MAAAAAAAAAAAAAAAAAAAGGGGSAPGKKRPVEQSPQEPDSSAGIGKSGAQPAKKRLNFGQTGDTESVPDPQPIGEPPAAPSGVGSLTMASGGGAPVADNNEGADGVGSSSGNWHCDSQWLGDRVITTSTRTWALPTYNNHLYKQISNSTSGGSSNDNAYFGYSTPWGYFDFNRFHCHFSPRDWQRLINNNWGFRPKRLNFKLFNIQVKEVTDNNGVKTIANNLTSTVQVFTDSDYQLPYVLGSAHEGCLPPFPADVFMIPQYGYLTLNDGSQAVGRSSFYCLEYFPSQMLRTGNNFQFNYEFENVPFHSSYAHSQSLDRLMNPLIDQYLYYLSKTINDSGQNQQTLKFSVAGPSNMAVQGRNYIPGPSYRQQRVSTTVTQNNNSEFAWPGASSWALNGRNSLMNPGPAMASHKEGEDRFFPLSGSLIFGKQGTGRDNVDADEVMITNEEEIKTTNPVATESYGQVAINHQSAQAQAQTGWVQNQGILPGMVWQDRDVYLQGPIWAKIPHTDGNFHPSPLMGGFGMKHPPPQILIKNTPVPADPPTAFNKDKLNSFITQYSTGQVSVEIEWELQKENSKRWNPEIQYTSNYYKSNNVEFAVNTEGVYSEPRPIGTRYLTRNL

SEQ ID NO: 1963 - DNA, 2214 bp, Artificial Sequence
  Description of Artificial Sequence: Synthetic polynucleotide
atggctgccgatggttatcttccagattggctcgaggacaacctctctgagggcattcgcgagtggtgggacttgaaacctggagccccgaagcccaaagccaaccagcaaaagcaggacgacggccggggtctggtgcttcctggctacaagtacctcggacccttcaacggactcgacaagggggagcccgtcaacgcggcggacgcagcggccctcgagcacgacaaggcctacgaccagcagctcaaagcgggtgacaatccgtacctgcggtataaccacgccgacgtcgagtttcaggagcgtctgcaagaagatacgtcttttgggggcaacctcgggcgagcagtcttccaggccaagaagagggttctcgaaccttttggtctggttgaggaaggcgctaagacggctcctggaaagaaacgtccggtagagcagtcgccacaagagccagactcctcctcgggcatcggcaagaaaggccaacagcccgccagaaaaagactcaattttggccagactggcgactcagagtcagttccagaccctcaacctctcggagaacctccagcagcgccctctggtgtgggacctaatacaatggctgcaggcggtggcgcaccaatggcagacaataacgagggcgccgacggagtgggtaattcctcgggaaattggcattgcgattccacatggatgggggacagagtcatcaccaccagcacccgaacctgggccctgcccacctacaacaaccacctctacaagcaaatctccaacggcacctcgggaggaagcaccaacgacaacacctattttggctacagcaccccctgggggtattttgatttcaacagattccactgccacttctcaccacgtgactggcagcgactcatcaacaacaactggggattccggccaaaaagactcagcttcaagctcttcaacatccaggtcaaggaggtcacgcagaatgaaggcaccaagaccatcgccaataaccttaccagcacgattcaggtatttacggactcggaataccagctgccatacgtcctcggctccgcgcaccagggctgcctgcctccgttcccggcggacgtcttcatgattccccagtacggctaccttacactgaacaatggaagtcaagccgtaggccgttcctccttctactgcctggaatattttccttctcaaatgctgagaacgggcaacaactttgagttcagctaccagtttgaggacgtgccttttcacagcagctacgcgcacagccaaagcctggaccggctgatgaaccccctcatcgaccagtacctgtactacctgtctcggactcagtccacgggaggtaccgcaagaactcagcagttgctattttctcaggccgggcctaatacaatggccaatcaggcaaagaactggctgccaggaccctgttaccgccaacaacgcgtctcaacgacaaccgggcaaaacaacaatagcaactctgcctggactgctgggaccaaataccatctgaatggaagaaattcattggctaatcctggcatcgctatggcaacacacaaagacgacgaggagcgtttttttcccagtaacgggatcctgatttttggcaaacaaaatgctgccagagacaatgcggattacagcgatgtcatgctcaccagcgaggaagaaatcaaaaccactaaccctgtggctacagaggaatacggtatcgtggcagataacttgcagcagcaaaacacggctcctcaaattggaactgtcaacagccagggggccttacccggtatggtctggcagaaccgggacgtgtacctgcagggtcccatctgggccaagattcctcacacggacggcaacttccacccatctccgctgatgggcggctttggcctgaaacatcctccgcctcagatcctgatcaagaacacgcctgtacctgcggatcctccgaccaccttcaaccagtcaaagctgaactctttcatcacgcaatacagcaccggacaggtcagcgtggaaattgaatgggagctacagaaggaaaacagcaagcgctggaaccccgagatccagtacacctccaactactacaaatctacaagtgtggactttgctgttaatacagaaggcgtgtactctgaaccccgccccattggcacccgttacctcacccgtaatctgtaa

SEQ ID NO: 1964 - DNA, 2214 bp, Artificial Sequence
  Description of Artificial Sequence: Synthetic polynucleotide
atggctgccgatggttatcttccagattggctcgaggacaacctctctgagggcattcgcgagtggtgggcgctgaaacctggagccccgaagcccaaagccaaccagcaaaagcaggacgacggccggggtctggtgcttcctggctacaagtacctcggacccttcaacggactcgacaagggggagcccgtcaacgcggcggacgcagcggccctcgagcacgacaaggcctacgaccagcagctcaaagcgggtgacaatccgtacctgcggtataaccacgccgacgccgagtttcaggagcgtctgcaagaagatacgtcttttgggggcaacctcgggcgagcagtcttccaggccaagaagcgggttctcgaacctctcggtctggttgaggacggcgctaagacggctcctggaaagaagagaccagtagagcagtcaccccaagaaccagactcctcctcgggcatcggcaagaaaggccaacagcccgccagaaaaagactcaattttggccagactggcgactcagagtcagttccagaccctcaacctctcggagaacctccagcaacccccgctgctgtgggacctactacaatggcttcaggcggtggcgcaccaatggcagacaataacgaaggcgccgacggagtgggtagttcctcgggaaattggcattgcgattccacatggctgggcgacagagtcatcaccaccagcacccgaacctgggccctgcccacctacaacaaccacctctacaagcaaatctccaacgggacatcgggaggagccaccaacgacaacacctacttcggctacagcaccccctgggggtattttgactttaacagattccactgccacttttcaccacgtgactggcagcgactcatcaacaacaactggggattccggcccaagagactcagcttcaagctcttcaacatccaggtcaaggaggtcacgcagaatgaaggcaccaagaccatcgccaataacctcaccagcaccatccaggtgtttacggactcggagtaccagctgccgtacgttctcggctctgcccaccagggctgcctgcctccgttcccggcggacgtgttcatgattccccagtacggctacctaacactcaacaacggtagtcaggccgtgggacgctcctccttctactgcctggaatactttccttcgcagatgctgagaaccggcaacaacttccagtttacttacaccttcgaggacgtgcctttccacagcagctacgcccacagccagagcttggaccggctgatgaatcctctgattgaccagtacctgtactacttgtctcggactcaaacaacaggaggcacggcaaatacgcagactctgggcttcagccaaggtgggcctaatacaatggccaatcaggcaaagaactggctgccaggaccctgttaccgccaacaacgcgtctcaacgacaaccgggcaaaacaacaatagcaactttgcctggactgctgggaccaaataccatctgaatggaagaaattcattggctaatcctggcatcgctatggcaacacacaaggacgacgaggagcgtttttttcccagtaacgggatcctgatttttggcaaacaaaatgctgccagagacaatgcggattacagcgatgtcatgctcaccagcgaggaagaaatcaaaaccactaaccctgtggctacagaggaatacggtatcgtggcagataacttgcagcagcaaaacacggctcctcaaattggaactgtcaacagccagggggccttacccggtatggtctggcagaaccgggacgtgtacctgcagggtcccatctgggccaagattcctcacacggacggcaacttccacccgtctccgctgatgggcggctttggcctgaaacatcctccgcctcagatcctgatcaagaacacgcctgtacctgcggatcctccgaccaccttcaaccagtcaaagctgaactctttcatcacgcaatacagcaccggacaggtcagcgtggaaatcgagtgggagctgcagaaagaaaacagcaagcgctggaaccccgagatccagtacacctccaactactacaaatctacaaatgtggactttgctgtcaacacggagggggtttatagcgagcctcgccccattggcacccgttacctcacccgcaacctgtaa

SEQ ID NO: 1965 - DNA, 2211 bp, Artificial Sequence
  Description of Artificial Sequence: Synthetic polynucleotide
  misc_feature (715)..(715): n is a, c, g, or t
atggctgccgatggttatcttccagattggctcgaggacaacctctctgagggcattcgcgagtggtgggcgctgaaacctggagccccgaagcccaaagccaaccagcaaaagcaggacgacggccggggtctggtgcttcctggctacaagtacctcggacccttcaacggactcgacaagggggagcccgtcaacgcggcggacgcagcggccctcgagcacgacaaggcctacgaccagcagctcaaagcgggtgacaatccgtacctgcggtataaccacgccgacgccgagtttcaggagcgtctgcaagaagatacgtcttttgggggcaacctcgggcgagcagtcttccaggccaagaagcgggttctcgaacctctcggtctggttgaggaaggcgctaagacggctcctggaaagaaacgtccggtagagcagtcgccacaagagccagactcctcctcgggcatcggcaagacaggccagcagcccgctaaaaagaggctcaattttggtcagactggcgactcagagtcagtccccgacccacaacctctcggagaacctccagcaacccccgctgctgtgggacctactacaatggcttcaggcggtggcgcaccaatggcagacaataacgaaggcgccgacggagtgggtaatgcctcaggaaattggcattgcgattccacatggctgggcgacagantcatcaccaccagcacccgaacatgggccttgcccacctataacaaccacctctacaagcaaatctccagtgcttcaacgggggccagcaacgacaaccactacttcggctacagcaccccctgggggtattttgatttcaacagattccactgccatttctcaccacgtgactggcagcgactcatcaacaacaattggggattccggcccaagagactcaacttcaagctcttcaacatccaagtcaaggaggtcacgcagaatgaaggcaccaagaccatcgccaataacctcaccagcaccatccaggtgtttacggactcggagtaccagctgccgtacgttctcggctctgcccaccagggctgcctgcctccgttcccggcggacgtgttcatgattccccagtacggctacctaacactcaacaacggtagtcaggccgtgggacgctcctccttctactgcctggaatattttccatctcaaatgctgcgaactggaaacaattttgaattcagctacaccttcgaggacgtgcctttccacagcagctacgcacacagccagagcttggaccgactgatgaatcctctcatcgaccagtacctgtactacttgtctcggactcaaacaacaggaggcacggcaaatacgcagactctgggcttcagccaaggtgggcctaatacaatggccaatcaggcaaagaactggctgccaggaccctgttaccgccaacaacgcgtctcaacgacaaccgggcaaaacaacaatagcaactttgcctggactgctgggaccaaataccatctgaatggaagaaattcattggctaatcctggcatcgctatggcaacacacaaagacgacgaggagcgtttttttcccagtaacgggatcctgatttttggcaaacaaaatgctgccagagacaatgcggattacagcgatgtcatgctcaccagcgaggaagaaatcaaaaccactaaccctgtggctacagaggaatacggtatcgtggcagataacttgcagcagcaaaacacggctcctcaaattggaactgtcaacagccaggggaccttacccggtatggtctggcagaaccgggacgtgtacctgcagggtcccatctgggccaagattcctcacacggacggcaacttccacccgtctccgctgatgggcggctttggcctgaaacatcctccgcctcagatcctgatcaagaacacgcctgtacctgcggatcctccgaccaccttcaaccagtcaaagctgaactctttcatcacgcaatacagcaccggacaggtcagcgtggaaattgaatgggagctacagaaggaaaacagcaagcgctggaaccccgagatccagtacacctccaattactacaaatctacaagtgtggactttgctgttaatacagaaggcgtgtactctgaaccccgccccattggcacgcgtttcctcacccgtaatctgtaa

SEQ ID NO: 1966 - DNA, 2214 bp, Artificial Sequence
  Description of Artificial Sequence: Synthetic polynucleotide
atggctgccgatggttatcttccagattggctcgaggacaacctctctgagggcattcgcgagtggtgggcgctgaaacctggagccccgaagcccaaagccaaccagcaaaagcaggacgacggccggggtctggtgcttcctggctacaagtacctcggacccttcaacggactcgacaagggggagcccgtcaacgcggcggacgcagcggccctcgagcacgacaaggcctacgaccagcagctcaaagcgggtgacaatccgtacctgcggtataaccacgccgacgccgagtttcaggagcgtctgcaagaagatacgtcttttgggggcaacctcgggcgagcagtcttccaggccaagaagcgggttctcgaacctctcggtctggttgaggaaggcgctaagacggctcctggaaagaaacgtccggtagagcagtcgccacaagagccagactcctcctcgggcatcggcaagacaggccagcagcccgctaaaaagaggctcaattttggccagactggcgactcagagtcagttccagaccctcaacctctcggagaacctccagcagcgccctctggtgtgggacctaatacaatggctgcaggcggtggcgcaccaatggcagacaataacgaaggcgccgacggagtgggtagttcctcgggaaattggcattgcgattccacatggctgggcgacagagtcatcaccaccagcacccgaacctgggccctgcccacctacaacaaccacctctacaagcaaatctccaacgggacatcgggaggagccaccaacgacaacacctacttcggctacagcaccccctgggggtattttgactttaacagattccactgccacttttcaccacgtgactggcagcgactcatcaacaacaactggggattccggcccaagagactcagcttcaagctcttcaacatccaggtcaaggaggtcacgcagaatgaaggcaccaagaccatcgccaataacctcaccagcaccatccaggtgtttacggactcggagtaccagctgccgtacgtactaggatccgctcaccagggatgtctgcctccgttcccggcggacgtgttcatgattccccagtacggctacctaacactcaacaacggtagtcaggccgtgggacgctcctccttctactgcctggaatattttccatctcagatgctgagaacgggcaataactttaccttcagctacaccttcgaggacgtgcctttccacagcagctatgcccacagccagagcttggaccggctgatgaatcctctgattgaccagtacctgtactacttgtctcggactcaaacaacaggaggcacggcaaatacgcagactctgggcttcagccaaggtgggcctaatacaatggccaatcaggcaaagaactggctgccaggaccctgttaccgccaacaacgcgtctcaacgacaaccgggcaaaacaacaatagcaactttgcctggactgctgggaccaaataccatctgaatggaagaaattcattggctaatcctggcatcgctatggcaacacacaaagacgacgaggagcgtttttttcccagtaacgggatcctgatttttggcaaacaaaatgctgccagagacaatgcggattacagcgatgtcatgctcaccagcgaggaagaaatcaaaaccactaaccctgtggctacagaggaatacggtatcgtggcagataacttgcagcagcaaaacacggctcctcaaattggaactgtcaacagccagggggccttacccggtatggtctggcagaaccgggacgtgtacctgcagggtcccatctgggccaagattcctcacacggacggcaacttccacccgtctccgctaatgggaggatttggactgaagcacccacctcctcagatcctgatcaagaacacgccggtacctgcggatcctccgaccaccttcaaccagtcaaagctgtactctttcatcacgcaatacagcaccggacaggtcagcgtggaaattgaatgggagctgcagaaggaaaacagcaagcgctggaaccccgagatccaatacacctccaactactacaaatctacaagtgtggactttgctgttaatacagaaggcgtgtactctgaaccccgccccattggcacccgttacctcacccgtaatctgtaa

SEQ ID NO: 1967 - protein, 737 aa, Artificial Sequence
  Description of Artificial Sequence: Synthetic polypeptide
MAADGYLPDWLEDNLSEGIREWWDLKPGAPKPKANQQKQDDGRGLVLPGYKYLGPFNGLDKGEPVNAADAAALEHDKAYDQQLKAGDNPYLRYNHADVEFQERLQEDTSFGGNLGRAVFQAKKRVLEPFGLVEEGAKTAPGKKRPVEQSPQEPDSSSGIGKKGQQPARKRLNFGQTGDSESVPDPQPLGEPPAAPSGVGPNTMAAGGGAPMADNNEGADGVGNSSGNWHCDSTWMGDRVITTSTRTWALPTYNNHLYKQISNGTSGGSTNDNTYFGYSTPWGYFDFNRFHCHFSPRDWQRLINNNWGFRPKRLSFKLFNIQVKEVTQNEGTKTIANNLTSTIQVFTDSEYQLPYVLGSAHQGCLPPFPADVFMIPQYGYLTLNNGSQAVGRSSFYCLEYFPSQMLRTGNNFEFSYQFEDVPFHSSYAHSQSLDRLMNPLIDQYLYYLSRTQSTGGTARTQQLLFSQAGPNTMANQAKNWLPGPCYRQQRVSTTTGQNNNSNSAWTAGTKYHLNGRNSLANPGIAMATHKDDEERFFPSNGILIFGKQNAARDNADYSDVMLTSEEEIKTTNPVATEEYGIVADNLQQQNTAPQIGTVNSQGALPGMVWQNRDVYLQGPIWAKIPHTDGNFHPSPLMGGFGLKHPPPQILIKNTPVPADPPTTFNQSKLNSFITQYSTGQVSVEIEWELQKENSKRWNPEIQYTSNYYKSTSVDFAVNTEGVYSEPRPIGTRYLTRNL

SEQ ID NO: 1968 - protein, 737 aa, Artificial Sequence
  Description of Artificial Sequence: Synthetic polypeptide
MAADGYLPDWLEDNLSEGIREWWALKPGAPKPKANQQKQDDGRGLVLPGYKYLGPFNGLDKGEPVNAADAAALEHDKAYDQQLKAGDNPYLRYNHADAEFQERLQEDTSFGGNLGRAVFQAKKRVLEPLGLVEDGAKTAPGKKRPVEQSPQEPDSSSGIGKKGQQPARKRLNFGQTGDSESVPDPQPLGEPPATPAAVGPTTMASGGGAPMADNNEGADGVGSSSGNWHCDSTWLGDRVITTSTRTWALPTYNNHLYKQISNGTSGGATNDNTYFGYSTPWGYFDFNRFHCHFSPRDWQRLINNNWGFRPKRLSFKLFNIQVKEVTQNEGTKTIANNLTSTIQVFTDSEYQLPYVLGSAHQGCLPPFPADVFMIPQYGYLTLNNGSQAVGRSSFYCLEYFPSQMLRTGNNFQFTYTFEDVPFHSSYAHSQSLDRLMNPLIDQYLYYLSRTQTTGGTANTQTLGFSQGGPNTMANQAKNWLPGPCYRQQRVSTTTGQNNNSNFAWTAGTKYHLNGRNSLANPGIAMATHKDDEERFFPSNGILIFGKQNAARDNADYSDVMLTSEEEIKTTNPVATEEYGIVADNLQQQNTAPQIGTVNSQGALPGMVWQNRDVYLQGPIWAKIPHTDGNFHPSPLMGGFGLKHPPPQILIKNTPVPADPPTTFNQSKLNSFITQYSTGQVSVEIEWELQKENSKRWNPEIQYTSNYYKSTNVDFAVNTEGVYSEPRPIGTRYLTRNL

SEQ ID NO: 1969 - protein, 736 aa, Artificial Sequence
  Description of Artificial Sequence: Synthetic polypeptide
  misc_feature (239)..(239): Xaa can be any naturally occurring amino acid
MAADGYLPDWLEDNLSEGIREWWALKPGAPKPKANQQKQDDGRGLVLPGYKYLGPFNGLDKGEPVNAADAAALEHDKAYDQQLKAGDNPYLRYNHADAEFQERLQEDTSFGGNLGRAVFQAKKRVLEPLGLVEEGAKTAPGKKRPVEQSPQEPDSSSGIGKTGQQPAKKRLNFGQTGDSESVPDPQPLGEPPATPAAVGPTTMASGGGAPMADNNEGADGVGNASGNWHCDSTWLGDRXITTSTRTWALPTYNNHLYKQISSASTGASNDNHYFGYSTPWGYFDFNRFHCHFSPRDWQRLINNNWGFRPKRLNFKLFNIQVKEVTQNEGTKTIANNLTSTIQVFTDSEYQLPYVLGSAHQGCLPPFPADVFMIPQYGYLTLNNGSQAVGRSSFYCLEYFPSQMLRTGNNFEFSYTFEDVPFHSSYAHSQSLDRLMNPLIDQYLYYLSRTQTTGGTANTQTLGFSQGGPNTMANQAKNWLPGPCYRQQRVSTTTGQNNNSNFAWTAGTKYHLNGRNSLANPGIAMATHKDDEERFFPSNGILIFGKQNAARDNADYSDVMLTSEEEIKTTNPVATEEYGIVADNLQQQNTAPQIGTVNSQGTLPGMVWQNRDVYLQGPIWAKIPHTDGNFHPSPLMGGFGLKHPPPQILIKNTPVPADPPTTFNQSKLNSFITQYSTGQVSVEIEWELQKENSKRWNPEIQYTSNYYKSTSVDFAVNTEGVYSEPRPIGTRFLTRNL

SEQ ID NO: 1970 - protein, 737 aa, Artificial Sequence
  Description of Artificial Sequence: Synthetic polypeptide
MAADGYLPDWLEDNLSEGIREWWALKPGAPKPKANQQKQDDGRGLVLPGYKYLGPFNGLDKGEPVNAADAAALEHDKAYDQQLKAGDNPYLRYNHADAEFQERLQEDTSFGGNLGRAVFQAKKRVLEPLGLVEEGAKTAPGKKRPVEQSPQEPDSSSGIGKTGQQPAKKRLNFGQTGDSESVPDPQPLGEPPAAPSGVGPNTMAAGGGAPMADNNEGADGVGSSSGNWHCDSTWLGDRVITTSTRTWALPTYNNHLYKQISNGTSGGATNDNTYFGYSTPWGYFDFNRFHCHFSPRDWQRLINNNWGFRPKRLSFKLFNIQVKEVTQNEGTKTIANNLTSTIQVFTDSEYQLPYVLGSAHQGCLPPFPADVFMIPQYGYLTLNNGSQAVGRSSFYCLEYFPSQMLRTGNNFTFSYTFEDVPFHSSYAHSQSLDRLMNPLIDQYLYYLSRTQTTGGTANTQTLGFSQGGPNTMANQAKNWLPGPCYRQQRVSTTTGQNNNSNFAWTAGTKYHLNGRNSLANPGIAMATHKDDEERFFPSNGILIFGKQNAARDNADYSDVMLTSEEEIKTTNPVATEEYGIVADNLQQQNTAPQIGTVNSQGALPGMVWQNRDVYLQGPIWAKIPHTDGNFHPSPLMGGFGLKHPPPQILIKNTPVPADPPTTFNQSKLYSFITQYSTGQVSVEIEWELQKENSKRWNPEIQYTSNYYKSTSVDFAVNTEGVYSEPRPIGTRYLTRNL

SEQ ID NO: 1971 - DNA, 2208 bp, Artificial Sequence
  Description of Artificial Sequence: Synthetic polynucleotide
atggctgccgatggttatcttccagattggctcgaggacaacctctctgagggcattcgcgagtggtgggacttgaaacctggagccccgaaacccaaagccaaccagcaaaagcaggacgacggccggggtctggtgcttcctggctacaagtacctcggacccttcaacggactcgacaagggggagcccgtcaacgcggcggatgcagcggccctcgagcacgacaaagcctacgaccggcagctcgacagcggagacaacccgtacctcaagtacaaccacgccgacgcggagtttcaggagcgccttaaagaagatacgtcttttgggggcaacctcggacgagcagtcttccaggccaagaagagggttctcgaaccttttggtctggttgaggaaggtgctaagacggctcctggaaagaaacgtccggtagagcagtcgccacaagagccagactcctcctcgggcattggcaagacaggccagcagcccgctaaaaagagactcaattttggtcagactggcgactcagagtcagtccccgacccacaacctctcggagaacctccagcaacccccgctgctgtgggacctactacaatggcttcaggtggtggcgcaccagtggcagacaataacgaaggcgccgacggagtgggtagttcctcgggaaattggcattgcgattccacatggctgggcgacagagtcatcaccaccagcacccgaacatgggccttgcccacctataacaaccacctctacaagcaaatctccagtgcttcgacgggggccagcaacgacaaccactacttcggctacagcaccccctgggggtattttgatttcaacaggttccactgccatttctcaccacgtgactggcagcgactcatcaacaacaattggggattccggcccaaaagactcaacttcaagctgttcaacatccaggtcaaggaagtcacgacgaacgaaggcaccaagaccatcgccaataatctcaccagcaccgtgcaggtctttacggactcggagtaccagttaccgtacgtgctaggatccgctcaccagggatgtctgcctccgttcccggcggacgtcttcatggttcctcagtacggctatttaactttaaacaatggaagccaagccctgggacgttcctccttctactgtctggagtatttcccatcgcagatgctgagaacgggcaacaactttacctttagctacaccttcgaggacgtgcctttccacagcagctacgcgcacagccagagcctggacaggctgatgaatcccctcatcgaccagtacctgtactacctggtcagaacgcaaacgactggaactggagggacgcagactctggcattcagccaagcgggtcctagctcaatggccaaccaggctagaaattgggtgcccggaccttgctaccggcagcagcgcgtctccacgacaaccaaccagaacaacaacagcaactttgcctggacgggagctgccaagtttaagctgaacggccgagactctctaatgaatccgggcgtggcaatggcttcccacaaggatgacgacgaccgcttcttcccttcgagcggggtcctgatttttggcaagcaaggagccgggaacgatggagtggattacagccaagtgctgattacagatgaggaagaaatcaaggctaccaaccccgtggccacagaagaatatggagcagtggccatcaacaaccaggccgccaatacgcaggcgcagaccggactcgtgcacaaccagggggtgattcccggcatggtgtggcagaatagagacgtgtacctgcagggtcccatctgggccaaaattcctcacacggacggcaactttcacccgtctcccctgatgggcggctttggactgaagcacccgcctcctcaaattctcatcaagaacacaccggttccagcggacccgccgcttaccttcaaccaggccaagctgaactctttcatcacgcagtacagcaccggacaggtcagcgtggaaatcgagtgggagctgcagaaagaaaacagcaaacgctggaatccagagattcaatacacttccaactactacaaatctacaaatgtggactttgctgtcaacacggagggggtttatagcgagcctcgccccattggcacccgttacctcacccgcaacctgtaa

SEQ ID NO: 1972 - DNA, 2211 bp, Artificial Sequence
  Description of Artificial Sequence: Synthetic polynucleotide
  misc_feature (337)..(337): n is a, c, g, or t
atggctgccgatggttatcttccagattggctcgaggacactctctctgaaggaataagacagtggtggaagctcaaacctggcccaccaccaccaaagcccgcagagcggcataaggacgacagcaggggtcttgtgcttcctggctacaagtacctcggacccttcaacggactcgacaagggggagcccgtcaacgcggcggacgcagcgaccctcgagcacgacaaggcctacgaccagcagctcaaagcgggtgacaatccgtacctgcggtataaccacgccgacgccgagtttcaggagcgtctgcaagaagatacgtcttttgggggcnacctcgggcgagcagtcttccaggccaagaagcgggttctcgaacctctcggtctggttgaggaagctgctaagacggctcctggaaagaagagaccagtagagccatcaccccagcgttctccagactcctctacgggcatcggcaagaaaggccaacagcccgccagaaaaagactcaattttggtcagactggcgactcagagtcagttccagaccctcaacctctcggagaacctccagcagcgccctctggtgtgggacctaatacaatggctgcaggcggtggcgcaccaatggcagacaataacgaaggcgccgacggagtgggtagttcctcgggaaattggcattgcgattccacatggctgggcgacagagtcatcaccaccagcacccgaacctgggccctgcccacctacaacaaccacctctacaagcaaatctccagtgcttcaacgggggccagcaacgacaaccactacttcggctacagcaccccctgggggtattttgatttcaacagattccactgccatttctcaccacgtgactggcagcgactcatcaacaacaattggggattccggcccaagagactcaacttcaagctcttcaacatccaagtcaaggaggtcacgacgaatgatggcgtcacgaccatcgctaataaccttaccagcacggttcaagtcttctcggactcagactatcagctcccgtacgtgctcgggtcggctcacgagggctgcctcccgccgttcccagcggacgttttcatgattcctcagtacggctatttaactttaaacaatggaagccaagccctgggacgttcctccttctactgtctggagtatttcccatcgcagatgctgagaaccggcaacaactttcagttcagctacaccttcgaggacgtgcctttccacagcagctacgcgcacagccagagcctggacaggctgatgaatcccctcatcgaccagtacctgtactacctggtcagaacgcaaacgactggaactggagggacgcagactctggcattcagccaagcgggtcctagctcaatggccaaccaggctagaaattgggtgcccggaccttgctaccggcagcagcgcgtctccacgacaaccaaccagaacaacaacagcaactttgcctggacgggagctgccaagtttaagctgaacggccgagactctctaatgaatccgggcgtggcaatggcttcccacaaggatgacgacgaccgcttcttcccttcgagcggggtcctgatttttggcaagcaaggagccgggaacgatggagtggattacagccaagtgctgattacagatgaggaagaaatcaaggctaccaaccccgtagccacagaagaatatggagcagtggccatcaacaaccaggccgccaatacgcaggcgcagaccggactcgtgcacaaccagggggtgattcccggaatggtgtggcaagacagagacgtatacctgcagggtcctatttgggccaaaattcctcacacggatggacactttcacccgtctcctctcatgggcggctttggacttaagcacccgcctcctcagatcctcatcaaaaacacgcctgttcctgcgaatcctccggcagagttttcggctacaaagtttgcttcattcatcacccagtattccacaggacaagtgagcgtggagattgaatgggagctgcagaaagaaaacagcaaacgctggaatcccgaagtgcagtatacatctaactatgcaaaatctgccaacgttgatttcactgtggacaacaatggactttatactgagcctcgccccattggcacccgttacctcacccgtcccctgtaa

SEQ ID NO: 1973 - DNA, 2214 bp, Artificial Sequence
  Description of Artificial Sequence: Synthetic polynucleotide
  misc_feature (335)..(335): n is a, c, g, or t
atgactgacggttaccttccagattggctagaggacaacctctctgaaggcgttcgagagtggtgggcgctgcaacctggagccccgaagcccaaagccaaccagcaaaagcaggacgacggccggggtctggtgcttcctggctacaagtacctcggacccttcaacggactcgacaagggggagcccgtcaacgcggcggacgcagcggccctcgagcacgacaaggcctacgaccagcagctcaaagcgggtgacaatccgtacctgcggtataaccacgccgacgccgagtttcaggagcgtctgcaagaagatacgtcttttgggggcancctcgggcgagcagtcttccaggccaagaagcgggttctcgaacctctcggtctggttgaggaaggcgctaagacggctcctggaaagaaacgtccggtagagccatcaccccagcgttctccagactcctctacgggcatcggcaagaaaggccaacagcccgccagaaaaagactcaattttggtcagactggcgactcagagtcagttccagaccctcaacctctcggagaacctccagcagcgccctcaggtgtgggatctcttacaatggcttcaggtggtggcgcaccagtggcagacaataacgaaggtgccgatggagtgggtagttcctcgggaaattggcattgcgattcccaatggctgggggacagagtcatcaccaccagcacccgaacctgggccctgcccacctacaacaatcacctctacaagcaaatctccaacagcacatctggaggatcttcaaatgacaacgcctacttcggctacagcaccccctgggggtattttgacttcaacagattccactgccacttctcaccacgtgactggcagcgactcatcaacaacaactggggattccggcccaagagactcagcttcaagctcttcaacatccaggtcaaggaggtcacgcagaatgaaggcaccaagaccatcgccaataacctcaccagcaccatccaggtgtttacggactcggagtaccagctgccgtacgttctcggctctgcccaccagggctgcctgcctccgttcccggcggacgtgttcatgattccccagtacggctacctaacactcaacaacggtagtcaggccgtgggacgctcctccttctactgcctggaatactttccttcgcagatgctgagaaccggcaacaacttccagtttacttacaccttcgaggacgtgcctttccacagcagctacgcccacagccagagcttggaccggctgatgaatcctctgattgaccagtacctgtactacttgtctcggactcaaacaacaggaggcacggcaaatacgcagactctgggcttcagccaaggtgggcctaatacaatggccaatcaggcaaagaactggctgccaggaccctgttaccgccaacaacgcgtctcaacgacaaccgggcaaaacaacaatagcaactttgcctggactgctgggaccaaataccatctgaatggaagaaattcattggctaatcctggcatcgctatggcaacacacaaagacgacgaggagcgtttttttcccagtaacgggatcctgatttttggcaaacaaaatgctgccagagacaatgcggattacagcgatgtcatgctcaccagcgaggaagaaatcaaaaccactaaccctgtggctacagaggaatacggtatcgtggcagataacttgcagcagcaaaacacggctcctcaaattggaactgtcaacagccagggggccttacccggtatggtctggcagaaccgggacgtgtacctgcagggtcccatctgggccaagattcctcacacggacggcaacttccacccgtctccgctgatgggcggctttggcctgaaacatcctccgcctcagatcctgatcaagaacacgcctgtacctgcggatcctccgaccaccttaaaccaggccaagctgaactctttcatcacgcaatacagcaccggacaggtcagcgtggaaattgaatgggagctgcagaaggaaaacagcaagcgctggaacccagagattcagtacacttcaaactactacaaatctacaaatgtggactttgctgtcaatacagagggaacttatagtgaaccccgccccattggcaccagatttctgactcgtaatctgtaa

SEQ ID NO: 1974 - DNA, 2211 bp, Artificial Sequence
  Description of Artificial Sequence: Synthetic polynucleotide
  misc_feature (338)..(338): n is a, c, g, or t
atggctgccgatggttatcttccagattggctcgaggacactctctctgaaggaataagacagtggtggaagctcaaacctggcccaccaccaccaaagcccgcagagcggcataaggacgacagcaggggtcttgtgcttcctgggtacaagtacctcggccccttcaacggactcgacaagggggagcccgtcaacgcggcggacgcagcggccctcgagcacgacaaggcctacgaccagcagctcgaagcgggtgacaatccgtacctgcggtataaccacgccgacgccgagtttcaggagcgtctgcaagaagatacgtcttttgggggcancctcgggcgagcagtcttccaggccaagaagcgggttctcgaacctctcggtctggttgaggaaggcgctaagacggctcctggaaagaagagaccagtagagcagtcaccccaagaaccagactcctcctcgggcatcggcaggaaaggccaacagcccgccagaaaaagactcaattttggccagactggcgactcagagtcagttccagaccctcaacctctcggagaacctccagcagcgccctctggtgtgggacctaatacaatggcttcaggcggtggcgctccaatggcagacaataacgaaggcgccgacggagtgggtaatgcctcaggaaattggcattgcgattccacatggctgggcgacagagtcatcaccaccagcacccgcacctgggccttgcccacctacaataaccacctctacaagcaaatctccagtgcttcaacgggggccagcaacgacaaccactacttcggctacagcaccccctgggggtattttgatttcaacagattccactgccacttttcaccacgtgactggcagcgactcatcaacaacaattggggattccggcccaagagactcaacttcaaactcttcaacatccaggtcaaggaggtcacgcagaatgaaggcactaagaccatcgccaataaccttaccagcacgattcaggtatttacggactcggaataccagctgccgtacgtcctcggctccgcgcaccagggctgcctgcctccgttcccggcggacgtcttcatgattccccagtacggctaccttacactgaacaatggaagtcaagccgtaggccgttcctccttctactgcctggaatattttccatctcaaatgctgcgaactggcaacaacttccagtttacctacaccttcgaggacgtgcctttccacagcagctacgcccacagccagagcttggaccggctgatgaatcctctgattgaccagtacctgtactacttgtctcggactcagtccacaggaggaactcaaggtacccagcaattgttattttctcaagctgggcctgcaaacatgtcggctcaggctaagaactggctacctggaccttgctaccggcagcagcgagtctctacgacactgtcgcaaaacaacaacagcaactttgcttggactggtgccaccaaatatcacctgaacggaagagactctttggtaaatcccggtgtcgccatggcaacccacaaggacgacgaggaacgcttcttcccgtcgagtggagtcctgatgtttggaaaacagggtgctggaagagacaatgtggactacagcagcgttatgctaaccagcgaagaagaaattaaaaccactaaccctgtagccacagaacaatacggtgtggtggttgataacttgcagcaaaccaatacggggcctattgtgggaaatgtcaacagccaaggagccttacctggtatggtctggcagaaccgggacgtgtacctgcagggtcccatctgggccaagattcctcacacggacggcaacttccacccgtctccgctgatgggcggctttggcctgaaacatcctccgcctcagatcctcatcaaaaacacacctgtacctgcggatcctccaacggccttcaacaaggacaagctgaactctttcatcacccagtattctactggccaagtcagcgtggagatcgagtgggagctgcagaaggaaaacagcaagcgctggaacccggagatccagtacacttccaactattacaagtctaataatgttgaatttgctgttaatactgaaggtgtatatagtgaaccccgccccattggcaccagatacctgactcgtaatctgtaa

SEQ ID NO: 1975 - protein, 735 aa, Artificial Sequence
  Description of Artificial Sequence: Synthetic polypeptide
MAADGYLPDWLEDNLSEGIREWWDLKPGAPKPKANQQKQDDGRGLVLPGYKYLGPFNGLDKGEPVNAADAAALEHDKAYDRQLDSGDNPYLKYNHADAEFQERLKEDTSFGGNLGRAVFQAKKRVLEPFGLVEEGAKTAPGKKRPVEQSPQEPDSSSGIGKTGQQPAKKRLNFGQTGDSESVPDPQPLGEPPATPAAVGPTTMASGGGAPVADNNEGADGVGSSSGNWHCDSTWLGDRVITTSTRTWALPTYNNHLYKQISSASTGASNDNHYFGYSTPWGYFDFNRFHCHFSPRDWQRLINNNWGFRPKRLNFKLFNIQVKEVTTNEGTKTIANNLTSTVQVFTDSEYQLPYVLGSAHQGCLPPFPADVFMVPQYGYLTLNNGSQALGRSSFYCLEYFPSQMLRTGNNFTFSYTFEDVPFHSSYAHSQSLDRLMNPLIDQYLYYLVRTQTTGTGGTQTLAFSQAGPSSMANQARNWVPGPCYRQQRVSTTTNQNNNSNFAWTGAAKFKLNGRDSLMNPGVAMASHKDDDDRFFPSSGVLIFGKQGAGNDGVDYSQVLITDEEEIKATNPVATEEYGAVAINNQAANTQAQTGLVHNQGVIPGMVWQNRDVYLQGPIWAKIPHTDGNFHPSPLMGGFGLKHPPPQILIKNTPVPADPPLTFNQAKLNSFITQYSTGQVSVEIEWELQKENSKRWNPEIQYTSNYYKSTNVDFAVNTEGVYSEPRPIGTRYLTRNL

SEQ ID NO: 1976 - protein, 736 aa, Artificial Sequence
  Description of Artificial Sequence: Synthetic polypeptide
  misc_feature (113)..(113): Xaa can be any naturally occurring amino acid
MAADGYLPDWLEDTLSEGIRQWWKLKPGPPPPKPAERHKDDSRGLVLPGYKYLGPFNGLDKGEPVNAADAATLEHDKAYDQQLKAGDNPYLRYNHADAEFQERLQEDTSFGGXLGRAVFQAKKRVLEPLGLVEEAAKTAPGKKRPVEPSPQRSPDSSTGIGKKGQQPARKRLNFGQTGDSESVPDPQPLGEPPAAPSGVGPNTMAAGGGAPMADNNEGADGVGSSSGNWHCDSTWLGDRVITTSTRTWALPTYNNHLYKQISSASTGASNDNHYFGYSTPWGYFDFNRFHCHFSPRDWQRLINNNWGFRPKRLNFKLFNIQVKEVTTNDGVTTIANNLTSTVQVFSDSDYQLPYVLGSAHEGCLPPFPADVFMIPQYGYLTLNNGSQALGRSSFYCLEYFPSQMLRTGNNFQFSYTFEDVPFHSSYAHSQSLDRLMNPLIDQYLYYLVRTQTTGTGGTQTLAFSQAGPSSMANQARNWVPGPCYRQQRVSTTTNQNNNSNFAWTGAAKFKLNGRDSLMNPGVAMASHKDDDDRFFPSSGVLIFGKQGAGNDGVDYSQVLITDEEEIKATNPVATEEYGAVAINNQAANTQAQTGLVHNQGVIPGMVWQDRDVYLQGPIWAKIPHTDGHFHPSPLMGGFGLKHPPPQILIKNTPVPANPPAEFSATKFASFITQYSTGQVSVEIEWELQKENSKRWNPEVQYTSNYAKSANVDFTVDNNGLYTEPRPIGTRYLTRPL

SEQ ID NO: 1977 - protein, 737 aa, Artificial Sequence
  Description of Artificial Sequence: Synthetic polypeptide
  misc_feature (112)..(112): Xaa can be any naturally occurring amino acid
MTDGYLPDWLEDNLSEGVREWWALQPGAPKPKANQQKQDDGRGLVLPGYKYLGPFNGLDKGEPVNAADAAALEHDKAYDQQLKAGDNPYLRYNHADAEFQERLQEDTSFGGXLGRAVFQAKKRVLEPLGLVEEGAKTAPGKKRPVEPSPQRSPDSSTGIGKKGQQPARKRLNFGQTGDSESVPDPQPLGEPPAAPSGVGSLTMASGGGAPVADNNEGADGVGSSSGNWHCDSQWLGDRVITTSTRTWALPTYNNHLYKQISNSTSGGSSNDNAYFGYSTPWGYFDFNRFHCHFSPRDWQRLINNNWGFRPKRLSFKLFNIQVKEVTQNEGTKTIANNLTSTIQVFTDSEYQLPYVLGSAHQGCLPPFPADVFMIPQYGYLTLNNGSQAVGRSSFYCLEYFPSQMLRTGNNFQFTYTFEDVPFHSSYAHSQSLDRLMNPLIDQYLYYLSRTQTTGGTANTQTLGFSQGGPNTMANQAKNWLPGPCYRQQRVSTTTGQNNNSNFAWTAGTKYHLNGRNSLANPGIAMATHKDDEERFFPSNGILIFGKQNAARDNADYSDVMLTSEEEIKTTNPVATEEYGIVADNLQQQNTAPQIGTVNSQGALPGMVWQNRDVYLQGPIWAKIPHTDGNFHPSPLMGGFGLKHPPPQILIKNTPVPADPPTTLNQAKLNSFITQYSTGQVSVEIEWELQKENSKRWNPEIQYTSNYYKSTNVDFAVNTEGTYSEPRPIGTRFLTRNL

SEQ ID NO: 1978 - protein, 736 aa, Artificial Sequence
  Description of Artificial Sequence: Synthetic polypeptide
  misc_feature (113)..(113): Xaa can be any naturally occurring amino acid
MAADGYLPDWLEDTLSEGIRQWWKLKPGPPPPKPAERHKDDSRGLVLPGYKYLGPFNGLDKGEPVNAADAAALEHDKAYDQQLEAGDNPYLRYNHADAEFQERLQEDTSFGGXLGRAVFQAKKRVLEPLGLVEEGAKTAPGKKRPVEQSPQEPDSSSGIGRKGQQPARKRLNFGQTGDSESVPDPQPLGEPPAAPSGVGPNTMASGGGAPMADNNEGADGVGNASGNWHCDSTWLGDRVITTSTRTWALPTYNNHLYKQISSASTGASNDNHYFGYSTPWGYFDFNRFHCHFSPRDWQRLINNNWGFRPKRLNFKLFNIQVKEVTQNEGTKTIANNLTSTIQVFTDSEYQLPYVLGSAHQGCLPPFPADVFMIPQYGYLTLNNGSQAVGRSSFYCLEYFPSQMLRTGNNFQFTYTFEDVPFHSSYAHSQSLDRLMNPLIDQYLYYLSRTQSTGGTQGTQQLLFSQAGPANMSAQAKNWLPGPCYRQQRVSTTLSQNNNSNFAWTGATKYHLNGRDSLVNPGVAMATHKDDEERFFPSSGVLMFGKQGAGRDNVDYSSVMLTSEEEIKTTNPVATEQYGVVVDNLQQTNTGPIVGNVNSQGALPGMVWQNRDVYLQGPIWAKIPHTDGNFHPSPLMGGFGLKHPPPQILIKNTPVPADPPTAFNKDKLNSFITQYSTGQVSVEIEWELQKENSKRWNPEIQYTSNYYKSNNVEFAVNTEGVYSEPRPIGTRYLTRNL

SEQ ID NO: 1979 - DNA, 2211 bp, Artificial Sequence
  Description of Artificial Sequence: Synthetic polynucleotide
atggccgccgacggctacctgcccgactggctggaggacaacctgagcgagggcatccgcgagtggtgggccctgaagcccggcgccccccagcccaaggccaaccagcagcaccaggacaacgcccgcggcctggtgctgcccggctacaagtacctgggccccggcaacggcctggacaagggcgagcccgtgaacgccgccgacgccgccgccctggagcacgacaaggcctacgaccagcagctgaaggccggcgacaacccctacctgaagtacaaccacgccgacgccgagttccaggagcgcctgaaggaggacaccagcttcggcggcaacctgggccgcgccgtgttccaggccaagaagcgcctgctggagcccctgggcctggtggaggaggccgccaagaccgcccccggcaagaagcgccccgtggagcagagcccccaggagcccgacagcagcgccggcatcggcaagagcggcgcccagcccgccaagaagcgcctgaacttcggccagaccggcgacaccgagagcgtgcccgacccccagcccatcggcgagccccccgccgcccccagcggcgtgggcagcctgaccatggccagcggcggcggcgcccccgtggccgacaacaacgagggcgccgacggcgtgggcagcagcagcggcaactggcactgcgacagccagtggctgggcgaccgcgtgatcaccaccagcacccgcacctgggccctgcccacctacaacaaccacctgtacaagcagatcagcaacagcaccagcggcggcagcagcaacgacaacgcctacttcggctacagcaccccctggggctacttcgacttcaaccgcttccactgccacttcagcccccgcgactggcagcgcctgatcaacaacaactggggcttccgccccaagcgcctgaacttcaagctgttcaacatccaggtgaaggaggtgaccgacaacaacggcgtgaagaccatcgccaacaacctgaccagcaccgtgcaggtgttcaccgacagcgactaccagctgccctacgtgctgggcagcgcccacgagggctgcctgccccccttccccgccgacgtgttcatgatcccccagtacggctacctgaccctgaacgacggcagccaggccgtgggccgcagcagcttctactgcctggagtacttccccagccagatgctgcgcaccggcaacaacttccagttcagctacgagttcgagaacgtgcccttccacagcagctacgcccacagccagagcctggaccgcctgatgaaccccctgatcgaccagtacctgtactacctgagcaagaccatcaacggcagcggccagaaccagcagaccctgaagttcagcgtggccggccccagcaacatggccgtgcagggccgcaactacatccccggccccagctaccgccagcagcgcgtgagcaccaccgtgacccagaacaacaacagcgagttcgcctggcccggcgccagcagctgggccctgaacggccgcaacagcctgatgaaccccggccccgccatggccagccacaaggagggcgaggaccgcttcttccccctgagcggcagcctgatcttcggcaagcagggcaccggccgcgacaacgtggacgccgacaaggtgatgatcaccaacgaggaggagatcaagaccaccaaccccgtggccaccgagagctacggccaggtggccaccaaccaccagagcgcccaggcccaggcccagaccggctgggtgcagaaccagggcatcctgcccggcatggtgtggcaggaccgcgacgtgtacctgcagggccccatctgggccaagatcccccacaccgacggcaacttccaccccagccccctgatgggcggcttcggcatgaagcacccccccccccagatcctgatcaagaacacccccgtgcccgccgacccccccaccgccttcaacaaggacaagctgaacagcttcatcacccagtacagcaccggccaggtgagcgtggagatcgagtgggagctgcagaaggagaacagcaagcgctggaaccccgagatccagtacaccagcaactactacaagagcaacaacgtggagttcgccgtgaacaccgagggcgtgtacagcgagccccgccccatcggcacccgctacctgacccgcaacctgtaa

SEQ ID NO: 1980 - DNA, 2211 bp, Artificial Sequence
  Description of Artificial Sequence: Synthetic polynucleotide
atggctgccgatggttatcttccagattggctcgaggacactctctctgaaggaataagacagtggtggaagctcaaacctggcccaccaccaccaaagcccgcagagcggcataaggacgacagcaggggtcttgtgcttcctgggtacaagtacctcggacccttcaacggactcgacaagggagagccggtcaacgaggcagacgccgcggccctcgagcacgacaaggcctacgaccagcagctcaaggccggagacaacccgtacctcaagtacaaccacgccgacgccgagttccaggagcggctcaaagaagatacgtcttttgggggcaacctcggacgagcagtcttccaggccaagaagcgggttctcgaacctctcggtctggttgaggaaggcgctaagacggctcctggaaagaaacgtccggtagagcagtcgccacaagagccagactcctcctcgggcattggcaagacaggccagcagcccgctaaaaagagactcaattttggtcagactggcgactcagagtcagtccccgacccacaacctctcggagaacctccagcaacccccgctgctgtgggacctactacaatggcttcaggcggtggcgcaccaatggcggacaataacgaaggcgccgatggagtgggtagttcctcgggaaattggcattgcgattcccaatggctgggggacagagtcatcaccaccagcacccgaacatgggccttgcccacctataacaaccacctctacaagcaaatctccagtgcttcaacgggggccagcaacgacaaccactacttcggctacagcaccccctgggggtattttgacttcaacagattccactgccacttctcaccacgtgactggcagcgactcatcaacaacaactggggattccgacccaagagactcaacttcaagctctttaacattcaagtcaaggaggtcacgcagaatgaaggcaccaagaccatcgccaataacctcaccagcaccatccaggtgtttacggactcggagtaccagctgccgtacgttctcggctccgcccaccagggctgcctgcctccgttcccggcggacgtgttcatgattccccagtacggctacctaacactcaacaacggtagtcaggccgtgggacgctcctccttctactgcctggaatactttccttcgcagatgctgagaaccggcaacaacttccagtttacttacaccttcgaggacgtgcctttccacagcagctacgcccacagccagagcttggaccggctgatgaatcctctgattgaccagtacctgtactacttgtctcggactcaaacaacaggaggcacggcaaatacgcagactctgggcttcagccaaggtgggcctaatacaatggccaatcaggcaaagaactggctgccaggaccctgttaccgccaacaacgcgtctcaacgacaaccgggcaaaacaacaatagcaactttgcctggactgctgggaccaaataccatctgaatggaagaaattcattggctaatcctggcatcgctatggcaacacacaaagacgacaaggagcgtttttttcccagtaacgggatcctgatttttggcaaacaaaatgctgccagagacaatgcggattacagcgatgtcatgctcaccagcgaggaagaaatcaaaaccactaaccctgtggctacagaggaatacggtatcgtggcagataacttgcagcagcaaaacacggctcctcaaattggaactgtcaacagccagggggccttacccggtatggtctggcagaaccgggacgtgtacctgcagggtcccatctgggccaagattcctcacacggacggcaacttccacccgtctccgctgatgggcggctttggcctgaaacatcctccgcctcagatcctgatcaagaacacgcctgtacctgcggatcctccgaccaccttcaaccagtcaaagctgaactctttcatcacgcaatacagcaccggacaggtcagcgtggaaattgaatgggagctgcagaaagaaaacagcaaacgctggaacccagagattcaatacacttccaactactacaaatctacaagtgtggactttgctgttaatacagaaggcgtgtactctgaaccccaccccattggcacccgttacctcacccgtcccctgtaa

SEQ ID NO: 1981 - DNA, 2211 bp, Artificial Sequence
  Description of Artificial Sequence: Synthetic polynucleotide
atggctgccgatggttatcttccagattggctcgaggacaacctctctgagggcattcgcgagtggtgggcgctgaaacctggagccccgaagcccaaagccaaccagcaaaagcaggacgacggccggggtctggtgcttcctggctacaagtacctcggacccttcaacggactcgacaagggggagccggtcaacgcagcagacgcggcggccctcgagcacgacaaggcctacgaccagcagctcaaggccggagacaacccgtacctcaagtacaaccacgccgacgccgagttccaggagcggctcaaagaagatacgtcttttgggggcaacctcgggcgagcagtcttccaggccaaaaagaggcttcttgaacctcttggtctggttgaggaagcggctaagacggctcctggaaagaagaggcctgtagagcagtctcctcaggaaccggactcctccgcgggtattggcaaatcgggtgcacagcccgctaaaaagagactcaattttggtcagactggcgactcagagtcagtccccgacccacaacctctcggagaacctccagcaacccccgctgctgtgggacctactacaatggcttcaggcggtggcgcaccaatggcagacaataacgaaggcgccgacggagtgggtaatgcctcaggaaattggcattgcgattccacatggctgggcgacagagtcatcaccaccagcacccgaacctgggccctgcccacctacaataaccacctctacaagcaaatctccagtgcttcaacgggggccagcaacgacaaccactacttcggctacagcaccccctgggggtattttgatttcaacagattccactgccacttttcaccacgtgactggcagcgactcatcaacaacaattggggattccggcccaagagactcaacttcaaactcttcaacatccaagtcaaggaggtcacgcagaatgaaggcaccaagaccatcgccaataacctcaccagcaccatccaggtgtttacggactcggagtaccagctgccgtacgttctcggctctgcccaccagggctgcctgcctccgttcccggcggacgtgttcatgattccccagtacggctacctaacactcaacaacggtagtcaggccgtgggacgctcctccttctactgcctggaatactttccttcgcagatgctgagaaccggcaacaacttccagtttacttacaccttcgaggacgtgcctttccacagcagctacgcccacagccagagcttggaccggctgatgaatcctctgattgaccagtacctgtactacttgtctcggactcaaacaacaggaggcacggcaaatacgcagactctgggcttcagccaaggtgggcctaatacaatggccaatcaggcaaagaactggctgccaggaccctgttaccgccaacaacgcgtctcaacgacaaccgggcaaaacaacaatagcaactttgcctggactgctgggaccaaataccatctgaatggaagaaattcattggctaatcctggcatcgctatggcaacacacaaagacgacaaggagcgtttttttcccagtaacgggatcctgatttttggcaaacaaaatgctgccagagacaatgcggattacagcgatgtcatgctcaccagcgaggaagaaatcaaagccactaaccctgtggctacagaggaatacggtatcgtggcagataacttgcagcagcaaaacacggctcctcaaattggaactgtcaacagccagggggccttacccggtatggtttggcagaaccgggacgtgtacctgcagggtcccatctgggccaagattcctcacacggacggcaacttccacccgtctccgctgatgggcggctttggcctgaaacatcctccgcctcagatcctgatcaagaacacgcctgtacctgcggatcctccgaccaccttcaaccagtcaaagctgaactctttcatcacgcaatacagcaccggacaggtcagcgtggaaattgaatgggagctgcagaaggaaaacagcaagcgctggaaccccgagatccagtacacctccaactactacaaatctacaagtgtggactttgctgttaatacagaaggcgtgtactctgaaccccaccccattggcacccgttacctcacccgtcccctgtaa

SEQ ID NO: 1982 - DNA, 2214 bp, Artificial Sequence
  Description of Artificial Sequence: Synthetic polynucleotide
atggctgccgatggttatcttccagattggctcgaggacaacctctctgagggcattcgcgagtggtgggacttgaaacctggagccccgaagcccaaagccaaccagcaaaagcaggacgacggccggggtctggtgcttcctggctacaagtacctcggacccttcaacggactcgacaagggggagcccgtcaacgcggcggacgcagcggccctcgagcacgacaaggcctacgaccagcagctcaaagcgggtgacaatccgtacctgcggtataaccacgccgacgccgagtttcaggagcgtctgcaagaagatacgtcttttgggggcaacctcgggcgagcagtcttccaggccaagaagcgggttctcgaacctctcggtctggttgaggaaggcgctaatacggctcctggaaagaaacgtccggtagagcagtcgccacaagagccagactcctccgcgggtattggcaaatcgggtgcacagcccgctaaaaagagactcaatttcggtcagactggcgacacagagtcagtcccagaccctcaaccaatcggagaacctcccgcagccccctcaggtgtgggatctcttacaatggcttcaggtggtggcgcaccagtggcagacaataacgaaggtgccgatggagtgggtagttcctcgggaaattggcattgcgattcccaatggctgggggacagagtcatcaccaccagcacccgaacctgggccctgcccacctacaacaatcacctctacaagcaaatctccaacagcacatctggaggatcttcaaatgacaacgcctacttcggctacagcaccccctgggggtattttgacttcaacagattccactgccacttctcaccacgtgactggcagcgactcatcaacaacaactggggattccggcctaagcgactcaacttcaagctcttcaacattcaggtcaaagaggttacggacaacaatggagtcaagaccatcgccaataacctcaccagcaccatccaggtgtttacggactcggagtaccagctgccgtacgttctcggctccgcccaccagggctgcctgcctccgttcccggcggacgtgttcatgattccccagtacggctacctaacactcaacaacggtagtcaggccgtgggacgctcctccttctactgcctggaatactttccttcgcagatgctgagaaccggcaacaacttccagtttacttacaccttcgaggacgtgcctttccacagcagctacgcccacagccagagcttggaccggctgatgaatcctctgattgaccagtacctgtactacttgtctcggactcaaacaacaggaggcacggcaaatacgcagactctgggcttcagccaaggtgggcctaatacaatggccaatcaggcaaagaactggctgccaggaccctgttaccgccaacaacgcgtctcaacgacaaccgggcaaaacaacaatagcaactttgcctggactgctgggaccaaataccatctgaatggaagaaattcattggctaatcctggcatcgctatggcctcacacaaagacgacaaggagcgtttttttcccagtaacgggatcctgatttttggcaaacaaaatgctgccagagacaatgcggattacagcgatgtcatgctcaccagcgaggaagaaatcaaaaccactaaccctgtggctacagaggaatacggtatcgtggcagataacttgcagcagcaaaacacggctcctcaaattggaactgtcaacagtcaaggagccttacctggcatggtctggcagaaccgggacgtgtacctgcagggtcccatctgggccaagattcctcacacggacggcaacttccacccgtctccgctgatgggcggctttggcctgaaacatcctccgcctcagatcctgatcaagaacacgcctgtacctgcggatcctccgaccaccttcaaccagtcaaagctgaactctttcatcacgcaatacagcaccggacaggtcagcgtggaaattgaatgggagctgcagaaggaaaacagcaagcgctggaaccccgagatccagtacaccaccaactactacaaatctacaagtgtggactttgctgttaatacagaaggcgtgtactctgaaccccaccccattggcacccgttacctcacccgtcccctgtaa

SEQ ID NO: 1983 - DNA, 2211 bp, Artificial Sequence
  Description of Artificial Sequence: Synthetic polynucleotide
atggctgccgatggttatcttccagattggctcgaggacaacctctctgagggcattcgcgagtggtgggcgctgaaacctggagccccgaagcccaaagccaaccagcaaaagcaggacgacggccggggtctggtgcttcctggctacaagtacctcggacccttcaacggactcgacaaaggagagccggtcaacgaggcggacgcggcagccctcgaacacgacaaagcttacgaccagcagctcaaggccggtgacaatccgtacctgcggtataaccacgccgacgccgagtttcaggagcgtcttcaagaagatacgtcttttgggggcaacctcgggcgagcagtcttccaggccaagaagcgggttctcgaacctctcggtctggttgaggaaggcgctaagacggctcctggaaagaaacgtccggtagagcagtcgccacaagagccagactcctcctcgggcatcggcaagacaggccagcagcccgctaaaaagagactcaattttggtcagactggcgactcagagtcagtccccgacccacaacctctcggagaacctccagcaacccccgctgctgtgggacctactacaatggcttcaggcggtggcgcaccaatggcagacaataacgaaggcgccgacggagtgggtaatgcctcaggaaattggcattgcgattccacatggctgggcgacagagtcatcaccaccagcacccgcacctgggccttgcccacctacaataaccacctctacaagcaaatctccagtgcttcaacgggggccagcaacgacaaccactacttcggctacagcaccccctgggggtattttgactttaacagattccactgccacttttcaccacgtgactggcaaagactcatcaacaacaactggggattccggcccaagagactcaacttcaagctcttcaacatccaggtcaaggaggtcacgcagaatgaaggcaccaagaccatcgccaataaccttaccagcacgattcaggtctttacggactcggaataccagctcccgtacgtcctcggctctgcgcaccagggctgcctccctccgttcccggcggacgtgttcatgattccgcagtacggctacctaacactcaacaacggtagtcaggccgtgggacgctcctccttctactgcctggaatactttccttcgcagatgctgagaaccggcaacaacttccagtttacttacaccttcgaggacgtgcctttccacagcagctacgcccacagccagagcttggaccggctgatgaatcctctgattgaccagtacctgtactacttgtctcggactcaaacaacaggaggcacggcaaatacgcagactctgggcttcagccaaggtgggcctaatacaatggccaatcaggcaaagaactggctgccaggaccctgttaccgccaacaacgcgtctcaacgacaaccgggcaaaacaacaatagcaactttgcctggactgctgggaccaaataccatctgaatggaagaaattcattggctaatcctggcatcgctatggcaacacacaaagacgacaaggagcgtttttttcccagtaacgggatcctgatttttggcaaacaaaatgctgccagagacaatgcggattacagcgatgtcatgctcaccagcgaggaagaaatcaaaaccactaaccctgtggctacagaggaatacggtatcgtggcagataacttgcagcagcaaaacacggctcctcaaattggaactgtcaacagccagggggccttacccggtatggtctggcagaaccgggacgtgtacctgcagggtcccatctgggccaagattcctcacacggacggcaacttccacccgtctccgctgatgggcggctttggcctgaaacatcctccgcctcagatcctgatcaagaacacgcctgtacctgcggatcctccgaccaccttcaaccagtcaaagctgaactctttcatcacgcaatacagcaccggacaggtcagcgtggaaattgaatgggagctgcagaaggaaaacagcaagcgctggaaccccgagatccagtacacctccaactactacaaatctacaagtgtggactttgctgttaatacagaaggcgtgtactctgaaccccaccccattggcacccgttacctcacccgtcccctgtaa

SEQ ID NO: 1984 - DNA, 2211 bp, Artificial Sequence
  Description of Artificial Sequence: Synthetic polynucleotide
atggctgccgatggttatcttccagattggctcgaggacaacctctctgagggcattcgcgagtggtgggcgctgaaacctggagccccgaagcccaaagccaaccagcaaaagcaggacgacggccggggtctggtgcttcctggctacaagtacctcggacccttcaacggactcgacaaaggagagccggtcaacgaggcggacgcggcagccctcgaacacgacaaagcttacgaccagcagctcaaagcgggtgacaatccgtacctgcggtataaccacgccgacgccgagtttcaggagcgtctgcaagaagatacgtcttttgggggcaacctcgggcgagcagtcttccaggccaagaagagggttctcgaaccttttggtctggttgaggaaggtgctaagacggctcctggaaagaaacgtccggtagagcagtcgccacaagagccagactcctcctcgggcattggcaagacaggccagcagcccgctaaaaagagactcaattttggtcagactggcgactcagagtcagtccccgacccacaacctctcggagaacctccagcaacccccgctgctgtgggacctactacaatggcttcaggcggtggcgcaccaatggcagacaataacgaaggcgccgacggagtgggtaatgcctcaggaaattggcattgcgattcccaatggctgggcgacagagtcatcaccaccagcaccagaacctgggccttgcccacctataacaaccacctctacaagcaaatctccagtgcttcaacgggggccagcaacgacaaccactacttcggctacagcaccccctgggggtattttgatttcaacagattccactgccacttctcaccacgtgactggcagcgactcatcaacaacaactggggattccggcctaagcgactcaacttcaagctcttcaacattcaggtcaaagaggttacggacaacaatggagtcaagaccatcgccaataaccttaccagcacggttcaagtcttctcggactcggagtaccagttgccgtacgtcctcggctctgcgcaccagggctgcctccctccgttcccggcggacgtgttcatgattccccagtacggctacctaacactcaacaacggtagtcaggccgtgggacgctcctccttctactgcctggaatactttccttcgcagatgctgagaaccggcaacaacttccagtttacttacaccttcgaggacgtgcctttccacagcagctacgcgcacagccagagcttggaccggctgatgaatcctctgattgaccagtacctgtactacttgtctcggactcaaacaacaggaggcacggcaaatacgcagactctgggcttcagccaaggtgggcctaatacaatggccaatcaggcaaagaactggctgccaggaccctgttaccgccaacaacgcgtctcaacgacaaccgggcaaaacaacaatagcaactttgcctggactgctgggaccaaataccatctgaatggaagaaattcattggctaatcctggcatcgctatggcaacacacaaagacgacaaggagcgtttttttcccagtaacgggatcctgatttttggcaaacaaaatgctgccagagacaatgcggattacagcgatgtcatgctcaccagcgaggaagaaatcaaaaccactaaccctgtggctacagaggaatacggtatcgtggcagataacttgcagcagcaaaacacggctcctcaaattggaactgtcaacagccagggggccttacccggtatggtctggcagaaccgggacgtgtacctgcagggtcccatctgggccaagattcctcacacggacggcaacttccacccgtctccgctgatgggcggctttggcctgaaacatcctccgcctcagatcctgatcaagaacacgcctgtacctgcggatcctccgaccaccttcaaccagtcaaagctgaactctttcatcacgcaatacagcaccggacaggtcagcgtggaaattgaatgggagctgcagaaggaaaacagcaagcgctggaaccccgagatccagtacacctccaactactacaaatctacaagtgtggactttgctgttaatacagaaggcgtgtactctgaaccccaccccattggcacccgttacctcacccgtcccctgtaa

SEQ ID NO: 1985 - DNA, 2244 bp, Artificial Sequence
  Description of Artificial Sequence: Synthetic polynucleotide
  misc_feature (2241)..(2241): n is a, c, g, or t
atggctgccgatggttatcttccagattggctcgaggacactctctctgaaggaataagacagtggtggaagctcaaacctggcccaccaccaccaaagcccgcagagcggcataaggacgacagcaggggtcttgtgcttcctgggtacaagtacctcggacccttcaacggactcgacaagggagagccggtcaacgaggcagacgccgcggccctcgagcacgacaaagcctacgaccggcagctcgacagcggagacaacccgtacctcaagtacaaccacgccgacgcggagtttcaggagcgccttaaagaagatacgtcttttgggggcaacctcgggcgagcagtcttccaggccaagaagagggttctcgaaccttttggtctggttgaggaaggtgctaagacggctcctggaaagaaacgtccggtagagcagtcgccacaagagccagactcctcctcgggcattggcaagacaggccagcagcccgctaaaaagagactcaattttggtcagactggcgactcagagtcagtccccgacccacaacctctcggagaacctccagcaacccccgctgctgtgggacctactacaatggcttcaggcggtggcgcaccaatggcagacaataacgaaggcgccgacggagtgggtaatgcctcaggaaattggcattgcgattccacatggctgggcgacagagtcatcaccaccagcacccgaacatgggccttgcccacctataacaaccacctctacaagcaaatctccagtgcttcaacgggggccagcaacgacaaccactacttcggctacagcaccccctgggggtattttgacttcaacagattccactgccacttctcaccacgtgactggcagcgactcatcaacaacaactggggattccggcctaagcgactcaacttcaagctcttcaacattcaggtcaaagaggttacggacaacaatggagtcaagaccatcgccaataaccttaccagcacggtccaggtcttcacggactcagactatcagctcccgtacgtgctcgggtcggctcacgagggctgcctcccgccgttcccagcggacgttttcatgattcctcagtacggctacctaacactcaacaacggtagtcaggccgtgggacgctcctccttctactgcctggaatactttccttcgcagatgctgagaaccggcaacaacttccagtttacttacaccttcgaggacgtgcctttccacagcagctacgcgcacagccagagcttggaccggctgatgaatcctctgattgaccagtacctgtactacttgtctcggactcaaacaacaggaggcacggcaaatacgcagactctgggcttcagccaaggtgggcctaatacaatggccaatcaggcaaagaactggctgccaggaccctgttaccgccaacaacgcgtctcaacgacaaccgggcaaaacaacaatagcaactttgcctggactgctgggaccaaataccatctgaatggaagaaattcattggctaatcctggcatcgctatggcaacacacaaagacgacaaggagcgtttttttcccagtaacgggatcctgatttttggcaaacaaaatgctgccagagacaatgcggattacagcgatgtcatgctcaccagcgaggaagaaatcaaaaccactaaccctgtggctacagaggaatacggtatcgtggcagataacttgcagcagcaaaacacggctcctcaaattggaactgtcaacagccagggggccttacccggtatggtctggcagaaccgggacgtgtacctgcagggtcccatctgggccaagattcctcacacggacggcaacttccacccgtctccgctgatgggcggctttggcctgaaacatcctccgcctcagatcctgatcaagaacacgcctgtacctgcggatcctccgaccaccttcaaccagtcaaagctgaactctttcatcacgcaatacagcaccggacaggtcagcgtggaaattgaatgggagctgcagaaggaaaacagcaagcgctggaaccccgagatccagtacacctccaactactacaaatctacaagtgtggactttgctgttaatacagaaggcgtgtactctgaaccccaccccattggcaccagatacctgactcgtaatctgtaattgcttgttaatcaataaaccgtttaattnttt

SEQ ID NO: 1986 - DNA, 2217 bp, Artificial Sequence
  Description of Artificial Sequence: Synthetic polynucleotide
atggctgccgatggttatcttccagattggctcgaggacaacctctctgagggcattcgcgagtggtgggacttgaaacctggagccccgaaacccaaagccaaccagcaaaagcaggacgacggccggggtctggtgcttcctggctacaagtacctcggacccttcaacggactcgacaagggggagcccgtcaacgcggcggacgcagcggccctcgagcacgacaaggcctacgaccagcagctccaagcgggtgacaatccgtacctgcggtataaccacgccgacgccgagtttcaggagcgtctgcaagaagatacgtcttttgggggcaacctcggacgagcagtcttccaggcgaaaaagagggttctcgaacctctcggtctggttgaggaaggcgctaagacggctcctggaaagaagagaccggtagagccatcaccccagcgttctccagactcctctacgggcatcggcaagaaaggccaacagcccgccagaaaaagactcaattttggtcagactggcgactcagagtcagttccagaccctcaacctctcggagaacctccagcagcgccctctggtgtgggacctaatacaatggctgcaggcggtggcgcaccaatggcagacaataacgaaggcgccgacggagtgggtagttcctcgggaaattggcattgcgattcccaatggctgggggacagagtcatcaccaccagcacccgaacctgggccctgcccacctacaacaatcacctctacaagcaaatctccaacagcacatctggaggatcttcaaatgacaacgcctacttcggctacagcaccccctgggggtattttgacttcaaccgcttccactgccacttctcaccacgtgactggcagcgactcatcaacaacaactggggattccggcccaagagactcagcttcaaactcttcaacatccaggtcaaggaggtcacgcagaatgaaggcaccaagaccatcgccaataacctcaccagcaccatccaggtgtttacggactcggagtaccagctgccgtacgttctcggctctgcccaccagggctgcctgcctccgttcccggcggacgtgttcatgattcctcagtacggctacctaacgctcaacaatggcagccaggcagtgggacggtcatccttttactgcctggaatatttcccatcgcagatgctgagaacgggcaacaactttaccttcagctacacctttgaggacgttcctttccacagcagctacgctcacagccagagtctggaccgtctcatgaatcctctgattgaccagtacctgtactacttgtctcggactcaaacaacaggaggcacggcaaatacgcagactctgggcttcagccaaggtgggcctaatacaatggccaatcaggcaaagaactggctgccaggaccctgttaccgccaacaacgcgtctcaacgacaaccgggcaaaacaacaatagcaactttgcctggactgctgggaccaaataccatctgaatggaagaaattcattggctaatcctggcatcgctatggcaacacacaaagacgacaaggagcgtttttttcccagtaacgggatcctgatttttggcaaacaaaatgctgccagagacaatgcggattacagcgatgtcatgctcaccagcgaggaagaaatcaaaaccactaaccctgtggctacagaggaatacggtatcgtggcagataacttgcagcagcaaaacacggctcctcaaattggaactgtcaacagccagggggccttacccggtatggtctggcagaaccgggacgtgtacctgcagggtcccatctgggccaagattcctcacacggacggcaacttccacccgtctccgctgatgggcggctttggacttaagcacccgcctcctcagatcctcatcaaaaacacgcctgttcctgcggatcctccgaccaccttcaaccagtcaaagctgaactctttcatcacgcaatacagcaccggacaggtcagcgtggaaattgaatgggagctgcagaaggaaaacagcaagcgctggaaccccgagatccagtacacctccaactactacaaatctacaagtgtggactttgctgttaatacagaaggcgtgtactctgaaccccaccccattggcacccgttacctcacccgtcccctgtaa

SEQ ID NO: 1987 - DNA, 2214 bp, Artificial Sequence
  Description of Artificial Sequence: Synthetic polynucleotide
atggctgccgatggttatcttccagattggctcgaggacaacctctctgagggcattcgcgagtggtgggacttgaaacctggagccccgaagcccaaagccaaccagcaaaagcaggacgacggccggggtctggtgcttcctggctacaagtacctcggacccttcaacggactcgacaagggggagcccgtcaacgcggcggatgcagcggccctcgagcacgacaaagcctacgaccagcagctcaaagcgggtgacaatccgtacctgcggtataaccacgccgacgccgagtttcaggagcgtctgcaagaagatacgtcttttgggggcaacctcgggcgagcagtcttccaggccaagaagagggttctcgaaccttttggtctggttgaggaaggtgctaagacggctcctggaaagaaacgtccggtagagcagtcgccacaagagccagactcctcctcgggcattggcaagacaggccagcagcccgctaaaaagagactcaattttggtcagactggcgactcagagtcagtccccgacccacaacctctcggagaacctccagcaacccccgctgctgtgggacctactacaatggcttcaggcggtggcgcacccatgcaagacaataacgaaggcgccgacggagtgggtagttcctcgggaaattggcattgcgattccacatggctgggcgacagagtcatcaccaccagcacccgaacctgggccctgcccacctacaacaaccacctctacaagcaaatctccaacgggacatcgggaggagccaccaacgacaacacctacttcggctacagcaccccctgggggtattttgactttaacagattccactgccacttttcaccacgtgactggcagcgactcatcaacaacaactggggattccggcccaagagactcaacttcaagctcttcaacatccaggtcaaggaggtcacgcagaatgaaggcaccaagaccatcgccaataaccttaccagcacgattcaggtctttacggattcggaataccagctcccgtacgtcctcggctctgcgcaccagggctgcctccctccgttcccggcggacgtgttcatgattccgcagtacggctacctaacgctcaacaatggtagccaggcagtgggacggtcatccttttactgcctggaatatttcccatcgcagatgctgagaacgggcaacaactttaccttcagctacacctttgaggacgttcctttccacagcagctacgctcacagccagagtctggaccgtctcatgaatcctctgattgaccagtacctgtactacttgtctcggactcaaacaacaggaggcacggcaaatacgcagactctgggcttcagccaaggtgggcctaatacaatggccaatcaggcaaagaactggctgccaggaccctgttaccgccaacaacgcgtctcaacgacaaccgggcaaaacaacaatagcaactttgcctggactgctgggaccaaataccatctgaatggaagaaattcattggctaatcctggcatcgctatggcaacacacaaagacgacaaggagcgtttttttcccagtaacgggatcctgatttttggcaaacaaaatgctgccagagacaatgcggattacagcgatgtcatgctcaccagcgaggaagaaatcaaaaccactaaccctgtggctacagaggaatacggtatcgtggcagataacttgcagcagcaaaacacggctcctcaaattggaactgtcaacagccagggggccttacccggtatggtctggcagaaccgggacgtgtacctgcagggtcccatctgggccaagattcctcacacggacggcaacttccacccgtctccgctgatgggcggctttggcctgaaacatcctccgcctcagatcctgatcaagaacacgcctgtacctgcggatcctccgaccaccttcaaccagtcaaagctgaactctttcatcacgcaatacagcaccggacaggtcagcgtggaaattgaatgggagctgcagaaggaaaacagcaagcgctggaaccccgagatccagtacacctccaactactacaaatctacaagtgtggactttgctgttaatacagaaggcgtgtactctgaaccccaccccattggcacccgttacctcacccgtcccctgtaa

SEQ ID NO: 1988 - DNA, 2211 bp, Artificial Sequence
  Description of Artificial Sequence: Synthetic polynucleotide
atggctgccgatggttatcttccagattggctcgaggacaacctctctgagggcattcgcgagtggtgggcgctgaaacctggagccccgaagcccaaagccaaccagcaaaagcaggacgacggccggggtctggtgcttcctggctacaagtacctcggacccttcaacggactcgacaagggggagcccgtcaacgcggcggacgcagcggccctcgagcacgacaaggcctacgaccagcagctcaaagcgggtgacaatccgtacctgcggtataaccacgccgacgccgagtttcaggagcgtctgcaagaagatacgtcttttgggggcaacctcgggcgagcagtcttccaggccaagaagcgggttctcgaacctctcggtctggttgaggaaggcgctaagacggctcctggaaagaaacgtccggtagagcagtcgccacaagagccagactcctcctcgggcatcggcaagacaggccagcagcccgctaaaaagagactcaattttggtcagactggcgactcagagtcagtccccgacccacaacctctcggagaacctccagcaacccccgctgctgtgggacctactacaatggcttcaggcggtggcgcaccaatggcagacaataacgaaggcgccgacggagtgggtagttcctcgggaaattggcattgcgattccacatggctgggcgacagagtcatcaccaccagcacccgcacctgggccttgcccacctacaataaccacctctacaagcaaatctccagtgcttcaacgggggccagcaacgacaaccactacttcggctacagcaccccctgggggtattttgacttcaacagattccactgccacttctcaccacgtgactggcagcgactcatcaacaacaactggggattccggcctaagcgactcaacttcaagctcttcaacattcaggtcaaagaggttacggacaacaatggagtcaagaccatcgccaataaccttaccagcacggtccaggtcttcacggactcagactatcagctcccgtacgtgctcgggtcggctcacgagggctgcctcccgccgttcccagcggacgttttcatgattcctcagtacgggtatctgacgctcaacaatggcagccaggcagtgggacggtcatccttttactgcctggaatatttcccatcgcagatgctgagaacgggcaataactttaccttcagctacaccttcgaggacgtgcctttccacagcagctacgcgcacagccagagcctggaccggctgatgaatcctctgattgaccagtacctgtactacttgtctcggactcaaacaacaggaggcacggcaaatacgcagactctgggcttcagccaaggtgggcctaatacaatggccaatcaggcaaagaactggctgccaggaccctgttaccgccaacaacgcgtctcaacgacaaccgggcaaaacaacaatagcaactttgcctggactgctgggaccaaataccatctgaatggaagaaattcattggctaatcctggcatcgctatggcaacacacaaagacgacaaggagcgtttttttcccagtaacgggatcctgatttttggcaaacaaaatgctgccagagacaatgcggattacagcgatgtcatgctcaccagcgaggaagaaatcaaaaccactaaccctgtggctacagaggaatacggtatcgtggcagataacttgcagcagcaaaacacggctcctcaaattggaactgtcaacagccagggggccttacccggtatggtctggcagaaccgggacgtgtacctgcagggtcccatctgggccaagattcctcacacggacggcaacttccacccgtctccgctgatgggcggctttggcctgaaacatcctccgcctcagatcctgatcaagaacacgcctgtacctgcggatcctccgaccaccttcaaccagtcaaagctgaactctttcatcacgcaatacagcaccggacaggtcagcgtggaaattgaatgggagctgcagaaggaaaacagcaagcgctggaaccccgagatccagtacacctccaactactacaaatctacaagtgtggactttgctgttaatacagaaggcgtgtactctgaaccccaccccattggcacccgttacctcacccgtcccctgtaa

SEQ ID NO: 1989 - DNA, 2214 bp, Artificial Sequence
  Description of Artificial Sequence: Synthetic polynucleotide
atggctgccgatggttatcttccagattggctcgaggacaacctctctgagggcattcgcgagtggtgggacttgaaacctggagccccgaaacccaaagccaaccagcaaaagcaggacgacggccggggtctggtgcttcctggctacaagtacctcggacccttcaacggactcgacaagggggagcccgtcaacgcggcggatgcagcggccctcgagcacgacaaggcctacgaccagcagctcaaagcgggtgacaatccgtacctgcggtataaccacgccgacgccgagtttcaggagcgtctgcaagaagatacgtcttttgggggcaacctcgggcgagcagtcttccaggccaagaagcgggttctcgaacctctcggtctggttgaggaaggcgctaagacggctcctggaaagaagagaccggtagagccatcaccccagcgttctccagactcctctacgggcatcggcaagaaaggccaacagcccgccagaaaaagactcaattttggtcagactggcgactcagagtcagtccccgacccacaacctctcggagaacctccagcaacccccgctgctgtgggacctactacaatggcttcaggcggtggcgcaccaatggcagacaataacgaaggcgccgacggagtgggtaatgcctcaggaaattggcattgcgattccacatggctgggcgacagagtcatcaccaccagcacccgaacatgggccttgcccacctataacaaccacctctacaagcaaatctccagtgcttcaacgggggccagcaacgacaaccactacttcggctacagcaccccctgggggtattttgatttcaacagattccactgccatttctcaccacgtgactggcagcgactcatcaacaacaatttgggatcccggcccaagagactcaacttcaagctcttcatcatccaagtcaaggaggtcacgacgaatgatggcgtcacgaccatcgctaataaccttaccagcacggttcaagtcttctcggactcggagtaccagttgccgtacgtcctcggctctgcgcaccagggctgcctccctccgttcccggcggacgtgttcatgattccgcagtacggctacctaacgctcaacaatggcagccaggcagtgggacggtcatccttttactgcctggaatatttcccatcgcagatgctgagaacgggcaataactttaccttcagctacaccttcgaggacgtgcctttccacagcagctacgcgcacagccagagcctggaccggctgatgaatcctctcatcgaccagtacctgtattacctgaacagaactcagaatcagtccggaagtgcccaaaacaaggacttgctgtttagccgggggtctccagctggcatgtctgttcagcccaaaaactggctacctggaccctgttaccggcagcagcgcgtttctaaaacaaaaacagacaacaacaacagcaactttacctggactggtgcttcaaaatataaccttaatgggcgtgaatctataatcaaccctggcactgctatggcctcacacaaagacgacaaagacaagttctttcccatgagcggtgtcatgatttttggaaaggagagcgccggagcttcaaacactgcattggacaatgtcatgatcacagacgaagaggaaatcaaagccactaaccccgtggccaccgaaagatttgggactgtggcagtcaatctccagagcagcagcacagaccctgcgaccggagatgtgcatgttatgggagccttacctggaatggtgtggcaagacagagacgtatacctgcagggtcctatttgggccaaaattcctcacacggatggacactttcacccgtctcctctcatgggcggctttggacttaagcacccgcctcctcagatcctcatcaaaaacacgcctgttcctgcgaatcctccggcagagttttcggctacaaagtttgcttcattcatcacccagtattccacaggacaagtgagcgtggagattgaatgggagctgcagaaagaaaacagcaaacgctggaatcccgaagtgcagtatacatctaactatgcaaaatctgccaacgttgatttcactgtggacaacaatggactttatactgagcctcgccccattggcacccgttacctcacccgtcccctgtaa

SEQ ID NO: 1990 - DNA, 2211 bp, Artificial Sequence
  Description of Artificial Sequence: Synthetic polynucleotide
atggctgccgatggttatcttccagattggctcgaggacaacctctctgagggcattcgcgagtggtgggcgctgaaacctggagccccgaaacccaaagccaaccagcaaaagcaggacgacggccggggtctggtgcttcctggctacaagtacctcggacccttcaacggactcgacaagggggagcccgtcaacgcggcggacgcagcggccctcgagcacgacaaggcctacgaccagcagctcaaggcgggtgacaatccgtacctgcggtataaccacgccgacgccgagtttcaggagcgtctgcaagaagatacgtcttttgggggcaacctcgggcgagcagtcttccaggccaaaaagaggcttcttgaacctcttggtctggttgaggaagcggctaagacggctcctggaaagaaacgtccggtagagcagtcgccacaagagccagactcctcctcgggcattggcaagacaggccagcagcccgctaaaaagagactcaactttgggcagactggcgactcagagtcagtgcccgaccctcaaccaatcggagaacctccagcaacccccgctgctgtgggacctactacaatggcttcaggcggtggcgcaccaatggcggacaataacgaaggcgccgatggagtgggtaattcctcgggaaattggcattgcgattccacatggctgggcgacagagtcatcaccaccagcacccgaacctgggccctgcccacctacaacaatcacctctacaagcaaatctccagtgcttcaacgggggccagcaacgacaaccactacttcggctacagcaccccctgggggtattttgatttcaacagattccactgccacttttcaccacgtgactggcagcgactcatcaacaacaactggggattccggcccaagagactcaacttcaagctcttcaacatccaggtcaaggaggtcacgcagaatgaaggcaccaagaccatcgccaataacctcaccagcaccatccaggtgtttacggactcggagtaccagctgccgtacgttctcggctccgcccaccagggctgcctgcctccgttcccggcggacgtgttcatgattccgcagtacggctacctaacgctcaacaatggcagccaggcagtgggacggtcatccttttactgcctggaatatttcccatcgcagatgctgagaacgggcaacaactttaccttcagctacacctttgaggacgttcctttccacagcagctacgctcacagccagagtctggaccgtctcatgaatcctctgattgaccagtacctgtactacttgtctcggactcaaacaacaggaggcacggcaaatacgcagactctgggcttcagccaaggtgggcctaatacaatggccaatcaggcaaagaactggctgccaggaccctgttaccgccaacaacgcgtctcaacgacaaccgggcaaaacaacaatagcaactttgcctggactgctgggaccaaataccatctgaatggaagaaattcattggctaatcctggcatcgctatggcaacacacaaagacgacaaggagcgtttttttcccagtaacgggatcctgatttttggcaaacaaaatgctgccagagacaatgcggattacagcgatgtcatgctcaccagcgaggaagaaatcaaaaccactaaccctgtggctacagaggaatacggtatcgtggcagataacttgcagcagcaaaacacggctcctcaaattggaactgtcaacagccagggggccttacccggtatggtctggcagaaccgggacgtgtacctgcagggtcccatctgggccaagattcctcacacggacggcaacttccacccgtctccgctgatgggcggctttggcctgaaacatcctccgcctcagatcctgatcaagaacacgcctgtacctgcggatcctccgaccaccttcaaccagtcaaagctgaactctttcatcacgcaatacagcaccggacaggtcagcgtggaaattgaatgggagctgcagaaggaaaacagcaagcgctggaaccccgagatccagtacacctccaactactacaaatctacaagtgtggactttgctgttaatacagaaggcgtgtactctgatccccaccccattggcacccgttacctcacccgtcccctgtaa

SEQ ID NO: 1991 - DNA, 2211 bp, Artificial Sequence
  Description of Artificial Sequence: Synthetic polynucleotide
atggctgccgatggttatcttccagattggctcgaggacaacctctctgagggcattcgcgagtggtgggcgctgaaacctggagccccgaagcccaaagccaaccagcaagagcaggacgacggccggggtctggtgcttcctggctacaagtacctcggacccttcaacggactcgacaagggagagcccgtcaacgcggcggatgcagcggccctcgagcacgacaaagcctacgaccagcagctcaaagcgggtgacaatccgtacctgcggtataaccacgccgacgccgagtttcaggagcgtctgcaagaagatacgtcttttgggggcaacctcgggcgagcagtcttccaggccaagaagagggttctcgaaccttttggtctggttgaggaaggtgctaagacggctcctggaaagaaacgtccggtagagcagtcgccacaagagccagactcctcctcgggcattggcaagacaggccagcagcccgctaaaaagagactcaattttggtcagactggcgactcagagtcagttccagaccctcaacctctcggagaacctccagcagcgccctctggtgtgggacctaatacaatggctgcaggcggtggcgcaccaatggcagacaataacgaaggcgccgacggagtgggtagttcctcgggaaattggcattgcgattccacatggctgggcgacagagtcatcaccaccagcacccgaacctgggccctgcccacctacaacaaccacctctacaagcaaatctccagtgcttcaacgggggccagcaacgacaaccactacttcggctacagcaccccctgggggtattttgactttaacagattccactgccacttttcaccacgtgactggcagcgactcatcaacaacaactggggattccggcccaagagactcaacttcaagctcttcaacatccaggtcaaggaggtcacgcagaatgaaggcaccaagaccatcgccaataaccttaccagcacgattcaggtctttacggattcggaataccagctcccgtacgtcctcggctctgcgcaccagggctgcctccctccgttcccggcggacgtgttcatgattccgcagtacggctacctaacgctcaacaatggtagccaggcagtgggacggtcatcctttttctgcctggaatatttcccatcgcagatgctgagaacgggcaacaactttaccttcagctacacctttgaggacgttcctttccacagcagctacgctcacagccagagtctggaccgtctcatgaatcctctgattgaccagtacctgtactacttgtctcggactcaaacaacaggaggcacggcaaatacgcagactctgggcttcagccaaggtgggcctaatacaatggccaatcaggcaaagaactggctgccaggaccctgttaccgccaacaacgcgtctcaacgacaaccgggcaaaacaacaatagcaactttgcctggactgctgggaccaaataccatctgaatggaagaaattcattggctaatcctggcatcgctatggcaacacacaaagacgacaaggagcgtttttttcccagtaacgggatcctgatttttggcaaacaaaatgctgccagagacaatgcggattacagcgatgtcatgctcaccagcgaggaagaaatcaaaaccactaaccctgtggctacagaggaatacggtatcgtggcagataacttgcagcagcaaaacacggctcctcaaattggaactgtcaacagccagggggccttacccggtatggtctggcagaaccgagacgtgtacctgcagggtcccatctgggccaagattcctcacacggacggcaacttccacccgtctccgctgatgggcggctttggcctgaaacatcctccgcctcagatcctgatcaagaacacgcctgtacctgcggatcctccgaccaccttcaaccagtcaaagctgaactctttcatcacgcaatacagcaccggacaggtcagcgtggaaattgaatgggagctgcagaaggaaaacagcaagcgctggaaccccgagatccagtacacctccaactactacaaatctacaagtgtggactttgctgttaatacagaaggcgtgtactctgaaccccaccccattggcacccgttacctcacccgtcccctgtaa

SEQ ID NO: 1992 - DNA, 2211 bp, Artificial Sequence
  Description of Artificial Sequence: Synthetic polynucleotide
atggctgccgatggttatcttccagattggctcgaggacaacctctctgagggcattcgcgagtggtgggacttgaaacctggagccccgaagcccaaagccaaccagcaaaagcaggacgacggccggggtctggtgcttcctggctacaagtacctcggacccttcaacggactcgacaagggggagcccgtcaacgcggcggacgcagcggccctcgagcacgacaaggcctacgaccagcagctcaaagcgggtgacaatccgtacctgcggtataaccacgccgacgccgagtttcaggagcgtctgcaagaagatacgtcttttgggggcaacctcgggcgagcagtcttccaggccaagaagcgggttctcgaacctctcggtctggttgaggaaggcgctaagacggctcctggaaagaaacgtccggtagagcagtcaccacaagagccagactcctcctcgggcatcggcaagacaggccagcagcccgctaaaaagagactcaattttggtcagactggcgactcagagtcagtccccgacccacaacctctcggagaacctccagcaacccccgctgctgtgggacctactacaatggcttcaggcggtggcgcaccaatggcggacaataacgaaggcgccgacggagtgggtaatgcctcaggaaattggcattgcgattccacatggctgggcgacagagtcatcaccaccagcacccgaacatgggccttgcccacctataacaaccacctctacaagcaaatctccagtgcttcaacgggggccagcaacgacaaccactacttcggctacagcaccccctgggggtattttgatttcaacagattccactgccatttctcaccacgtgactggcagcgactcatcaacaacaattggggattccggcccaagagactcaacttcaagctcttcaacatccaagtcaaggaggtcacgacgaatgatggcgtcacgaccatcgctaataaccttaccagcacggttcaagtcttctcggactcggagtaccagttgccgtacgtcctcggctctgcgcaccagggctgcctccctccgttcccggcggacgtgttcatgattccgcagtacggctacctaacgctcaacaatggcagccaggcagtgggacggtcatccttttactgcctggaatatttcccatcgcagatgctgagaacgggcaataactttaccttcagctacaccttcgaggacgtgcctttccacagcagctacgcgcacagccagagcctggaccggctgatgaatcctctcatcgaccagtacctgtattacctgaacagaactcagaatcagtccggaagtgcccaaaacaaggacttgctgtttagccgggggtctccagctggcatgtctgttcagcccaaaaactggctacctggaccctgttaccggcagcagcgcgtttctaaaacaaaaacagacaacaacaacagcaactttacctggacaggtgcttcaaaatataaccttaatgggcgtgaatctataatcaaccctggcactgctatggcctcacacaaagacgacaaagacaagttctttcccatgagcggtgtcatgatttttggaaaggagagcgccggagcttcaaacactgcattggacaatgtcatgatcacagacgaagaggaaatcaaagccactaaccccgtggccaccgaaagatttgggactgtggcagtcaatctccagaacagcagcacagaccctgcgaccggagatgtgcatgttatgggagccttacctggaatggtgtggcaagacagagacgtatacctgcagggtcctatttgggccaaaattcctcacacggatggacactttcacccgtctcctctcatgggcggctttggacttaagcacccgcctcctcagatcctcatcaaaaacacgcctgttcctgcgaatcctccggcagagttttcggctacaaagtttgcttcattcatcacccagtattccacaggacaagtgagcgtggagattgaatgggagctgcagaaagaaaacagcaaacgctggaatcccgaagtgcagtatacatctaactatgcaaaatctgccaacgttgatttcactgtagacaacaatggactttatactgtgcctcgccccattggcacccgttacctcacccgtcccctgtaa

SEQ ID NO: 1993 - DNA, 2211 bp, Artificial Sequence
  Description of Artificial Sequence: Synthetic polynucleotide
atggctgccgatggttatcttccagattggctcgaggacaacctctctgagggcattcgcgagtggtgggcgctgaaacctggagccccgaagcccaaagccaaccagcaaaagcaggacgacggccggggtctggtgcttcctggctacaagtacctcggacccttcaacggactcgacaaaggagagccggtcaacgcggcggacgcggcggccctcgaacacgacaaggcttacgaccagcagctcaaggcgggtgacaacccctacctgcggtataaccacgccgacgccgagttccaggagcggctgcaagaagatacgtcttttgggggcaacctcgggcgagcagtcttccaggccaaaaagaggcttcttgaacctcttggtctggttgaggaaggcgctaagacggctcctggaaagaagaggcctgtagagcagtctcctcaagaaccggactcctcctcgggtattggcaaaacaggtgagcagcccgctaaaaagagactcaattttggtcagactggcgactcagagtcagtccccgacccacaacctctcggagaacctccagcaacccccgctgctgtgggacctactacaatggcttcaggcggtggcgcaccaatggcagacaataacgaaggcgccgacggagtgggtagtgcctcaggaaattggcattgcgattccacatggctgggcgacagagtcatcaccaccagcacccgaacctgggccctgcccacctataacaaccatctctacaagcaaatctccagtgcttcaacgggggccagcaacgacaaccactacttcggctacagcaccccctgggggtattttgacttcaacagattccactgccacttctcaccacgtgactggcagcgactcatcaacaacaactggggattccggcctaagcgactcaacttcaagctcttcaacattcaggtcaaagaggttacggacaacaatggagtcaagaccatcgccaataacctcaccagcaccatccaggtgttcacggactcagagtatcagctgccgtacgtgctcgggtcggctcaccagggctgcctccctccgttcccagcggacgtgttcatgattcctcagtacgggtatctgacactcaacaacggcagtcaggcagtgggacggtcatccttctactgcctggaatattttccatcgcagatgctgagaaccggcaacaactttccgttcagttacaccttcgaggacgtgcctttccacagcagctacgcgcacagccagagcctggaccggctgatgaatcctctgattgaccagtacctgtactacttgtctcggactcaaacaacaggaggcacggcaaatacgcagactctgggcttcagccaaggtgggcctaatacaatggccaatcaggcaaagaactggctgccaggaccctgttaccgccaacaacgcgtctcaacgacaaccgggcaaaacaacaatagcaactttgcctggactgctgggaccaaataccatctgaatggaagaaattcattggctaatcctggcatcgctatggcaacacacaaagacgacaaggagcgtttttttcccagtaacgggatcctgatttttggcaaacaaaatgctgccagagacaatgcggattacagcgatgtcatgctcaccagcgaggaagaaatcaaaaccactaaccctgtggctacagaggaatacggtatcgtggcagataacttgcagcagcaaaacacggctcctcaaattggaactgtcaacagccagggggccttacccggtatggtctggcagaaccgggacgtgtacctgcagggtcccatctgggccaagattcctcacacggacggcaacttccacccgtctccgctgatgggcggctttggcctgaaacatcctccgcctcagatcctgatcaagaacacgcctgtacctgcggatcctccgaccaccttcaaccagtcaaagctgaactctttcatcacgcaatacagcaccggacaggtcagcgtggaaattgaatgggagctgcagaaggaaaacagcaagcgctggaaccccgagatccagtacacctccaactactacaaatctacaagtgtggactttgctgttaatacagaaggcgtgtactctgaaccccaccccattggcacccgttacctcacccgtcccctgtaa

SEQ ID NO: 1994 - DNA, 2211 bp, Artificial Sequence
  Description of Artificial Sequence: Synthetic polynucleotide
atggctgccgatggttatcttccagattggctcgaggacaacctctctgagggcattcgcgagtggtgggcgctgaaacctggagccccgaagcccaaagccaaccagcaaaagcaggacgacggccggggtctggtgcttcctggctacaagtacctcggacccttcaacggactcgacaagggggagcccgtcaacgcggcggacgcagcggccctcgagcacgacaaggcctacgaccagcagctcaaagcgggtgacaatccgtacctgcggtataaccacgccgacgccgagtttcaggagcgtctgcaagaagatacgtcttttgggggcaacctcgggcgagcagtcttccaggccaagaagcgggttctcgaacctctcggtctggttgaggaaggcgctaagacggctcctggaaagaaacgtccggtagaacagtcgccacaagagccagactcctcctcgggcatcggcaagacaggccagcagcccgctaaaaagagactcaattttggtcagactggcgactcagagtcagtccccgatccacaacctctcggagaacctccagcaacccccgctgctgtgggacctactacaatggcttcaggcggtggcgcaccaatggcagacaataacgaaggcgccgacggagtgggtagttcctcgggaaattggcattgcgattcccaatggctgggggacagagtcatcaccaccagcacccgaacctgggccctgcccacctacaacaaccacctctacaagcaaatctccagtgcttcaacgggggccagcaacgacaaccactacttcggctacagcaccccctgggggtattttgatttcaacagattccactgccatttctcaccacgtgactggcagcgactcatcaacaacaactggggattccggcctaagcgactcaacttcaagctcttcaacattcaggtcaaagaggttacggacaacaatggagtcaagaccatcgccaataaccttaccagcacggtccaggtcttcacggactcggagtaccagttgccgtacgtcctcggctctgcgcaccaggactgcctccctccgttcccggcggacgtgttcatgattccgcagtacggctacctaacgctcaacaatggcagccaggcagtgggacggtcatccttttactgcctggaatatttcccatcgcagatgctgagaacgggcaacaactttaccttcagctacacctttgaggacgttcctttccacagcagctacgctcacagccagagtctggaccgtctcatgaatcctctgattgaccagtacctgtactacttgtctcggactcaaacaacaggaggcacggcaaatacgcagactctgggcttcagccaaggtgggcctaatacaatggccaatcaggcaaagaactggctgccaggaccctgttaccgccaacaacgcgtctcaacgacaaccggacaaaacaacaatagcaactttgcctggactgctgggaccaaataccatctgaatggaagaaattcattggctaatcctggcatcgctatggcaacacacaaagacgacaaggagcgtttttttcccagtaacgggatcctgatttttggcaaacaaaatgctgccagagacaatgcggattacagcgatgtcatgctcaccagcgaggaagaaatcaaaaccactaaccctgtggctacagaggaatacggtatcgtggcagataacttgcagcagcaaaacacggctcctcaaattggaactgtcaacagccagggggccttacccggtatggtctggcagaaccgggacgtgtacctgcagggtcccatctgggccaagattcctcacacggacggcaacttccacccgtctccgctgatgggcggctttggcctgaaacatcctccgcctcagatcctgatcaagaacacgcctgtacctgcggatcctccgaccaccttcaaccagtcaaagctgaactctttcatcacgcaatacagcaccggacaggtcagcgtggaaattgaatgggagctgcagaaggaaaacagcaagcgctggaaccccgagatccagtacacctccaactactacaaatctacaagtgtggactttgctgttaatacagaaggcgtgtactctgaaccccaccccattggcacccgttacctcacccgtcccctgtaa

SEQ ID NO: 1995 - DNA, 2211 bp, Artificial Sequence
  Description of Artificial Sequence: Synthetic polynucleotide
atggctgccgatggttatcttccagattggctcgaggacaacctctctgagggcattcgcgagtggtgggacttgaaacctggagccccgaagcccaaagccaaccagcaaaagcaggacgacggccggggtctggtgcttcctggctacaagtacctcggacccttcaacggactcgacaagggggagcccgtcaacgcggcggacgcagcggccctcgagcacgacaaggcctacgaccagcagctcaaagcgggtgacaatccgtacctgcggtataaccacgccgacgccgagtttcaggagcgtctgcaagaagatacgtcttttgggggcaacctcgggcgagcagtcttccaggccaagaagcgggttctcgaacctctcggtctggttgaggaaggcgctaagacggctcctggaaagaaacgtccggtagagcagtcaccacaagagccagactcctcctcgggcatcggcaagacaggccagcagcccgctaaaaagagactcaattttggtcagactggcgactcagagtcagtccccgacccacaacctctcggagaacctccagcaacccccgctgctgtgggacctactacaatggcttcaggcggtggcgcaccaatggcagacaataacgaaggtgccgacggagtgggtaatgcctcaggaaattggcattgcgattccacatggctgggcgactgagtcatcaccaccagcacccgcacctgggccttgcccacctacaataaccacctctacaagcaaatctccagtgcttcaacgggggccagcaacgacaaccactacttcggctacagcaccccctgggggtattttgatttcaacagattccactgccacttttcaccacgtgactggcagcgactcatcaacaacaattggggattccggcccaagagactcaacttcaaactcttcaacatccaagtcaaggaggtcacgcagaatgaaggcaccaagaccatcgccaataacctcaccagcaccatccaggtgtttacggactcggagtaccagctgccgtacgttctcggctctgcccaccagggctgcctgcctccgttcccggcggacgtgttcatgattccccagtacggctacctaacgctcaacaatggcagccaggcagtgggacggtcatccttttactgcctggaatactttccttcgcagatgctgagaaccggcaacaacttccagtttacttacaccttcgaggacgtgcctttccacagcagctacgcccacagccagagcttggaccggctgatgaatcctctgattgaccagtacctgtactacttgtctcggactcaaacaacaggaggcacggcaaatacgcagactctgggcttcagccaaggtgggcctaatacaatggccaatcaggcaaagaactggctgccaggaccctgttaccgccaacaacgcgtctcaacgacaaccgggcaaaacaacaatagcaactttgcctggactgctgggaccaaataccatctgaatggaagaaattcattggctaatcctggcatcgctatggcaacacacaaagacgacaaggagcgtttttttcccagtaacgggatcctgatttttggcaaacaaaatgctgccagagacaatgcggattacagcgatgtcatactcaccagcgaggaagaaatcaaaaccactaaccctgtggctacagaggaatacggtatcgtggcagataacttgcagcagcaaaacacggctcctcaaattggaactgtcaacagccagggggccttacccggtatggtctggcagaaccgggacgtgtacctgcagggtcccatctgggccaagattcctcacacggacggcaacttccacccgtctccgctgatgggcggctttggcctgaaacatcctccgcctcagatcctgatcaagaacacgcctgtacctgcggatcctccgaccaccttcaaccagtcaaagctgaactctttcatcacgcaatacagcaccggacaggtcagcgtggaaattgaatgggagctgcagaaggaaaacagcaagcgctggaaccccgagatccagtacacctccaactactacaaatctacaagtgtggactttgctgttaatacagaaggcgtgtactctgaaccccaccccattggcacccgttacctcacccgtcccctgtaa

SEQ ID NO: 1996 - DNA, 2211 bp, Artificial Sequence
  Description of Artificial Sequence: Synthetic polynucleotide
atggctgccgatggttatcttccagattggctcgaggacactctctctgaaggaataagacagtggtggaagctcaaacctggcccaccaccaccaaagcccgcagagcggcataaggacgacagcaggggtcttgtgcttcctgggtacaagtacctcggacccttcaacggactcgacaagggagagccggtcaacgaggcagacgccgcggccctcgagcacgacaaagcctacgaccggcagctcgacagcggagacaacccgtacctcaagtacaaccacgccgacgcggagtttcaggagcgccttaaagaagatacgtcttttgggggcaacctcgggcgagcagtcttccaggccaagaagagggttctcgaaccttttggtctggttgaggaaggtgctaagacggctcctggaaagaaacgtccggtagagcagtcgccacaagagccagactcctcctcgggcattggcaagacaggccagcagcccgctaaaaagagactcaattttggtcagactggcgactcagagtcagtccccgacccacaacctctcggagaacctccagcaacccccgctgctgtgggacctactacaatggcttcaggcggtggcgcaccaatggcagacaataacgaaggcgccgacggagtgggtaatgcctcaggaaattggcattgcgattccacatggctgggcgacagagtcatcaccaccagcacccgaacatgggccttgcccacctataacaaccacctctacaagcaaatctccagtacttcaacgggggccagtaacgacaaccactacttcggctacagcaccccctgggggtattttgacttcaacagattccactgccacttctcaccacgtgactggcagcgactcatcaacaacaactggggattccggcctaagcgactcaacttcaagctcttcaacattcaggtcaaagaggttacggacaacaatggagtcaagaccatcgccaataaccttaccagcacggtccaggtcttcacggactcggagtaccagttgccgtacgtcctcggctctgcgcaccagggctgcctgcctccgttcccggcggacgtgttcatgattccgcagtacggctacctaacgctcaacaatggcagccaggcagtgggacggtcatccttttactgcctggaatatttcccatcgcagatgctgagaacgggcaacaactttaccttcagctacacttttgaggacgttcctttccacagcagctacgctcacagccagagtctggaccgtctcatgaatcctctgattgaccagtacctgtactacttgtctcggactcaaacaacaggaggcacggcaaatacgcagactctgggcttcagccaaggtgggcctaatacaatggccaatcaggcaaagaactggctgccaggaccctgttaccgccaacaacgcgtctcaacgacaaccggacaaaacaacaatagcaactttgcctggactgctgggaccaaataccatctgaatggaagaaattcattggctaatcctggcatcgctatggcaacacacaaagacgacaaggagcgtttttttcccagtaacgggatcctgatttttggcaaacaaaatgctgccagagacaatgcggattacagcgatgtcatgctcaccagcgaggaagaaatcaaaaccactaaccctgtggctacagaggaatacggtatcgtggcagataacttgcagcagcaaaacacggctcctcaaattggaactgtcaacagccagggggccttacccggtatggtctggcagaaccgggacgtgtacctgcagggtcccatctgggccaagattcctcacacggacggcaacttccacccgtctccgctgatgggcggctttggcctgaaacatcctccgcctcagatcctgatcaagaacacgcctgtacctgcggatcctccgaccaccttcaaccagtcaaagctgaactctttcatcacgcaatacagcaccggacaggtcagcgtggaaattgaatgggagctgcagaaggaaaacagcaagcgctggaaccccgagatccagtacacctccaactactacaaatctacaagtgtggactttgctgttaatacagaaggcgtgtactctgaaccccaccccattggcacccgttacctcacccgtcccctgtaa

SEQ ID NO: 1997 - DNA, 2208 bp, Artificial Sequence
  Description of Artificial Sequence: Synthetic polynucleotide
atggctgccgatggttatcttccagattggctcgaggacaacctctctgagggcattcgcgagtggtgggacttgaaacctggagccccgaagcccaaagccaaccagcaaaagcaggacgacggccggggtctggtgcttcctggctacaagtacctcggacccttcaacggactcgacaagggggagcccgtcaacgcggcggatgcagcggccctcgagcacgacaaggcctacgaccggcagctcgacagcggagacaacccgtacctgcggtataaccacgccgacgcggagtttcaggagcgccttaaagaagatacgtcttttgggggcaacctcgggcgagcagtcttccaggccaagaagagggttctcgaaccttttggtctggttgaggaaggtgctaagacggctcctggaaagaaacgtccggtagagcagtcgccacaagagccagactcctcctcgggcattggcaagacaggccagcagcccgctaaaaagagactcaattttggtcagactggcgactcagagtcagtccccgacccacaacctctcggagaacctccagcaacccccgctgctgtgggacctactacaatggcttcaggcggtggcgcaccaatggcagacaataacgaaggcgccgacggagtgggtaatgcctcaggaaattggcattgcgattccacatggctgggcgacagagtcatcaccaccagcacccgcacctgggccttgcccacctacaataaccacctctacaagcaaatctccagtgcttcaacgggggccagcaacgacaaccactacttcggctacagcaccccctgggggtattttgactttaacagattccactgccacttttcaccacgtgactggcaaagactcatcaacaacaactggggattccggcccaagagactcaacttcaagctcttcaacatccaggtcaaggaggtcacgcagaatgaaggcaccaagaccatcgccaataaccttaccagcacgattcaggtctttacggactcggaataccagctcccgtacgtcctcggctctgcgcaccagggctgcctccctccgttcccggcggacgtgttcatgattccgcagtacggctacctaacactcaacaacggtagtcaggccgtgggacgctcctccttctactgcctggaatactttccttcgcagatgctgagaaccggcaacaacttccagtttacttacaccttcgaggacgtgcctttccacagcagctacgcccacagccagagcttggaccggctgatgaatcctctgattgaccagtacctgtactacttgtctcggactcaaacaacaggaggcacggcaaatacgcagactctgggcttcagccaaggtgggcctaatacaatggccaatcaggcaaagaactggctgccaggaccctgttaccgccaacaacgcgtctcaacgacaaccgggcaaaacaacaatagcaactttgcctggactgctgggaccaaataccatctgaatggaagaaattcactggctaatcctggcatcgctatggcaacacacaaagacgacaggagcgtttttttccagtaccgggatcctgattttggcaaacaaaatgctgccagagacaatgcggattacagcgatgtcatgctcaccagcgaggaagaaatcaaaaccactaaccctgtggctacagaggaatacggtatcgtggcagataacttgcagcagcaaaacacggctcctcaaattggaactgtcaacagccagggggccttacccggtatggtctggcagaaccgggacgtgtacctgcagggtcccatctgggccaagattcctcacacggacggcaacttccacccgtctccgctgatgggcggctttggcctgaaacatcctccgcctcagatcctgatcaagaacacgcctgtacctgcggatcctccgaccaccttcaaccagtcaaagctgaactctttcatcacgcaatacagcaccggacaggtcagcgtggaaattgaatgggagctgcagaaggaaaacagcaagcgctggaaccccgagatccagtacacctccaactactacaaatctacaagtgtggactttgctgttaatacagaaggcgtgtactctgaaccccaccccattggcacccgttacctcacccgtcccctgtaa

SEQ ID NO: 1998 - DNA, 2211 bp, Artificial Sequence
  Description of Artificial Sequence: Synthetic polynucleotide
atggctgccgatggttatcttccagattggctcgaggacaacctctctgagggcattcgcgagtggtgggcgctgaaacctggagccccgaagcccaaagccaaccagcaaaagcaggacgacggccggggtctggtgcttcctggctacaagtacctcggacccttcaacggactcgacaagggggagcccgtcaacgcggcggatgcagcagccctcgaacacgacaaagcttacgaccagcagctcaaggccggtgacaacccctacctcaagtataaccacgccgacgccgagtttcaggagcgtcttcaaggagatacgtcttttgggggcaacctcggacgagcagtcttccaggccaagaagcgggttctcgaacctcttggtctggttgaggaagcggctaagacggctcctggaaagaagaggcctgtagagcagtctcctcaggaaccggactcctccgcgggtattggcaaatcgggtgcacagcccgctaaaaagagactcaatttcggtcagactggcgacacagagtcagtcccagaccctcaacctctcggagaacctccagcagcgccctctggtgtgggacctaatacaatggctgcaggcggtggcgcaccaatggcagacaataacgaaggtgccgatggagtgggtagttcctcgggaaattggcattgcgattcccaatggctgggggacagagtcatcaccaccagcacccgaacctgggccctgcccacctacaacaaccacctctacaagcaaatctccagtgcttcaacgggggccagcaacgacaaccactacttcggctacagcaccccttgggggtattttgacttcaacagattccactgccacttttcaccacgtgactggcagcgactcatcaacaacaactggggattccggcctaagcgactcaacttcaagctcttcaacattcaggtcaaagaggttacggacaacaatggagtcaagaccatcgccaataaccttaccagcacggtccaggtcttcacggactcagactatcagctcccgtacgtgctcgggtcggctcacgagggctgcctccctccgttcccggcggacgtgttcatgattccgcagtacggctacctaacgctcaacaatggcagccaggcagtgggacggtcatccttttactgcctggaatactttccttcgcagatgctgagaaccggcaacaacttccagtttacttacaccttcgaggacgtgcctttccacagcagctacgctcacagccagagtctggaccgtctcatgaatcctctgattgaccagtacctgtactacttgtctcggactcaaacaacaggaggcacggcaaatacgcagactctgggcttcagccaaggtgggcctaatacaatggccaatcaggcaaagaactggctgccaggaccctgttaccgccaacaacgcgtctcaacgacaaccgggcaaaacaacaatagcaactttgcctggactgctgggaccaaataccatctgaatggaagaaattcattggctaatcctggcatcgctatggcaacacacaaagacgacaaggagcgtttttttcccagtaacgggatcctgatttttggcaaacaaaatgctgccagagacaatgcggattacagcgatgtcatgctcaccagcgaggaagaaatcaaaaccactaaccctgtggctacagaggaatacggtatcgtagcagataacttgcagcagcaaaacacggctcctcaaattggaactgtcaacagccagggggccttacccggtatggtctggcagaaccgggacgtgtacctgcagggtcccatctgggccaagattcctcacacggacggcaacttccacccgtctccgctgatgggcggctttggcctgaaacatcctccgcctcagatcctgatcaagaacacgcctgtacctgcggatcctccgaccaccttcaaccagtcaaagctgaactctttcatcacgcaatacagcaccggacaggtcagcgtggaaattgaatgggagctgcagaaggaaaacagcaagcgctggaaccccgagatccagtacacctccaactactacaaatctacaagtgtggactttgctgttaatacagaaggcgtgtactctgaaccccaccccattggcacccgttacctcacccgtcccctgtaa

SEQ ID NO: 1999 - DNA, 2211 bp, Artificial Sequence
  Description of Artificial Sequence: Synthetic polynucleotide
atggctgccgatggttatcttccagattggctcgaggacactctctctgaaggaataagacagtggtggaagctcaaacctggcccaccaccaccaaagcccgcagagcggcataaggacgacagcaggggtcttgtgcttcctgggtacaagtacctcggacccttcaacggactcgacaagggagagccggtcaacgaggcagacgccgcggccctcgagcacgacaaagcctacgaccggcagctcgacagcggagacaacccgtacctcaagtacaaccacgccgacgcggagtttcaggagcgccttaaagaagatacgtcttttgggggcaacctcgggcgagcagtcttccaggccaagaagagggttctcgaaccttttggtctggttgaggaagcggctaagacggctcctggaaagaaacgtccggtagagcagtcgccacaagagccagactcctcctcgggcattggcaagacaggccagcagcccgctaaaaagagactcaattttggtcagactggcgactcagagtcagtccccgacccacaacctctcggagaacctccagcaacccccgctgctgtgggacctactacaatggcttcaggcggtggcgcaccaatggcagacaataacgaaggcgccgacggagtgggtaatgcctcaggaaattggcattgcgattccacatggctgggcgacagagtcatcaccaccagcacccgaacatgggccttgcccacctataacaaccacctctacaagcaaatctccagtgcttcaacgggggccagcaacgacaaccactacttcggctacagcaccccctgggggtattttgacttcaacagattccactgccacttctcaccacgtgactggcagcgactcatcaacaacaactggggattccggcctaagcgactcaacttcaagctcttcaacattcaggtcaaagaggttacggacaacaatggagtcaagaccatcgccaataaccttaccagcacggtccaggtcttcacggactcagactatcagctcccgtacgtgctcgggtcggctcacgagggctgcctcccgccgttcccagcggacgttttcatgattcctcagtacggctacctaacactcaacaacggtagtcaggccgtgggacgctcctccttctactgcctggaatactttccttcgcagatgctgagaacgggcaacaactttaccttcagctacacctttgaggacgttcctttccacagcagctacgctcacagccagagtctggaccgtctcatgaatcctctgattgaccagtacctgtactacttgtctcggactcaaacaacaggaggcacggcaaatacgcagactctgggcttcagccaaggtgggcctaatacaatggccaatcaggcaaagaactggctgccaggaccctgttaccgccaacaacgcgtctcaacgacaaccgggcaaaacaacaatagcaactttgcctggactgctgggacaaaataccatctgaatggaagaaattcattggctaatcctggcatcgctatggcaacacacaaagacgacaaggagcgtttttttcccagtaacgggattctgatttttggcaaacaaaatgctgccagagacaatgcggattacagcgatgtcatgctcaccagcgaggaagaaatcaaaaccactaaccctgtggctacagaggaatacggtatcgtggcagataacttgcagcagcaaaacacggctcctcaaattggaactgtcaacagccagggggccttacccggtatggtctggcagaaccgggacgtgtacctgcagggtcccatctgggccaagattcctcacacggacggcaacttccacccgtctccgctgatgggcggctttggacttaagcacccgcctcctcagatcctcatcaaaaacacgcctgttcctgcggatcctccgaccaccttcaaccagtcaaagctgaactctttcatcacgcaatacagcaccggacaggtcagcgtggaaattgaatgggagctgcagaaggaaaacagcaagcgctggaaccccgagatccagtacacctccaactactacaaatctacaagtgtggactttgctgttaatacagaaggcgtgtactctgaaccccaccccattggcacccgttacctcacccgtcccctgtaa

SEQ ID NO: 2000 - DNA, 2211 bp, Artificial Sequence
  Description of Artificial Sequence: Synthetic polynucleotide
atggctgccgatggttatcttccagattggctcgaggacaacctctctgagggcattcgcgagtggtgggcgctgaaacctggagccccgaagcccaaagccaaccagcaaaagcaggacgacggccggggtctggtgcttcctggctacaagtacctcggacccttcaacggactcgacaaaggagagccggtcaacgcggcggacgcagcggccctcgagcacgacaaggcctacgaccagcagctcaaagcgggtgacaatccgtacctgcggtataaccacgccgacgccgagtttcaggagcgtctgcaagaagatacgtcttttgggggcaacctcgggcgagcagtcttccaggccaagaagcgggttctcgaacctctcggtctggttgaggaaggcgctaagacggctcctggaaagaaacgtccggtagagcagtcgccacaagagccagactcctcctcgggcatcggcaagacaggccagcagcccgctaaaaagagactcaattttggtcagactggcgactcagagtcagtccccgacccacaacctctcggagaacctccagcaacccccgctgctgtgggacctactacaatggcttcaggcggtggcgcaccaatggcagacaataacgaaggcgccgacggagtgggtagttcctcgggaaattggcattgcgattccacatggctgggcgacagagtcatcaccaccagcacccgcacctgggccttgcccacctacaataaccacctctacaagcaaatctccagtgcttcaacgggggccagcaacgacaaccactacttcggctacagcaccccctgggggtattttgacttcaacagattccactgccacttctcaccacgtgactggcagcgactcatcaacaacaactggggattccggcctaagcgactcaacttcaagctcttcaacattcaggtcaaagaggttacggacaacaatggagtcaagaccatcgccaataaccttaccagcacggtccaggtcttcacggactcggagtaccagttgccgtacgtcctcggctctgcgcaccagggctgcctccctccgttcccggcggacgtgttcatgattccgcagtacggctacctaacgctcaacaatggcagccaggcagtgggacggtcatccttttactgcctggaatatttcccatcgcagatgctgagaacgggcaacaactttaccttcagctacacctttgaggacgttcctttccacagcagctacgctcacagccagagtctggaccgtctcatgaatcctctgattgaccagtacctgtactacttgtctcggactcaaacaacaggaggcacggcaaatacgcagactctgggcttcagccaaggtgggcctaatacaatggccaatcaggcaaagaactggctgccaggaccctgttaccgccaacaacgcgtctcaacgacaaccgggcaaaacaacaatagcaactttgcctggactgctgggaccaaataccatctgaatggaagaaattcattggctaatcctggcatcgctatggcaacacacaaagacgacaaggagcgtttttttcccagtaacgggatcctgatttttggcaaacaaaatgctgccagagacaatgcggattacagcgatgtcatgctcaccagcgaggaagaaatcaaaaccactaaccctgtggctacagaggaatacggtatcgtggcagataacttgcagcagcaaaacacggctcctcaaattggaactgtcaacagccagggggccttacccggtatggtctggcagaaccgggatgtgtacctgcagggtcccatctgggccaagattcctcacacggacggcaacttccacccgtctccgctgatgggcggctttggcctgaaacatcctccgcctcagatcctgatcaagaacacgcctgtacctgcggatcctccgaccaccttcaaccagtcaaagctgaactctttcatcacgcaatacagcaccggacaggtcagcgtggaaattgaatgggagctgcagaaggaaaacagcaagcgctggaaccccgagatccagtacacctccaactactacaaatctacaagtgtggactttgctgttaatacagaaggcgtgtactctgaaccccaccccattggcacccgttacctcacccgtcccctgtaa

SEQ ID NO: 2001 - DNA, 2214 bp, Artificial Sequence
  Description of Artificial Sequence: Synthetic polynucleotide
atggctgccgatggttatcttccagattggctcgaggacaaccttagtgaaggaattcgcgagtggtgggcgctgaaacctggagccccgaagcccaaagccaaccagcaaaagcaggacgacggccggggtctggtgcttcctggctacaagtacctcggacccttcaacggactcgacaagggggagcccgtcaacgcggcggacgcagcggccctcgagcacgacaaggcctacgaccagcagctcaaagcgggtgacaatccgtacctgcggtataaccacgccgacgccgagtttcaggagcgtctgcaagaagatacgtcttttgggggcaacctcgggcgagcagtcttccaggccaagaagcgggttctcgaacctctcggtctggttgaggaaggcgctaagacggctcctggaaagaaacgtccggtagagcagtcgccacaagagccagactcctcctcgggcatcggcaagacaggccagcagcccgctaaaaagagactcaatttcggtcagactggcgacacagagtcagtcccagaccctcaaccaatcggagaacctcccgcagccccctcaggtgtgggatctcttacaatggcttcaggtggtggcgcaccagtggcagacaataacgaaggtgccgatggagtgggtagttcctcgggaaattggcattgcgattcccaatggctgggggacagagtcatcaccaccagcaccagaacctgggccttgcccacctacaataaccacctctacaagcaaatctccaacagcacatctggaggatcttcaaatgacaacgcctacttcggctacagcaccccctgggggtattttgactttaacagattccactgccacttttcaccacgtgactggcagcgactcatcaacaacaactggggattccgacccaagagactcaacttcaagctcttcaacatccaggtcaaggaggtcacgcagaacgaaggcaccaagaccatcgccaataacctcaccagcaccatccaggtgtttacggactcggagtaccagctgccgtacgttctcggctccgcccaccagggctgcctgcctccgttcccggcggacgtgttcatgattccccagtacggctacctaacgctcaacaacggtagtcaggccgtgggacgctcctccttctactgcctggaatactttccttcgcagatgctgagaaccggcaacaacttccagtttacttacaccttcgaggacgtgcctttccacagcagctacgcgcacagccagagcttggaccggctgatgaatcctctgattgaccagtacctgtactacttgtctcggactcaaacaacaggaggcacggcaaatacgcagactctgggcttcagccaaggtgggcctaatacaatggccaatcaggcaaagaactggctgccaggaccctgttaccgccaacaacgcgtctcaacgacaaccgggcaaaacaacaatagcaactttgcctggactgctgggaccaaataccatctgaatggaagaaattcattggctaatcctggcatcgctatggcaacacacaaagacgacaaggagcgtttttttcccagtaacgggatcctgatttttggcaaacaaaatgctgccagagacaatgcggattacagcgatgtcatgctcaccagcgaggaagaaatcaaaaccactaaccctgtggctacagaggaatacggtatcgtggcagataacttgcagcagcaaaacacggctcctcaaattggaactgtcaacagccagggggccttacccggtatggtctggcagaaccgggacgtgtacctgcagggtcccatctgggccaagattcctcacacggacggcaacttccacccgtctccgctgatgggcggctttggcctgaaacatcctccgcctcagatcctgatcaagaacacgcctgtacctgcggatcctccgaccaccttcaaccagtcaaagctgaactctttcatcacgcaatacagcaccggacaggtcagcgtggaaattgaatgggagctgcagaaggaaaacagcaagcgctggaaccccgagatccagtacacctccaactactacaaatctacaagtgtggactttgctgttaatacagaaggcgtgtactctgaaccccaccccattggcactcgttacctcacccgtcccctgtaa

SEQ ID NO: 2002 - DNA, 2211 bp, Artificial Sequence
  Description of Artificial Sequence: Synthetic polynucleotide
atggctgccgatggttatcttccagattggctcgaggacaacctctctgagggcattcgcgagtggtgggcgctgaaacctggagccccgaagcccaaagccaaccagcaaaagcaggacgacggccggggtctggtgcttcctggctacaagtacctcggacccttcaacggactcgacaagggggagcccgtcaacgcggcggatgcagcagccctcgaacacgacaaagcttacgaccagcagctcaaggccggtgacaacccctacctcaagtataaccacgccgacgccgagtttcaggagcgtcttcaaggagatacgtcttttgggggcaacctcggacgagcagtcttccaggccaagaagcgggttctcgaacctcttggtctggttgaggaagcggctaagacggctcctggaaagaagaggcctgtagagcagtctcctcaggaaccggactcctccgcgggtattggcaaatcgggtgcacagcccgctaaaaagagactcaatttcggtcagactggcgacacagagtcagtcccagaccctcaacctctcggagaacctccagcagcgccctctggtgtgggacctaatacaatggctgcaggcggtggcgcaccaatggcagacaataacgaaggtgccgatggagtgggtagttcctcgggaaattggcattgcgattcccaatggctgggggacagagtcatcaccaccagcacccgaacctgggccctgcccacctacaacaaccacctctacaagcaaatctccagtgcttcaacgggggccagcaacgacaaccactacttcggctacagcaccccttgggggtattttgacttcaacagattccactgccacttctcaccacgtgactggcagcgactcatcaacaacaactggggattccggcctaagcgactcaacttcaagctcttcaacattcaggtcaaagaggttacggacaacaatggagtcaagaccatcgccaataaccttaccagcacggtccaggtcttcacggactcggagtaccagttgccgtacgtcctcggctctgcgcaccagggctgcctccctccgttcccggcggacgtgttcatgattccgcagtacggctacctaacgctcaacaatggcagccaggcagtgggacggtcatccttttactgcctggaatatttcccatcgcagatgctgagaacgggcaacaactttaccttcagctacacctttgaggacgttcctttccacagcagctacgctcacagccagagtctggaccgtctcatgaatcctctgattgaccagtacctgtactacttgtctcggactcaaacaacaggaggcacggcaaatacgcagactctgggcttcagccaaggtgggcctaatacaatggccaatcaggcaaagaactggctgccaggaccctgttaccgccaacaacgcgtctcaacgacaaccgggcaaaacaacaatagcaactttgcctggactgctgggaccaaataccatctgaatggaagaaattcattggctaatcctggcatcgctatggcaacacacaaagacgacaaggagcgtttttttcccagtaacgggatcctgatttttgacaaacaaaatgctgccagagacaatgcggattacagcgatgtcatgctcaccagcgaggaagaaatcaaaaccactaaccctgtggctacagaggaatacggtatcgtggcagataacttgcagcagcaaaacacggctcctcaaattggaactgtcaacagccagggggccttacccggtatggtctggcagaaccgggatgtgtacctgcagggtcccatctgggccaagattcctcacacggacggcaacttccacccgtctccgctgatgggcggctttggcctgaaacatcctccgcctcagatcctgatcaagaacacgcctgtacctgcggatcctccgaccaccttcaaccagtcaaagctgaactctttcatcacgcaatacagcaccggacaggtcagcgtggaaattgaatgggagctgcagaaggaaaacagcaagcgctggaaccccgagatccagtacacctccaactactacaaatctacaagtgtggactttgctgttaatacagaaggcgtgtactctgaaccccaccccattggcacccgttacctcacccgtcccctgtaa

SEQ ID NO: 2003 - DNA, 2211 bp, Artificial Sequence
  Description of Artificial Sequence: Synthetic polynucleotide
atggctgccgatggttatcttccagattggctcgaggacactctctctgaaggaataagacagtggtggaagctcaaacctggcccaccaccaccaaagcccgcagagcggcataaggacgacagcaggggtcttgtgcttcctgggtacaagtacctcggacccttcaacggactcgacaagggagagccggtcaacgaggcagacgccgcggccctcgagcacgacaaagcctacgaccggcagctcgacagcggagacaacccgtacctcaagtacaaccacgccgacgcggagtttcaggagcgccttaaagaagatacgtcttttgggggcaacctcggacgagcagtcttccaggcgaaaaagagggttcttgaacctctgggcctggttgaggaacctgttaagacggctccgggaaaaaagaggccggtagagcactctcctgtggagccagactcctcctcgggaaccggaaaggcgggccagcagcctgcaagaaaaagattgaattttggtcagactggcgactcagagtcagtccccgacccacaacctctcggagaacctccagcaacccccgctgctgtgggacctaatacgatggctacaggcagtggcgcaccaatggcagacaataacgagggcgccgacggagtgggtaattcctcgggaaattggcattgcgattccacatggatgggcgacagagtcatcaccaccagcaccagaacctgggccctgcccacttacaacaaccatctctacaagcaaatctccagtgcttcaacgggggccagcaacgacaaccactacttcggctacagcaccccctgggggtattttgacttcaacagattccactgccacttctcaccacgtgactggcagcgactcatcaacaacaactggggattccggcctaagcgactcaacttcaagctcttcaacattcaggtcaaagaggttacggacaacaatggagtcaagaccatcgccaataaccttaccagcaccatccaggtctttacggactcggaataccagctgccgtacgttctcggctctgcccaccagggctgcctgcctccgttcccggcggacgtgttcatgattccccagtacggctacctaacactcaacaacggtagtcaggccgtgggacgctcctccttctactgcctggaatatttcccatcgcagatgctgagaacgggcaacaactttaccttcagctacacctttgaggacgttcctttccacagcagctacgctcacagccagagtctggaccgtctcatgaatcctctgattgaccagtacctgtactacttgtctcggactcaaacaacaggaggcaaggcaaatacgcagactctgggcttcagccaaggtgggcctaatacaatggccaatcaggcaaagaactggctgccaggaccctgttaccgccaacaacgcgtctcaacgacaaccgggcaaaacaacaatagcaactttgcctggactgctgggaccaaataccatctgaatggaagaaattcattggctaatcctggcatcgctatggcaacacacaaagacgacaaggagcgtttttttcccagtaacgggatcctgatttttggcaaacaaaatgctgccagagacaatgcggattacagcgatgtcatgctcaccagcgaggaagaaatcaaaaccactaaccctgtggctacagaggaatacggtatcgtggcagataacttgcagcagcaaaacacggctcctcaaattggaactgtcaacagccagggggccttacccggtatggtctggcagaaccgggacgtgtacctgcagggtcccatctgggccaagattcctcacacggacggcaacttccacccgtctccgctgatgggcggctttggcctgaaacatcctccgcctcagatcctgatcaagaacacgcctgtacctgcggatcctccgaccaccttcaaccagtcaaagctgaactctttcatcacgcaatacagcaccggacaggtcagcgtggaaattgaatgggagctgcagaaggaaaacagcaagcgctggaaccccgagatccagtacacctccaactactacaaatctacaagtgtggactttgctgttaatacagaaggcgtgtactctgaaccccaccccattggcacccgttacctcacccgtcccctgtaa

SEQ ID NO: 2004 - DNA, 2211 bp, Artificial Sequence
  Description of Artificial Sequence: Synthetic polynucleotide
atggctgccgatggttatcttccagattggctcgaggacaacctctctgagggcattcgcgagtggtgggcgctgaaacctggagccccgaagcccaaagccaaccagcaaaagcaggacgacggccggggtctggtgcttcctggctacaagtacctcggacccttcaacggactcgacaagggggagcccgtcaacgcggcggacgcagcggccctcgagcacgacaaggcctacgaccagcagctcaaagcgggtgacaatccgtacctgcggtataaccacgccgacgccgagtttcaggagcgtctgcaagaagatacgtcttttgggggcaacctcgggcgagcagtcttccaggccaagaagcgggttctcgaaccttttggtctggttgaggaaggtgctaagacggctcctggaaagaaacgtccggtagagcagtcgccacaagagccagactcctcctcgggcatcggcaagacaggccagcagcccgctaaaaagagactcaattttggtcagactggcgactcagagtcagtccccgacccacaacctctcggagaacctccagcaacccccgctgctgtgggacctactacaatggcttcaggcggtggcgcaccaatggcggacaataacgaaggcgccgacggagtgggtaatgcctcaggaaattggcattgcgattccacatggctgggcgacagagtcatcaccaccagcacccgcacctgggccttgcccacctacaataaccacctctacaagcaaatctccagtgcttcaacgggggccagcaacgacaaccactacttcggctacagcaccccctgggggtattttgacttcaacagattccactgccacttttcaccacgtgactggcaaagactcatcaacaacaactggggattccggcctaagcgactcaacttcaagctcttcaacattcaggtcaaagaggttacggacaacaatggagtcaagaccatcgccaataaccttaccagcacggtccaggtcttcacggactcggagtaccagttgccgtacgtcctcggctctgcgcaccagggctgcctccctccgttcccggcggacgtgttcatgattccgcagtacggctacctaacgctcaacaatggcagccaggcagtgggacggtcatccttttactgcctggaatatttcccatcgcagatgctgagaacgggcaacaactttaccttcagctacacctttgaggacgttcctttccacagcagctacgctcacagccagagtctggaccgtctcatgaatcctctgattgaccagtacctgtactacttgtctcggactcaaacaacaggaggcacgggaaatacgcagactctgggcttcagccaaggtgggcctaatacaatggccaatcaggcaaagaactggctgccaggaccctgttaccgccaacaacgcgtctcaacgacaaccgggcaaaacaacaatagcaactttgcctggactgctgggaccaaataccatctgaatggaagaaattcattggctaatcctggcatcgctatggcaacacacaaagacgacaaggagcgtttttttcccagtaacgggatcctgatttttggcaaacaaaatgctgccagagacaatgcggattacagcgatgtcatgctcaccagcgaggaagaaatcaaaaccactaaccctgtggctacagaggaatacggtatcgtggcagataacttgcagcagcaaaacacggctcctcaaattggaactgtcaacagccagggggccttacccggtatggtctggcagaaccgggacgtgtacctgcagggtcccatctgggccaagattcctcacacggacggcaacttccacccgtctccgctgatgggcggctttggcctgaaacatcctccgcctcagatcctgatcaagaacacgcctgtacctgcggatcctccgaccaccttcaaccagtcaaagctgaactctttcatcacgcaatacagcaccggacaggtcagcgtggaaattgaatgggagctgcagaaggaaaacagcaagcgctggaaccccgagatccagtacacctccaactactacaaatctacaagtgtggactttgctgttaatacagaaggcgtgtactctgaaccccaccccattggcacccgttacctcacccgtcccctgtaa

SEQ ID NO: 2005 - DNA, 2211 bp, Artificial Sequence
  Description of Artificial Sequence: Synthetic polynucleotide
atggctgccgatggttatcttccagattggctcgaggacaacctctctgagggcattcgcgagtggtgggacttgaaacctggagccccgaaacccaaagccaaccagcaaaagcaggacgacggccggggtctggtgcttcctggctacaagtacctcggacccttcaacggactcgacaagggggagcccgtcaacgcggcggacgcagcggccctcgagcacgacaaggcctacgaccagcagctcaaagcgggtgacaatccgtacctgcggtataaccacgccgacgccgagtttcaggagcgtctgcaagaagatacgtcttttgggggcaacctcgggcgagcagtcttccaggccaagaagcgggttctcgaacctctcggtctggttgaggaaggcgctaagacggctcctggaaagaagaggcctgtagagcagtcgccacaagagccagactcctcctcgggcatcggcaagacaggccagcagcccgctaaaaagagactcaattttggtcagactggcgactcagagtcagtccccgatccacaacctctcggagaacctccagcaacccccgctgctgtgggacctactacaatggcttcaggcggtggcgcaccaatggcagacaataacgaaggcgccgacggagtgggtagttcctcgggaaattggcattgcgattccacatggctgggcgacagagtcatcaccaccagcacccgaacatgggccttgcccacctataacaaccacctctacaagcaaatctccagtgcttcaacgggggccagcaacgacaaccactacttcggctacagcaccccctgggggtattttgacttcaacagattccactgccacttctcaccacgtgactggcagcgactcatcaacaacaactggggattccggcctaagcgactcaacttcaagctcttcaacatccaggtcaaggaggtcacgcagaatgaaggcaccaagaccatcgccaataacctcaccagcaccatccaggtgtttacggactcggagtaccagcttccgtacgtcctcggctctgcgcaccagggctgcctccctccgttcccggcggacgtgttcatgattccgcagtacggctacctaacgctcaacaatggcagccaggcagtgggacggtcatccttttactgcctggaatatttcccatcgcagatgctgagaacgggcaacaactttaccttcagctacacctttgaggacgttcctttccacagcagctacgcgcacagccagagcttggaccggctgatgaatcctctgattgaccagtacctgtactacttgtctcggactcaaacaacaggaggcacggcaaatacgcagactctgggcttcagccaaggtgggcctaatacaatggccaatcaggcaaagaactggctgccaggaccctgttaccgccaacaacgcgtctcaacgacaaccgggcaaaacaacaatagcaactttgcctggactgctgggaccaaataccatctgaatggaagaaattcattggctaatcctggcatcgctatggcaacacacaaagacgacaaggagcgtttttttcccagtaacgggatcctgatttttggcaaacaaaatgctgccagagacaatgcggattacagcgatgtcatgctcaccagcgaggaagaaatcaaaaccactaaccctgtggctacagaggaatacggtatcgtggcagataacttgcagcagcaaaacacggctcctcaaattggaactgtcaacagccagggggccttacccggtatggtctggcagaaccgggacgtgtacctgcagggtcccatctgggccaagattcctcacacggacggcaacttccacccgtctccgctgatgggcggctttggcctgaaacatcctccgcctcagatcctgatcaagaacacgcctgtacctgcggatcctccgaccaccttcaaccagtcaaagctgaactctttcatcacgcaatacagcaccggacaggtcagcgtggaaattgaatgggagctgcagaaggaaaacagcaagcgctggaaccccgagatccagtacacctccaactactacaaatctacaagtgtggactttgctgttaatacagaaggcgtgtactctgaaccccaccccattggcacccgttacctcacccgtcccctgtaa

SEQ ID NO: 2006 - DNA, 2211 bp, Artificial Sequence
  Description of Artificial Sequence: Synthetic polynucleotide
atggctgccgatggttatcttccagattggctcgaggacaacctctctgagggcattcgcgagtggtgggcgctgaaacctggagccccgaagcccaaagccaaccagcaaaagcaggacgacggccggggtctggtgcttcctggctacaagtacctcggacccttcaacggactcgacaagggggagcccgtcaacgcggcggatgcagcggccctcgagcacgacaaggcctacgaccagcagctcaaagcgggtgacaatccgtacctgcggtataaccacgccgacgccgagtttcaggagcgtctgcaagaagatacgtcttttgggggcaacctcgggcgagcagtcttccaggccaagaagcgggttctcgaacctctcggtctggttgaggaaggcgctaagacggctcctggaaagaaacgtccggtagagcagtcgccacaagagccagactcctcctcgggcatcggcaagacaggccagcagcccgctaaaaagagactcaattttggtcagactggcgactcagagtcagtccccgacccacaacctctcggagaacctccagcaacccccgctgctgtgggacctactacaatggctgcaggcggtggcgcaccaatggcagacaataacgaaggcgccgacggagtgggtagttcctcgggaaattggcattgcgattccacatggatgggcgacagagtcatcaccaccagcacccgaacctgggccttgcccacctataacaaccatctctacaagcaaatctccagtgcttcaacgggggccagcaacgacaaccactacttcggctacagcaccccctgggggtattttgacttcaacagattccactgccacttctcaccacgtgactggcagcgactcatcaacaacaactggggattccggcccaagagactcagcttcaagctcttcaacatccaggtcaaggaggtcacgcagaatgaaggcaccaagaccatcgccaataacctcaccagcaccatccaggtgtttacggactcggagtaccagctgccgtacgtcctcggctctgcgcaccagggctgcctccctccgttcccggcggacgtgttcatgattccgcagtacggctacctaacgctcaacaatggcagccaggcagtgggacggtcatccttttactgcctggaatatttcccatcgcagatgctgagaacgggcaacaactttaccttcagctacacctttgaggacgttcctttccacagcagctacgctcacagccagagcttggaccggctgatgaatcctctgattgaccagtacctgtactacttgtctcggactcaaacaacaggaggcacggcaaatacgcagactctgggtttcagccaaggtgggcctaatacaatggccaatcaggcaaagaactggctgcaaggaccctgttaccgccaacaacgcgtctcaacgacaaccgggcaaaacaacaatagcaactttgcctggactgctgggaccaaataccatctgaatggaagaaattcattggctaatcctggcatcgctatggcaacacacaaagacgacaaggagcgtttttttcccagtaacgggatcctgatttttggcaaacaaaatgctgccagagacaatgcggattacagcgatgtcatgctcaccagcgaggaagaaatcaaaaccactaaccctgtggctacagaggaatacggtatcgtggcagataacttgcagcagcaaaacacggctcctcaaattggaactgtcaacagccagggggccttacccggtatggtctggcagaacctggacgtgtacctgcagggtcccatctgggccaagattcctcacacggacggcaacttccacccgtctccgctgatgggcggctttggcctgaaacatcctccgcctcagatcctgatcaagaacacgcctgtacctgcggatcctccgaccaccttcaaccagtcaaagctgaactctttcatcacgcaatacagcaccggacaggtcagcgtggaaattgaatgggagctgcagaaggaaaacagcaagcgctggaaccccgagatccagtacacctccaactactacaaatctacaagtgtggactttgctgttaatacagaaggcgtgtactctgaaccccaccccattggcacccgttacctcacccgtcccctgtaa

SEQ ID NO: 2007 - DNA, 2214 bp, Artificial Sequence
  Description of Artificial Sequence: Synthetic polynucleotide
atggctgccgatggttatcttccagattggctcgaggacaacctctctgagggcattcgcgagtggtgggcgctgaaacctggagccccgaagcccaaagccaaccagcaaaagcaggacgacggccggggtctggtgcttcctggctacaagtacctcggacccttcaacggactcgacaagggagagcccgtcaacgcggcggacgcagcggccctcgagcacgacaaggcctacgaccagcagctcaaagcgggtgacaatccgtacctgcggtataaccacgccgacgccgagtttcaggagcgtctgcaagaagatacgtcttttgggggcaacctcgggcgagcagtcttccaggccaagaagcgggttctcgaacctctcggtctggttgaggaaggcgctaagacggctcctggaaagaagagaccggtagagccatcaccccagcgttctccagactcctcctcgggcatcggcaagacaggccagcagcccgctaaaaagagactcaattttggtcagactggcgactcagagtcagtccccgacccacaacctctcggagaacctccagcaacccccgctgctgtgggacctactacaatggcttcaggtggtggcgcaccaatggcagacaataacgaaggcgccgacggagtgggtaatgcctcaggaaattggcattgcgattcccaatggctgggcgacagagtcatcaccaccagcacccgaacatgggccttgcccacctataacaaccacctctacaagcaaatctccagtgcttcaacgggggccagcaacgacaaccactacttcggctacagcaccccctgggggtattttgacttcaacagattccactgccacttttcaccacgtgactggcagcgactcatcaacaacaactggggattccggcctaagcgactcaacttcaagctcttcaacattcaggtcaaagaggttacggacaacaatggagtcaagaccatcgccaataaccttaccagcacggtccaggtcttcacggactcagactatcagctcccgtacgtgctcgggtcggctcacgagggctgcctcccgccgttcccagcggacgttttcatgattccccagtacggctacctaacactcaacaacggtagtcaggccgtgggacgctcctccttctactgcctggaatactttccttcgcagatgctgagaaccggcaacaacttccagtttacttacaccttcgaggacgtgcctttccacagcagctacgctcacagccagagcttggaccggctgatgaatcctctgattgaccagtacctgtactacttgtctcggactcaaacaacaggaggcacggcaaatacgcagactttgggcttcagccaaggtgggcctaatacaatggccaatcaggcaaagaactgggtgccaggaccctgttaccgccaacaacgggtttcaacggcaaccgggcaaaacaacaatagcaactttgcctggactgctgggaccaaataccatctgaaaggaagaaattcattggctaatcctggcatcgctatggcaacacacaaagacgacaaggagcgtttttttcccagtaacgggatcctgatttttggcaaacaaaatgctgccagagacaatgcggattacagcgatgtcatgctcaccagcgaggaagaaatcaaaaccactaaccctgtggctacagaggaatacggtatcgtggcagataacttgcagcagcaaaacacggctcctcaaattggaactgtcaacagccagggggccttacccggtatggtctggcagaaccgggacgtgtacctgcagggtcccatctgggccaagattcctcacacggacggcaacttccacccgtctccgctgatgggcggctttggcctgaaacatcctccgcctcagatcctgatcaagaacacgcctgtacctgcggatcctccgaccaccttcaaccagtcaaagctgaactctttcatcacgcaatacagcaccggacaggtcagcgtggaaattgaatgggagctgcagaaggaaaacagcaaacgctggaacccagagattcaatacacttccaactactacaaatctacaagtgtggactttgctgttaatacagaaggcgtgtactctgaaccccaccccattggcacccgttacctcacccgtcccctgtaa

SEQ ID NO: 2008 - DNA, 2214 bp, Artificial Sequence
  Description of Artificial Sequence: Synthetic polynucleotide
  misc_feature (676)..(676): n is a, c, g, or t
  misc_feature (697)..(697): n is a, c, g, or t
  misc_feature (715)..(715): n is a, c, g, or t
  misc_feature (748)..(748): n is a, c, g, or t
  misc_feature (750)..(750): n is a, c, g, or t
  misc_feature (757)..(757): n is a, c, g, or t
  misc_feature (763)..(763): n is a, c, g, or t
atggctgccgatggttatcttccagattggctcgaggacactctctctgaaggaataagacagtggtggaagctcaaacctggcccaccaccaccaaagcccgcagagcggcataaggacgacagcaggggtcttgtgcttcctgggtacaagtacctcggacccttcaacggactcgacaagggagagccggtcaacgaggcagacgccgcggccctcgagcacgacaaagcctacgaccggcagctcgacagcggagacaacccgtacctcaagtacaaccacgccgacgcggagtttcaggagcgccttaaagaagatacgtcttttgggggcaacctcggacgagcagtcttccaggcgaaaaagagggttcttgaacctctcggtctggttgaggaaggcgctaagacggctcctggaaagaaacgtccggtagagcagtcgccacaagagccagactcctcctcgggcatcggcaagacaggccagcagcccgctaaaaagagactcaattttggtcagactggcgactcagagtcagtccccgacccacaacctctcggagaacctccagcaacgccctctggtgtgggacctaatacaatggctgcaggcggtggcgctccaatggcagacaataacgaaggcgccgacggagtgggtagttcctcangaaattggcattgcgattccncatggctgggcgacagantcatcaccaccagcacccgaacctgggccctgncnacctacnacaacnacctctacaagcaaatctccaacagcacatctggaggagccaccaacgacaacacctacttcggctacagcaccccctgggggtattttgactttaacagattccactgccacttttcaccacgtgactggcagcgactcatcaacaacaactggggattccggcctaagcgactcaacttcaagctcttcaacatccaggtcaaggaggtcacgcagaatgaaggcaccaagaccatcgccaataacctcaccagcaccatccaggtgtttacggactcggagtaccagctgccgtacgttctcggctctgcccaccagggctgcctgcctccgttcccggcggacgtgttcatgattccccagtacggctacctaacactcaacaacggtagtcaggccgtgggacgctcctccttctactgcctggaatactttccttcgcagatgctgagaaccggcaacaacttccagtttacttacaccttcgaggacgtgcctttccacagcagctacgcccacagccagagcttggaccggctgatgaatcctctgattgaccagtacctgtactacttgtctcggactcaaacaacaggaggcacggcaaatacgcagactctgggcttcagccaaggtgggcctaatacaatggccaatcaggcaaagaactggctgccaggaccctgttaccgccaacaacgcgtctcaacgacaaccgggcaaaacaacaatagcaactttgcctggactgctgggaccaaataccatctgaatggaagaaattcattggctaatcctggcatcgctatggcaacacacaaagacgacaaggagcgtttttttcccagtaacgggatcctgatttttggcaaacaaaatgctgccagagacaatgcggattacagcgatgtcatgctcaccagcgaggaagaaatcaaaaccactaaccctgtggctacagaggaatacggtatcgtggcagataacttgcagcagcaaaacacggctcctcaaattggaactgtcaacagccagggggccttacccggtatggtttggcagaaccgggacgtgtacctgcagggtcctatctgggccaagattcctcacacggacggaaactttcatccctcgccgctgatgggaggctttggactgaaacacccgcctcctcagatcctgattaagaatacacctgttcccgcggatcctccaactaccttcagtcaagctaagctggcgtcgttcatcacgcaatacagcacaggacaagtgagtgtggaaattgaatgggagctgcagaaagaaaacagcaagcgctggaatcccgaagtgcagtacacatccaattatgcaaaatctgccaacgttgattttactgtggacaacaatggactttatactgagcctcgccccattggcacccgttaccttacccgtcccctgtaa

SEQ ID NO: 2009 - DNA, 2214 bp, Artificial Sequence
  Description of Artificial Sequence: Synthetic polynucleotide
atggctgccgatggttatcttccagattggctcgaggacaacctctctgagggcattcgcgagtggtgggacttgaaacctggagccccgaagcccaaagccaaccagcaaaagcaggacgacggccggggtctggtgcttcctggctacaagtacctcggacccttcaacggactcgacaagggggagcccgtcaacgcggcggacgcagcggccctcgagcacgacaaggcctacgaccagcagctcaaagcgggtgacaatccgtacctgcggtataaccacgccgacgccgagtttcaggagcgtctgcaagaagatacgtcttttgggggcaacctcgggcgagcagtcttccaggccaagaagcgggttctcgaacctctcggtctggttgaggaaggcgctaagacggctcctggaaagaagagaccggtagagccatcaccccagcgttctccagactcctctacgggcatcggcaagaaaggccagcagcccgcgaaaaagagactcaactttgggcagactggcgactcagagtcagtgcccgaccctcaaccaatcggagaaccccccgcaggcccctctggtgtgggatctcttacaatggcttcaggtggtggcgcaccagtggcagacaataacgaaggtgccgatggagtgggtagttcctcgggaaattggcattgcgattcccaatggctgggggacagagtcatcaccaccagcacccgaacatgggccttgcccacctataacaaccacctctacaagcaaatctccagtgcttcaacgggggccagcaacgacaaccactacttcggctacagcaccccctgggggtattttgactttaacagattccactgccacttctcaccacgtgactggcagcgactcatcaacaacaactggggattccggcccaagagactcaacttcaagctcttcaacatccaggtcaaggaggtcacggacaatgatggagtcaagaccatcgccaataaccttaccagcacgattcaggtctttacggactcggaataccagttgccgtacgtcctcggctctgcgcaccagggctgcctgcctccgttcccggcggacgtgttcatgattccgcagtacggctacctaacgctcaacaatggcagccaggcagtgggacggtcatccttttactgcctggaatatttcccatcgcagatgctgagaacgggcaacaactttaccttcagctacacttttgaggacgttcctttccacagcagctacgctcacagccagagtctggaccgtctcatgaatcctctgattgaccagtacctgtactacttgtctcggactcaaacaacaggaggcacggcaaatacgcagactctgggcttcagccaaggtgggcctaatacaatggccaatcacgcaaagaactggctgccaggaccctgttaccgccaacaacgcgtctcaacgacaaccggacaaaacaacaatagcaactttgcctggactgctgggaccaaataccatctgaatggaagaaattcattggctaatcctggcatcgctatggcaacacacaaagacgacaaggagcgtttttttcccagtaacgggatcctgatttttggcaaacaaaatgctgccagagacaatgcggattacagcgatgtcatgctcaccagcgaggaagaaatcaaaaccactaaccctgtggctacagaggaatacggtatcgtggcagataacttgcagcagcaaaacacggctcctcaaattggaactgtcaacagccagggggccttacccggtatggtctggcagaaccgggacgtgtacctgcagggtcccatctgggccaagattcctcacacggacggcaacttccacccgtctccgctgatgggcggctttggcctgaaacatcctccgcctcagatcctgatcaagaacacgcctgtacctgcggatcctccgaccaccttcaaccagtcaaagctgaactctttcatcacgcaatacagcaccggacaggtcagcgtggaaattgaatgggagctgcagaaggaaaacagcaagcgctggaaccccgagatccagtacacctccaactactacaaatctacaagtgtggactttgctgttaatacagaaggcgtgtactctgaaccccaccccattggcacccgttacctcacccgtcccctgtaa

SEQ ID NO: 2010 - DNA, 2211 bp, Artificial Sequence
  Description of Artificial Sequence: Synthetic polynucleotide
atggctgccgatggttatcttccagattggctcgaggacactctctctgaaggaataagacagtggtggaagctcaaacctggcccaccaccaccaaagcccgcagagcggcacaaggacgacagcaggggtcttgtgcttcctgggtacaagtacctcggacccttcaacggactcgacaagggagagccggtcaacgaggcagacgccgcggccctcgagcacgacaaagcctacgaccggcagctcgacagcggagacaacccgtacctcaagtacaaccacgccgacgcggagtttcaggagcgccttaaagaagatacgtcttttgggggcaacctcggacgagcagtcttccaggcgaaaaagagggttcttgaacctctgggcctggttgaggaacctgttaagacggctccgggaaaaaagaggccggtagagcactctcctgtggagccagactcctcctcgggaaccggaaaggcgggccagcagcctgctaaaaagagactcaattttggtcagactggcgactcagagtcagtccccgacccacaacctctcggagaacctccagcaacccccgctgctgtgggacctactacaatggcttcaggtggtggcgcaccaatggcagacaataacgaaggcgccgacggagtgggtaatgcctcaggaaattggcattgcgattccacatggctgggcgacagagtcatcaccaccagcacccgcacctgggccttgcccacctacaataaccacctctacaagcaaatctccagtgcttcaacgggggccagcaacgacaaccactacttcggctacagcaccccctgggggtattttgacttcaacagattccactgccacttctcaccacgtgactggcagcgactcatcaacaacaactggggattccggcccaagagactcaacttcaaactcttcaacatccaagtcaaggaggtcacgcagaatgaaggcaccaagaccatcgccaataacctcaccagcaccatccaggtgtttacggactcggagtaccagctgccgtacgttctcggctctgcccaccagggctgcctgcctccgttcccggcggacgtgttcatgattccccagtacggctacctaacactcaacaacggtagtcaggccgtgggacgctcctccttctactgcctggaatactttccttcgcagatgctgagaaccggcaacaacttccagtttacttacaccttcgaggacgtgcctttccacagcagctacgcgcacagccagagcttggaccggctgatgaatcctctgattgaccagtacctgtactacttgtctcggactcaaacaacaggaggcacggcaaatacgcagactctgggcttcagccaaggtgggcctaatacaatggccaatcaggcaaagaactggctgccaggaccctgttaccgccaacaacgcgtctcaacgacaaccgggcaaaacaacaatagcaactttgcctggactgctgggaccaaataccatctgaatggaagaaattcattggctaatcctggcatcgctatggcaacacacaaagacgacaaggagcgtttttttcccagtaacgggatcctgatttttggcaaacaaaatgctgccagagacaatgcggattacagcgatgtcatgctcaccagcgaggaagaaatcaaaaccactaaccctgtggctacagaggaatacggtatcgtggcagataacttgcagcagcaaaacacggctcctcaaattggaactgtcaacagccagggggccttacccggtatggtctggcagaaccgggacgtgtacctgcagggtcccatctgggccaagattcctcacacggacggcaacttccacccgtctccgctgatgggcggctttggcctgaaacatcctccgcctcagatcctgatcaagaacacgcctgtacctgcggatcctccgaccaccttcaaccagtcaaagctgaactctttcatcacgcaatacagcaccggacaggtcagcgtggaaattgaatgggagctgcagaaggaaaacagcaagcgctggaaccccgagatccagtacacctccaactactacaaatctacaagtgtggactttgctgttaatacagaaggcgtgtactctgaaccccaccccattggcacccgttacctcacccgtcccctgtaa

SEQ ID NO: 2011 - DNA, 2211 bp, Artificial Sequence
  Description of Artificial Sequence: Synthetic polynucleotide
atggctgccgatggttatcttccagattggctcgaggacaacctctctgagggcattcgcgagtggtgggcgctgaaacctggagccccgaagcccaaagccaaccagcaaaagcaggacgacggccggggtctggtgcttcctggctacaagtacctcggacccttcaacggactcgacaagggggagcccgtcaacgcggcggatgcagcggccctcgagcacgacaaggcctacgaccagcagctccaagcgggtgacaatccgtacctgcggtataaccacgccgacgccgagtttcaggagcgtcttcaaggagatacgtcttttgggggcaacctcggacgagcagtcttccaggccaagaagcgggttctcgaacctctcggtctggttgaggaaggcgctaagacggctcctggaaagaaacgtccggtagagcagtcgccacaagagccagactcctcctcgggcatcggcaagacaggccagcagcccgctaaaaagagactcaattttggtcagactggcgactcagagtcagtccccgacccacaacctctcggagaacctccagcaacccccgctgctgtgggacctactacaatggcttcaggcggtggcgcaccaatggcggacaataacgaaggcgccgatggagtgggtaatgcctcaggaaattggcattgcgattccacatggctgggcgacagagtcatcaccaccagcacccgcacctgggccttgcccacctacaataaccacctctacaagcaaatctccagtgcttcaacgggggccagcaacgacaaccactacttcggctacagcaccccctgggggtattttgacttcaacagattccactgccacttctcaccacgtgactggcagcgactcatcaacaacaactggggattccggcctaagcgactcaacttcaagctcttcaacattcaggtcaaagaggttacggacaacaatggagtcaagaccatcgccaataacctcaccagcaccatccaggtgtttacggactcggagtaccagctgccgtacgttctcggctctgcccaccagggctgcctgcctccgttcccggcggacgtgttcatgattccccagtacggctacctaacactcaacaacggtagtcaggccgtgggacgctcctccttctactgcctggaatactttccttcgcagatgctgagaaccggcaacaacttccagtttacttacaccttcgaggacgtgcctttccacagcagctacgcccacagccagagcttggaccggctgatgaatcctctgattgaccagtacctgtactacttgtctcggactcaaacaacaggaggcacggcaaatacgcagactctgggcttcagccaaggtgggcctaatacaatggccaatcaggcaaagaactggctgccaggaccctgttaccgccaacaacgcgtctcaacgacaaccgggcaaaacaacaatagcaactttgcctggactgctgggaccaaataccatctgaatggaagaaattcattggctaatcctggcatcgctatggcaacacacaaagacgacaaggagcgtttttttcccagtaacgggatcctgatttttggcaaacaaaatgctgccagagacaatgcggattacagcgatgtcatgctcaccagcgaggaagaaatcaaaaccactaaccctgtggctacagaggaatacggtatcgtggcagataacttgcagcagcaaaacacggctcctcaaattggaactgtcaacagccagggggccttacccggtatggtctggcagaaccgggacgtgtacctgcagggtcccatctgggccaagattcctcacacggacggcaacttccacccgtctccgctgatgggcggctttggcctgaaacatcctccgcctcagatcctgatcaagaacacgcctgtacctgcggatcctccgaccaccttcaaccagtcaaagctgaactctttcatcacgcaatacagcaccggacaggtcagcgtggaaattgaatgggagctgcagaaggaaaacagcaagcgctggaaccccgagatccagtacacctccaactactacaaatctacaagtgtggactttgctgttaatacagaaggcgtgtactctgaaccccaccccattggcacccgttacctcacccgtcccctgtaa

SEQ ID NO: 2012 - DNA, 2217 bp, Artificial Sequence
  Description of Artificial Sequence: Synthetic polynucleotide
atggctgccgatggttatcttccagattggctcgaggacactctctctgaaggaataagacagtggtggaagctcaaacctggcccaccaccaccaaagcccgcagagcggcataaggacgacagcaggggtcttgtgcttcctgggtacaagtacctcggacccttcaacggactcgacaagggggagcccgtcaacgcggcggatgcagcggccctcgagcacgacaaggcctacgaccagcagctcaaagcgggtgacaatccgtacctgcggtataaccacgccgacgcggagtttcaggagcgccttaaagaagatacgtcttttgggggcaacctcggacgagcagtcttccaggcgaaaaagagggttcttgaacctctcggtctggttgaggaaggcgctaagacggctcctggaaagaagagaccggtagagccatcaccccagcgttctccagactcctctacgggcatcggcaagaaaggccaacagcccgccagaaaaagactcaattttggtcagactggcgactcagagtcagttccagaccctcaacctctcggagaacctccagcagcgccctctggtgtgggacctaatacaatggctgcaggcggtggcgcaccaatggcagacaataacgaaggcgccgacggagtgggtagttcctcgggaaattggcattgcgattcccaatggctgggggacagagtcatcaccaccagcaccagaacctgggccctgcccacctacaacaatcacctctacaagcaaatctccaacagcacatctggaggatcttcaaatgacaacgcctacttcggctacagcaccccctgggggtattttgacttcaaccgcttccactgccacttctcaccacgtgactggcagcgactcatcaacaacaactggggattccggcccaagagactcaacttcaagctcttcaacattcaggtcaaagaggttacggacaacaatggagtcaagaccatcgccaataaccttaccagcacggtccaggtctttacggactcggagtaccagttgccgtacgtcctcggctctgcgcaccagggctgcctccctccgttcccggcggacgtgttcatgattccccagtacggctacctaacactcaacaacggtagtcaggccgtgggacgctcctccttctactgcctggaatatttcccttctcagatgctgagaacgggcaacaactttaccttcagctacacctttgaggacgttcctttccacagcagctacgctcacagccagagtctggaccgtctcatgaatcctctgattgaccagtacctgtactacttgtctcggactcaaacaacaggaggcacggcaaatacgcagactctgggcttcagccaaggtgggcctaatacaatggccaatcaggcaaagaactggctgccaggaccctgttaccgccaacaacgcgtctcaacgacaaccgggcaaaacaacaatagcaactttgcctggactgctgggaccaaataccatctgaatggaagaaattcattggctaatcctggcatcgctatggcaacacacaaagacgacaaggagcgtttttttcccagtaacgggatcctgatttttggcaaacaaaatgctgccagagacaatgcggattacagcgatgtcatgctcaccagcgaggaagaaatcaaaaccactaaccctgtggctacagaggaatacggtatcgtggcagataacttgcagcagcaaaacacggctcctcaaattggaactgtcaacagccagggggccttacccggtatggtctggcagaaccgggacgtgtacctgcagggtcccatctgggcaaagattccacacacggacggacattttcacccctctcccctcatgggtggattcggacttaaacaccctcctccacagattctcatcaagaacaccccggtacctgcgaatcctccgaccaccttcaaccagtcaaagctgaactctttcatcacgcaatacagcacaggacaagtgagtgtggaaattgaatgggagctgcagaaagaaaacagcaagcgctggaatcccgaagtgcagtacacatccaattatgcaaaatctgccaacgttgattttactgtggacaacaatggactttatactgagcctcgccccattggcacccgttaccttacccgtcccctgtaa

SEQ ID NO: 2013 - DNA, 2211 bp, Artificial Sequence
  Description of Artificial Sequence: Synthetic polynucleotide
atggctgccgatggttatcttccagattggctcgaggacaacctctctgagggcattcgcgagtggtgggcgctgaaacctggagccccgaaacccaaagccaaccagcaaaagcaggacgacggccggggtctggtgcttcctggctacaagtacctcggacccttcaacggactcgacaagggggagcccgtcaacgcggcggacgcagcggccctcgagcacgacaaggcctacgaccagcagctcaaggcgggtgacaatccgtacctgcggtataaccacgccgacgccgagtttcaggagcgtctgcaagaagatacgtcttttgggggcaacctcgggcgagcagtcttccaggccaaaaagaggcttcttgaacctcttggtctggttgaggaaggggctaagacggctcctggaaagaaacgtccggtagagcagtcgccacaagagccagactcctcctcgggcattggcaagacaggccagcagcccgctaaaaagagactcaactttgggcagactggcgactcagagtcagtgcccgatcctcaacctctcggagaacctccagcaacccccgctgctgtgggacctactacaatggcttcaggcggtggcgcaccaatggcggacaataacgaaggcgccgatggagtgggtaattcctcgggaaattggcattgcgattccacatggatgggcgacagagtcatcaccaccagcacccgaacctgggccctgcccacctacaacaatcacctctacaagcaaatctccagtgcttcaacgggggccagcaacgacaaccactacttcggctacagcaccccctgggggtattttgatttcaacagattccactgccatttttcaccacgtgactggcagcgactcatcaacaacaactggggattccggcccaagagactcaacttcaagctcttcaacatccaggtcaaggaggtcacgcagaatgaaggcaccaagaccatcgccaataaccttaccagcacgattcaggtctttacggattcggaataccagctcccgtacgtcctcggctctgcgcaccagggctgcctccctccgttcccggcggacgtgttcattattccgcagtacggctacctaacgctcaacaatggtagccaggcagtgggacggtcatccttttactgcctggaatatttcccatcgcagatgctgagaacgggcaacaactttaccttcagctacacctttgaggacgttcctttccacagcagctacgctcacagccagagtctggaccgtctcatgaatcctctgattgaccagtacctgtactacttgtctcggactcaaacaacaggaggcacggcaaatacgcagactctgggcttcagccaaggtgggcctaatacaatggccaatcaggcaaagaactggctgccaggaccctgttaccgccaacaacgcgtctcaacgacaaccgggcaaaacaacaatagcaactttgcctggactgctgggaccaaataccatctgaatggaagaaattcattggctaatcctggcatcgctatggcaacacacaaagacgacaaggagcgtttttttcccagtaacgggatcctgatttttggcaaacaaaatgctgccagagacaatgcggattacagcgatgtcatgctcaccagcgaggaagaaatcaaaaccactaaccctgtggctacagaggaatacggtatcgtggcagataacttgcagcagcaaaacacggctcctcaaattggaactgtcaacagccagggggccttacccggtatggtctggcagaaccgggacgtgtacctgcagggtcccatctgggccaagattcctcacacggacggcaacttccacccgtctccgctgatgggcggctttggcctgaaacatcctccgcctcagatcctgatcaagaacacgccagtacctgcggatcctccgaccaccttcaaccagtcaaagctgaactctttcatcacgcaatacagcaccggacaggtcagcgtggaaattgaatgggagctgcagaaggaaaacagcaagcgctggaaccccgagatccagtacacctccaactactacaaatctacaagtgtggactttgctgttaatacagaaggcgtgtactctgaaccccaccccattggcacccgttacctcacccgtcccctgtaa

SEQ ID NO: 2014 - DNA, 2211 bp, Artificial Sequence
  Description of Artificial Sequence: Synthetic polynucleotide
atggctgccgatggttatcttccagattggctcgaggacaacctctctgagggcattcgcgagtggtgggcgctgaaacctggagccccgaaacccaaagccaaccagcaaaagcaggacgacggccggggtctggtgcttcctggctacaagtacctcggacccttcaacggactcgacaagggggagcccgtcaacgcggcggatgcagcggccctcgagcacgacaaggcctacgaccagcagctcaaggcgggtgacaatccgtacctgcggtataaccacgccgacgccgagtttcaggagcgtctgcaagaagatacgtcttttgggggcaacctcgggcgagcagtcttccaggccaaaaagagggttcttgaaccttttggtctggttgaggaagctgctaagacggctcctggaaagaaacgtccggtagagcagtcgccacaagagccagactcctcctcgggcattggcaagacaggccagcagcccgctaaaaagagactcaattttggtcagactggcgactcagagtcagtgcccgaccctcaacctctcggagaacctccagcaacccccgctgctgtgggacctactacaatggcttcaggcggtggcgcaccaatggcagacaataacgaaggcgccgatggagtgggtaatgcctcaggaaattggcattgcgattccacatggctgggcgacagagtcatcaccaccagcacccgaacctgggccctgcccacctacaacaatcacctctacaagcaaatctccagtgcttcaacgggggccagcaacgacaaccactacttcggctacagcaccccctgggggtattttgactttaacagattccactgccacttttcaccacgtgactggcagcgactcatcaacaacaactggggattccggcccaagagactcaacttcaagctcttcaacatccaggtcaaggaggtcacgcagaatgaaggcaccaagaccatcgccaataacctcaccagcaccattcaggtctttacggattcggaataccagctcccgtacgtcctcggctctgcccaccagggctgcctccctccgttcccggcggacgtgttcatgattccgcagtacggctacctaacgctcaacaatggtagccaggcagtgggacggtcatccttttactgcctggaatatttcccatcgcagatgctgagaacgggcaacaactttaccttcagctacacctttgaggacgttcctttccacagcagctacgctcacagccagagtctggaccgtctcatgaatcctctgattgaccagtacctgtactacttgtctcggactcaaacaacaggaggcacggcaaatacgcagactctgggcttcagccaaggtgggcctaatacaatggccaatcacgcaaagaactggctgccaggaccctgttaccgccaacaacgcgtctcaacgacaaccgggcaaaacaacaatagcaactttgcctggactgctgggaccaaataccatctgaatggaagaaattcattggctaatcctggcatcgctatggcaacacacaaagacgacaaggagcgtttttttcccagtaacgggatcctgatttttggcaaacaaaatgctgccagagacaatgcggattacagcgatgtcatgctcaccagcgaggaagaaatcaaaaccactaaccctgtggctacagaggaatacggtatcgtggcagataacttgcagcagcaaaacacggctcctcaaattggaactgtcaacagccagggggccttacccggtatggtctggcagaaccgggacgtgtacctgcagggtcccatctgggccaagattcctcacacggacggcaacttccacccgtctccgctgatgggcggctttggcctgaaacatcctccgcctcagatcctgatcaagaacacgcctgtacctgcggatcctccgaccaccttcaaccagtcaaagctgaactctttcatcacgcaatacagcaccggacaggtcagcgtggaaattgaatgggagctgcagaaggaaaacagcaagcgctggaaccccgagatccagtacacctccaactactacaaatctacaagtgtggactttgctgttaatacagaaggcgtgtactctgaaccccaccccattggcacccgttacctcacccgtcccctgtaa

SEQ ID NO: 2015 - DNA, 2211 bp, Artificial Sequence
  Description of Artificial Sequence: Synthetic polynucleotide
atggctgccgatggttatcttccagattggctcgaggacaacctctctgagggcattcgcgagtggtgggcgctgaaacctggagccccgaagcccaaagccaaccagcaaaagcaggacgacggccggggtctggtgcttcctggctacaagtacctcggacccttcaacggactcgacaaaggagagcccgtcaacgaggcggacgcggcggccctcgaacacgacaaggcttacgaccagcagctcaaggccggtgacaacccctacctgcggtacaaccacgccgacgccgagttccaggagcggctgcaagaagatacgtcttttgggggcaacctcgggcgagcagtcttccaggccaagaagaggcttcttgaacctcttggtctggttgaggaagcggctaagacggctcctggaaagaagaggcctgtagagcagtctcctcaggaaccggactcctccgcgggtattggcaaatcaggtgcacagcccgctaaaaagagactcaattttggtcagactggcgactcagagtcagtccccgacccacaacctctcggagaacctccagcaacccccgctgctgtgggacctactacaatggcttcaggcggtggcgcaccaatggcagacaataacgaaggcgccgatggagtgggtaatgcctcaggaaattggcattgcgattccacatggctgggcgacagagtcatcaccaccagcacccgaacctgggccctgcccacctataacaaccatctctacaagcaaatctccagtgcttcaacgggggccagtaacgacaaccactacttcggctacagcaccccctgggggtattttgactttaacagattccactgccacttctcaccacgtgactggcagcgactcatcaacaacaactggggattccggcccaagcgactcaacttcaagctcttcaacattcaggtcaaagaggttacggacaacgatggagtcaagaccatcgccaataaccttaccagcaccattcaggtgtttacggactcggaataccagctgccgtacgttctcggctccgcccaccagggctgcctgcctccgttcccggcggacgtgttcatgattccccagtacggctacctaacactcaacaacggtagtcaggccgtgggacgctcctccttctactgcctggaatactttccttcgcagatgctgagaactggcaacaacttccagtttacttacaccttcgaggacgtgcctttccacagcagctacgcccacagccagagcttggaccggctgatgaatcctctgattgaccagtacctgtactacttgtctcggactcaaacaacaggaggcacggcaaatacgcagactctgggcttcagccaaggtgggcctaatacaatggccaatcaggcaaagaactggctgccaggaccctgttaccgccaacaacgcgtctcaacgacaaccgggcaaaacaacaatagcaactttgcctggactgctgggaccaaataccatctgaatggaagaaattcattggctaatcctggcatcgctatggcaacacacaaagacgacaaggagcgtttttttcccagtaacgggatcctgatttttggcaaacaaaatgctgccagagacaatgcggattacagcgatgtcatgctcaccagcgaggaagaaatcaaaaccactaaccctgtggctacagaggaatacggtatcgtggcagataacttgcagcagcaaaacacggctcctcaaattggaactgtcaacagccagggggccttacccggtatggtctggcagaaccgggacgtgtacctgcagggtcccatctgggccaagattcctcacacggacggcaacttccacccgtctccgctgatgggcggctttggcctgaaacatcctccgcctcagatcctgatcaagaacacgcctgtacctgcggatcctccgaccaccttcaaccagtcaaagctgaactctttcatcacgcaatacagcaccggacaggtcagcgtggaaattgaatgggagctgcagaaggaaaacagcaagcgctggaaccccgagatccagtacacctccaactactacaaatctacaagtgtggactttgctgttaatacagaaggcgtgtactctgaaccccaccccattggcacccgttacctcacccgtcccctgtaa

SEQ ID NO: 2016 - DNA, 2211 bp, Artificial Sequence
  Description of Artificial Sequence: Synthetic polynucleotide
atggctgccgatggttatcttccagattggctcgaggacaacctctctgagggcattcgcgagtggtgggcgctgaaacctggagccccgaagcccaaagccaaccagcaaaagcaggacgacggccggggtctggtgcttcctggctacaagtacctcggacccttcaacggactcgacaagggggagcccgtcaacgcggcggatgcagcggccctcgagcacgacaaagcctacgaccagcagctcaaagcgggtgacaatccgtacctgcggtataaccacgccgacgccgagtttcaggagcgtctgcaagaagatacgtcttttgggggcaacctcgggcgagcagtcttccaggccaagaagagggttctcgaacctttgggtctggttgaggaaggggctaagacggctcctggaaagaaaaggccggtagagcagtctcctcaggaaccggactcctccgcgggtattggcaagacaggtgcacagcccgctaaaaagagactcaattttggtcagactggcgactcagagtcagtccccgacccacaacctctcggagaacctccagcaacccccgctgctgtgggacctactacaatggcttcaggcggtggcgcaccaatggcagacaataacgaaggcgccgacggagtgggtagtgcctcgggaaattggcattgcgattccacatggctgggcgacagagtcatcaccaccagcacccgaacctgggccctgcccacctataacaaccatctctacaagcaaatctccagtgcttcaacgggggccagtaacgacaaccactacttcggctacagcaccccctgggggtattttgacttcaacagattccactgccacttctcaccacgtgactggcagcgactcatcaacaacaactggggattccggcccaagcgactcaacttcaagctcttcaacattcaggtcaaagaggttacggacaacaatggagtcaagaccatcgccaataaccttaccagcacgatccaggtctttacggactcggagtaccagctgccgtacgtcctcggctctgcgcaccagggctgcctgcctccgttcccggcggacgtgttcatgattccgcagtacggctacctaacgctcaacaatggtagccaggcagtgggacggtcatccttttactgcctggaatatttcccatcgcagatgctgagaacgggcaacaactttaccttcagctacacctttgaggacgttcctttccacagcagctacgctcacagccagagtctggaccgtctcatgaatcctctgattgaccagtacctgtactacttgtctcggactcaaacaacaggaggcacggcaaatacgcagactctgggcttcagccaaggtgggcctaatacaatggccaatcaggcaaagaactggctgccaggaccctgttaccgccaacaacgcgtctcaacgacaaccgggcaaaacaacaatagcaactttgcctggactgctgggaccaaataccatctgaatggaagaaattcattggctaatcctggcatcgctatggcaacacacaaagacgacaaggagcgtttttttcccagtaacgggatcctgatttttggcaaacaaaatgctgccagagacaatgcggattacagcgatgtcatgctcaccagcgaggaagaaatcaaaaccactaaccctgtggctacagaggaatacggtatcgtggcagataacttgcagcagcaaaacacggctcctcaaattggaactgtcaacagccagggggccttacccggtatggtctggcagaaccgggacgtgtacctgcagggtcccatctgggccaagattcctcacacggacggcaacttccacccgtctccgctgatgggcggctttggcctgaaacatcctccgcctcagatcctgatcaagaacacgcctgtacctgcggatcctccgaccaccttcaaccagtcaaagctgaactctttcatcacgcaatacagcaccggacaggtcagcgtggaaattgaatgggagctgcagaaggaaaacagcaagcgctggaaccccgagatccagtacacctccaactactacaaatctacaagtgtggactttgctgttaatacagaaggcgtgtactctgaaccccaccccattggcacccgttacctcacccgtcccctgtaa

SEQ ID NO: 2017 - DNA, 2211 bp, Artificial Sequence
  Description of Artificial Sequence: Synthetic polynucleotide
atggctgccgatggttatcttccagattggctcgaggacaacctctctgagggcattcgcgagtggtgggacttgaaacctggagccccgaagcccaaagccaaccagcaaaagcaggacgacggccggggtctggtgcttcctggctacaagtacctcggacccttcaacggactcgacaagggggagcccgtcaacgcggcggacgcagcggccctcgagcacgacaaggcctacgaccagcagctcaaagcgggtgacaatccgtacctgcggtataaccacgccgacgccgagtttcaggagcgtctgcaagaagatacgtcttttgggggcaacctcggacgagcagtcttccaggccaaaaagaggcttcttgaacctcttggtctggttgaggaagcggctaagacggctcctggaaagaagaggcctgtagagcagtctcctcaggaaccggactcctccgcgggtattggcaaatcgggtgcacagcccgctaaaaagagactcaatttcggtcagactggcgacacagagtcagtcccagaccctcaaccaatcggagaacctccagcagcgccctctggtgtgggacctaatacaatggctgcaggcggtggcgcaccaatggcagacaataacgaaggtgccgatggagtgggtagttcctcgggaaattggcattgcgattcccaatggctgggggacagagtcatcaccaccagcacccgaacctgggccctgcccacctataacaaccacctctacaagcaaatctccagtgcttcaacgggggccagcaacgacaaccactactttggctacagcaccccttgggggtattttgacttcaacagattccactgccacttttcaccacgtgactggcaaagactcatcaacaacaactggggattccgacccaagagactcaacttcaagctcttcaacatccaggtcaaggaggtcacgcagaatgaaggcaccaagaccatcgccaataacctcaccagcaccatccaggtgtttacggactcggagtaccagctgccgtacgttctcggctctgcccaccagggctgcctgcctccgttcccggcggacgtgttcatgattccccagtacggctacctaacactcaacaacggtagtcaggccgtgggacgctcctccttctactgcctggaatactttccttcgcagatgctgagaaccggcaacaacttccagtttacttacaccttcgaggacgtgcctttccacagcagctacgcgcacagccagagcttggaccggctgatgaatcctctgattgaccagtacctgtactacttgtctcggactcaaacaacaggaggcacggcaaatacgcagactctgggcttcagccaaggtgggcctaatacaatggccaatcacgcaaagaactggctgccaggaccctgttaccgccaacaacgcgtctcaacgacaaccgggcaaaacaacaatagcaactttgcctggactgctgggaccaaataccatctgaatggaagaaattcattggctaatcctggcatcgctatggcaacacacaaagacgacaaggagcgtttttttcccagtaacgggatcctgatttttggcaaacaaaatgctgccagagacaatgcggattacagcgatgtcatgctcaccagcgaggaagaaatcaaaaccactaaccctgtggctacagaggaatacggtatcgtggcagataacttgcagcagcaaaacacggctcctcaaattggaactgtcaacagccagggggccttacccggtatggtctggcagaaccgggacgtgtacctgcagggtcccatctgggccaagattcctcacacggacggcaacttccacccgtctccgctgatgggcggctttggcctgaaacatcctccgcctcagatcctgatcaagaacacgcctgtacctgcggatcctccgaccaccttcaaccagtcaaagctgaactctttcatcacgcaatacagcaccggacaggtcagcgtggaaattgaatgggagctgcagaaggaaaacagcaagcgctggaaccccgagatccagtacacctccaactactacaaatctacaagtgtggactttgctgttaatacagaaggcgtgtactctgaaccccaccccattggcacccgttacctcacccgtcccctgtaa

SEQ ID NO: 2018 - DNA, 2214 bp, Artificial Sequence
  Description of Artificial Sequence: Synthetic polynucleotide
atggctgccgatggttatcttccagattggctcgaggacaaccttagtgaaggaattcgcgagtggtgggcgctgaaacctggagccccgaagcccaaagccaaccagcaaaagcaggacgacggccggggtctggtgcttcctggctacaagtacctcggacccttcaacggactcgacaagggggagcccgtcaacgcggcggacgcagcggccctcgagcacgacaaggcctacgaccagcagctcaaagcgggtgacaatccgtacctgcggtataaccacgccgacgccgagtttcaggagcgtctgcaagaagatacgtcttttgggggcaacctcgggcgagcagtcttccaggccaagaagcgggttctcgaacctctcggtctggttgaggaaggcgctaagacggctcctggaaagaaacgtccggtagagcagtcgccacaagagccagactcctcctcgggcatcggcaagacaggccagcagcccgctaaaaagagactcaatttcggtcagactggcgacacagagtcagtcccagaccctcaaccaatcggagaacctcccgcagccccctcaggtgtgggatctcttacaatggcttcaggtggtggcgcaccagtggcagacaataacgaaggtgccgatggagtgggtagttcctcgggaaattggcattgcgattcccaatggctgggggacagagtcatcaccaccagcaccagaacctgggccttgcccacctacaataaccacctctacaagcaaatctccaacagcacatctggaggatcttcaaatgacaacgcctacttcggctacagcaccccctgggggtattttgactttaacagattccactgccacttttcaccacgtgactggcagcgactcatcaacaacaactggggattccgacccaagagactcaacttcaagctcttcaacatccaggtcaaggaggtcacgcagaacgaaggcaccaagaccatcgccaataacctcaccagcaccatccaggtgtttacggactcggagtaccagctgccgtacgttctcggctccgcccaccagggctgcctgcctccgttcccggcggacgtgttcatgattccccagtacggctacctaacgctcaacaacggtagtcaggccgtgggacgctcctccttctactgcctggaatactttccttcgcagatgctgagaaccggcaacaacttccagtttacttacaccttcgaggacgtgcctttccacagcagctacgcgcacagccagagcttggaccggctgatgaatcctctgattgaccagtacctgtactacttgtctcggactcaaacaacaggaggcacggcaaatacgcagactctgggcttcagccaaggtgggcctaatacaatggccaatcaggcaaagaactggctgccaggaccctgttaccgccaacaacgcgtctcaacgacaaccgggcaaaacaacaatagcaactttgcctggactgctgggaccaaataccatctgaatggaagaaattcattggctaatcctggcatcgctatggcaacacacaaagacgacaaggagcgtttttttcccagtaacgggatcctgatttttggcaaacaaaatgctgccagagacaatgcggattacagcgatgtcatgctcaccagcgaggaagaaatcaaaaccactaaccctgtggctacagaggaatacggtatcgtggcagataacttgcagcagcaaaacacggctcctcaaattggaactgtcaacagccagggggccttacccggtatggtctggcagaaccgggacgtgtacctgcagggtcccatctgggccaagattcctcacacggacggcaacttccacccgtctccgctgatgggcggctttggcctgaaacatcctccgcctcagatcctgatcaagaacacgcctgtacctgcggatcctccgaccaccttcaaccagtcaaagctgaactctttcatcacgcaatacagcaccggacaggtcagcgtggaaattgaatgggagctgcagaaggaaaacagcaagcgctggaaccccgagatccagtacacctccaactactacaaatctacaagtgtggactttgctgttaatacagaaggcgtgtactctgaaccccaccccattggcacccgttacctcacccgtcccctgtaa

SEQ ID NO: 2019 - DNA, 2214 bp, Artificial Sequence
  Description of Artificial Sequence: Synthetic polynucleotide
atggctgccgatggttatcttccagattggctcgaggacaaccttagtgaaggaattcgcgagtggtgggcgctgaaacctggagccccgaagcccaaagccaaccagcaaaagcaggacgacggccggggtctggtgcttcctggctacaagtacctcggacccttcaacggactcgacaagggggagcccgtcaacgcggcggacgcagcggccctcgagcacgacaaggcctacgaccagcagctcaaagcgggtgacaatccgtacctgcggtataaccacgccgacgcggagtttcaggagcgccttaaagaagatacgtcttttgggggcaacctcgggcgagcagtcttccaggccaagaagagggttctcgaaccttttggtctggttgaggaaggtgctaagacggctcctggaaagaaacgtccggtagagcagtcgccacaagagccagactcctcctcgggcatcggcaagacaggccagcagcccgctaaaaagagactcaattttggtcagactggcgactcagagtcagttccagaccctcaacctctcggagaacctccagcagcgccctctggtgtgggacctaatacaatggctgcaggcggtggcgcaccaatggcagacaataacgaaggtgccgatggagtgggtagttcctcgggaaattggcattgcgattcccaatggctggggaacagagtcatcaccaccagcacccgaacctgggccctgcccacctacaacaatcacctctacaagcaaatctccaacagcacatctggaggatcttcaaatgacaacgcctacttcggctacagcaccccctgggggtattttgacttcaacagattccactgccacttctcaccacgtgactggcagcgactcatcaacaacaactggggattccggcccaagagactcaacttcaagctcttcaacattcaggtcaaagaggttacggacaacaatggagtcaagaccatcgccaataaccttaccagcacggtccaggtcttcacggactcggagtaccagttgccgtacgtcctcggctctgcgcaccagggctgcctccctccgttcccggcggacgtgttcatgattccgcaatacggctacctgacgctcaacaacggtagccaagccgtgggacgttcatccttttactgcctggaatatttcccttctcagatgctgagaaccggcaacaacttccagtttacttacaccttcgaggacgtgcctttccacagcagctacgcgcacagccagagcttggaccggctgatgaatcctctgattgaccagtacctgtactacttgtctcggactcaaacaacaggaggcacggcaaatacgcagactctgggcttcagccaaggtgggcctaatacaatggccaatcaggcaaagaactggctgccaggaccctgttaccgccaacaacgcgtctcaacgacaaccgggcaaaacaacaatagcaactttgcctggactgctgggaccaaataccatctgaatggaagaaattcattggctaatcctggcatcgctatggcaacacacaaagacgacaaggagcgtttttttcccagtaacgggatcctgatttttggcaaacaaaatgctgccagagacaatgcggattacagcgatgtcatgctcaccagcgaggaagaaatcaaaaccactaaccctgtggctacagaggaatacggtatcgtggcagataacttgcagcagcaaaacacggctcctcaaattggaactgtcaacagccagggggccttacccggtatggtctggcagaaccgggacgtgtacctgcagggtcccatctgggccaagattcctcacacggacggcaacttccacccgtctccgctgatgggcggctttggcctgaaacatcctccgcctcagatcctgatcaagaacacgcctgtacctgcggatcctccgaccaccttcaaccagtcaaagctgaactctttcatcacgcaatacagcaccggacaggtcagcgtggaaattgaatgggagctgcagaaggaaaacagcaagcgctggaaccccgagatccagtacacctccaactactacaaatctacaagtgtggactttgctgttaatacagaaggcgtgtactctgaaccccaccccattggcacccgttacctcacccgtcccctgtaa

SEQ ID NO: 2020 - DNA, 2211 bp, Artificial Sequence
  Description of Artificial Sequence: Synthetic polynucleotide
atggctgccgatggttatcttccagattggctcgaggacaacctctctgagggcattcgcgagtggtgggacttgaaacctggagccccgaagcccaaagccaaccagcaaaagcaggacgacggccggggtctggtgcttcctggctacaagtacctcggacccttcaacggactcgacaggggggagcccgtcaacgcggcggacgcagcggccctcgagcacgacaaggcctacgaccagcagctcaaagcgggtgacaatccgtacctgcggtataaccacgccgacgccgagtttcaggagcgtctgcaagaagatacgtcttttgggggcaacctcgggcgagcagtcttccaggccaagaagcgggttctcgaacctctcggtctggttgaggaaggcgctaagacggctcctggaaagaaacgtccggtagagcagtcgccacaagagccagactcctcctcgggcatcggcaagacaggccagcagcccgctaaaaagagactcaattttggtcagactggcgactcagagtcagtccccgacccacaacctctcggagaacctccagcaacccccgctgctgtgggacctactacaatggcttcaggcggtggcgcaccaatggcagacaataacgaaggcgccgacggagtgggtaatgcctcaggaaattggcattgcgattccacatggctgggcgacagagtcatcaccaccagcacccgaacctgggccttgcccacctataacaaccacctctacaagcaaatctccagtgcttcaacgggggccagcaacgacaaccactacttcggctacagcaccccctgggggtattttgacttcaacagattccactgccacttctcaccacgtgactggcagcgactcatcaacaacaactggggattccggcctaagcgactcaacttcaagctcttcaacattcaggtcaaagaggttacggacaacaatggagtcaagaccatcgccaataacctcaccagcaccatccaggtgtttacggactcggagtaccagctgccgtacgttctcggctctgcccaccagggctgcctgcctccgttcccggcggacgtgttcatgattccccagtacggctacctaacactcaacaacggtagtcaggccgtgggacgctcctccttctactgcctggaatactttccttcgcagatgctgagaaccggcaacaacttccagtttacttacaccttcgaggacgtgcctttccacagcagctacgcccacagccagagcttggaccggctgatgaatcctctgattgaccagtacctgtactacttgtctcggactcaaacaacaggaggcacggcaaatacgcagactctgggcttcagccaaggtgggcctaatacaatggccaatcaggcaaagaactggctgccaggaccctgttaccgccaacaacgcgtctcaacgacaaccgggcaaaacaacaatagcaactttgcctggactgctgggaccaaataccatctgaatggaagaaattcattggctaatcctggcatcgctatggcaacacacaaagacgacaaggagcgtttttttcccagtaacgggatcctgatttttggcaaacaaaatgctgccagagacaatgcggattacagcgatgtcatgctcaccagcgaggaagaaatcaaaaccactaaccctgtggctacagaggaatacggtatcgtggcagataacttgcagcagcaaaacacggctcctcaaattggaactgtcaacagccagggggccttacccggtatggtctggcagaaccgggacgtgtacctgcagggtcccatctgggccaagattcctcacacggacggcaacttccacccgtctccgctgatgggcggctttggcctgaaacatcctccgcctcagatcctgatcaagaacacgcctgtacctgcggatcctccgaccaccttcaaccagtcaaagctgaactctttcatcacgcaatacagcaccggacaggtcagcgtggaaattgaatgggagctgcagaaggaaaacagcaagcgctggaaccccgagatccagtacacctccaactactacaaatctacaagtgtggactttgctgttaatacagaaggcgtgtactctgaaccccaccccattggcacccgttacctcacccgtcccctgtaa

SEQ ID NO: 2021 - DNA, 2211 bp, Artificial Sequence
  Description of Artificial Sequence: Synthetic polynucleotide
atggctgccgatggttatcttccagattggctcgaggacaacctctctgagggcattcgcgagtggtgggacttgaaacctggagccccgaagcccaaagccaaccagcaaaagcaggacgacggccggggtctggtgcttcctggctacaagtacctcggacccttcaacggactcgacaagggggagcccgtcaacgcggcggacgcagcggccctcgagcacgacaaggcctacgaccagcagctcaaagcgggtgacaatccgtacctgcggtataaccacgccgacgccgagtttcaggagcgtctgcaagaagatacgtcttttgggggcaacctcgggcgagcagtcttccaggccaagaagcgggttctcgaacctctcggtctggttgaggaaggcgctaagacggctcctggaaagaaacgtccggtagagcagtcgccacaagagccagactcctcctcgggcatcggcaagaaaggccaacagcccgccagaaaaagactcaattttggtcagactggcgactcagagtcagttccagaccctcaacctctcggagaacctcccgcagccccctcaggtgtgggatctcttacaatggcttcaggcggtggcgcaccaatggcagacaataacgaaggcgccgacggagtgggtaatgcctcaggaaattggcattgcgattccacatggctgggcgacagagtcatcaccaccagcacccgaacatgggccttgcccacttacaacaaccatctctacaagcaaatctccagtgcttcaacgggggccagcaacgacaaccactacttcggctacagcaccccctgggggtattttgatttcaacagattccactgccacttttcaccacgtgactggcaaagactcatcaacaacaactggggattccgacccaagagactcaacttcaagctctttaacattcaagtcaaagaggtcacgcagaatgaaggcaccaagaccatcgccaataaccttaccagcacggtccaggtcttcacggactcagactatcagctcccgtacgttctcggctccgcccaccagggctgcctgcctccgttcccggcggacgtgttcatgattccccagtacggctacctaacactcaacaacggtagtcaggccgtgggacgctcctccttctactgcctggaatactttccttcgcagatgctgagaaccggcaacaacttccagtttacttacacctttgaggacgttcctttccacagcagctacgctcacagccagagtctggaccgtctcatgaatcctctgattgaccagtacctgtactacttgtctcggactcaaacaacaggaggcacggcaaatacgcagactctgggcttcagccaaggtgggcctaatacaatggccaatcaggcaaagaactggctgccaggaccctgttaccgccaacaacgcgtctcaacgacaaccgggcaaaacaacaatagcaactttgcctggactgctggaaccaaataccatctgaatggaagaaattcattgtctaatcctggcatcgctatggcgacacacaaagacgacaaggagcgtttttttcccagtaacgggatcctgatttttggcaaacaaaatgctgccagagacaatgcggattacagcgatgtcatgctcaccagcgaggaagaaatcaaaaccactaaccctgtggctacagaggaatacggtatcgtggcagataacttgcagcagcaaaacacggctcctcaaattggaactgtcaacagccagggggccttacccggtatggtctggcagaaccgggacatgtacctgcagggtcccatctgggccaagattcctcacacggacggcaacttccacccgtctccgctgatgggcggctttggcctgaaacatcctccgcctcagatcctgatcaagaacacgcctgtacctgcggatcctccgaccaccttcaaccagtcaaagctgaactctttcatcacgcaatacagcaccggacaggtcagcgtggaaattgaatgggagctgcagaaggaaaacagcaagcgctggaaccccgagatccagtacacctccaactactacaaatctacaagtgtggactttgctgttaatacagaaggcgtgtactctgaaccccaccccattggcacccgttacctcacccgtcccctgtaa

SEQ ID NO: 2022 - DNA, 2211 bp, Artificial Sequence
  Description of Artificial Sequence: Synthetic polynucleotide
atggctgccgatggttatcttccagattggctcgaggacaacctctctgagggcattcgcgagtggtgggcgctgaaacctggagccccgaagcccaaagccaaccagcaaaagcaggacgacggccggggtctggtgcttcctggctacaagtacctcggacccttcaacggactcgacaagggggagcccgtcaacgcggcggatgcagcggccctcgagcacgacaaggcctacgaccagcagctcaaagcgggtgacaatccgtacctgcggtataaccacgccgacgccgagtttcaggagcgtctgcaggaagatacgtcttttgggggcaacctcgggcgagcagtcttccaggccaagaagagggttctcgaaccttttggtctggttgaggaaggcgctaagacggctcctggaaagaaacgtccggtagagcagtcgccacaagagccagactcctcctcgggcatcggcaagacaggccagcagcccgctaaaaagagactcaattttggtcagactggcggctcagagtcagtccccgacccacaacctctcggagaacctccagcaacccccgctgctgtgggacctactacaatggctgcaggcggtggcgcaccaatggcagacaataacgaaggcgccgacggagtgggtagttcctcgggaaattggcattgcgattccacatggctgggcgacagagtcatcaccaccagcaccagaacctgggccttgcccacctataacaaccacctctacaagcaaatctccagtgcttcaacgggggccagcaacgacaaccactacttcggctacagcaccccctgggggtattttgatttcaacagattccactgccatttctcaccacgtgactggcagcgactcatcaacaacaactggggattccggcccaagagactcaacttcaaactcttcaacattcaggtcaaagaggttacggacaacaatggagtcaagaccatcgccaataaccttaccagcacggtccaggtgtttacggactcggagtaccagctgccgtacgttctcggctctgcccaccagggctgcctccctccgttcccggcggacgtgttcatgattccgcagtacggctacctaacgctcaacaatggcagccaggcagtgggacggtcatccttttactgcctggaatatttcccttctcagatgctgagaacgggcaacaactttaccttcagctacacctttgaggaagtgcctttccacagcagctacgcgcacagccagagcctggaccggctgatgaatcctctgattgaccagtacctgtactacttgtctcggactcaaacaacaggaggcacggcaaatacgcagactctgggcttcagccaaggtgggcctaatacaatggccaatcaggcaaagaactggctgccaggaccctgttaccgccaacaacgcgtctcaacgacaaccgggcaaaacaacaatagcaactttgcctggactgctgggaccaaataccatctgaatggaagaaattcattggctaatcctggcatcgctatggcctcacacaaagacgacaaggagcgtttttttcccagtaacgggatcctgatttttggcaaacaaaatgctgccagagacaatgcggattacagcgatgtcatgctcaccagcgaggaagaaatcaaaaccactaaccctgtggctacagaggaatacggtatcgtggcagataacttgcagcagcaaaacacggctcctcaaattggaactgtcaacagccagggggccttacccggtatggtctggcagaaccgggacgtgtacctgcagggtcccatctgggccaagattcctcacacggacggcaacttccacccgtctccgctgatgggcggctttggcctgaaacatcctccgcctcagatcctgatcaagaacacgcctgtacctgcggatcctccgaccaccttcaaccagtcaaagctgaactctttcatcacgcaatacagcaccggacaggtcagcgtggaaattgaatgggagctgcagaaggaaaacagcaagcgctggaaccccgagatccagtacacctccaactactacaaatctacaagtgtggactttgctgttaatacagaaggcgtgtactctgaaccccaccccattggcacccgttacctcacccgtcccctgtaa

SEQ ID NO: 2023 - protein, 736 aa, Artificial Sequence
  Description of Artificial Sequence: Synthetic polypeptide
MAADGYLPDWLEDTLSEGIRQWWKLKPGPPPPKPAERHKDDSRGLVLPGYKYLGPFNGLDKGEPVNEADAAALEHDKAYDQQLKAGDNPYLKYNHADAEFQERLKEDTSFGGNLGRAVFQAKKRVLEPLGLVEEGAKTAPGKKRPVEQSPQEPDSSSGIGKTGQQPAKKRLNFGQTGDSESVPDPQPLGEPPATPAAVGPTTMASGGGAPMADNNEGADGVGSSSGNWHCDSQWLGDRVITTSTRTWALPTYNNHLYKQISSASTGASNDNHYFGYSTPWGYFDFNRFHCHFSPRDWQRLINNNWGFRPKRLNFKLFNIQVKEVTQNEGTKTIANNLTSTIQVFTDSEYQLPYVLGSAHQGCLPPFPADVFMIPQYGYLTLNNGSQAVGRSSFYCLEYFPSQMLRTGNNFQFTYTFEDVPFHSSYAHSQSLDRLMNPLIDQYLYYLSRTQTTGGTANTQTLGFSQGGPNTMANQAKNWLPGPCYRQQRVSTTTGQNNNSNFAWTAGTKYHLNGRNSLANPGIAMATHKDDKERFFPSNGILIFGKQNAARDNADYSDVMLTSEEEIKTTNPVATEEYGIVADNLQQQNTAPQIGTVNSQGALPGMVWQNRDVYLQGPIWAKIPHTDGNFHPSPLMGGFGLKHPPPQILIKNTPVPADPPTTFNQSKLNSFITQYSTGQVSVEIEWELQKENSKRWNPEIQYTSNYYKSTSVDFAVNTEGVYSEPHPIGTRYLTRPL

SEQ ID NO: 2024 - protein, 736 aa, Artificial Sequence
  Description of Artificial Sequence: Synthetic polypeptide
MAADGYLPDWLEDNLSEGIREWWALKPGAPKPKANQQKQDDGRGLVLPGYKYLGPFNGLDKGEPVNAADAAALEHDKAYDQQLKAGDNPYLKYNHADAEFQERLKEDTSFGGNLGRAVFQAKKRLLEPLGLVEEAAKTAPGKKRPVEQSPQEPDSSAGIGKSGAQPAKKRLNFGQTGDSESVPDPQPLGEPPATPAAVGPTTMASGGGAPMADNNEGADGVGNASGNWHCDSTWLGDRVITTSTRTWALPTYNNHLYKQISSASTGASNDNHYFGYSTPWGYFDFNRFHCHFSPRDWQRLINNNWGFRPKRLNFKLFNIQVKEVTQNEGTKTIANNLTSTIQVFTDSEYQLPYVLGSAHQGCLPPFPADVFMIPQYGYLTLNNGSQAVGRSSFYCLEYFPSQMLRTGNNFQFTYTFEDVPFHSSYAHSQSLDRLMNPLIDQYLYYLSRTQTTGGTANTQTLGFSQGGPNTMANQAKNWLPGPCYRQQRVSTTTGQNNNSNFAWTAGTKYHLNGRNSLANPGIAMATHKDDKERFFPSNGILIFGKQNAARDNADYSDVMLTSEEEIKATNPVATEEYGIVADNLQQQNTAPQIGTVNSQGALPGMVWQNRDVYLQGPIWAKIPHTDGNFHPSPLMGGFGLKHPPPQILIKNTPVPADPPTTFNQSKLNSFITQYSTGQVSVEIEWELQKENSKRWNPEIQYTSNYYKSTSVDFAVNTEGVYSEPHPIGTRYLTRPL

SEQ ID NO: 2025 - protein, 737 aa, Artificial Sequence
  Description of Artificial Sequence: Synthetic polypeptide
MAADGYLPDWLEDNLSEGIREWWDLKPGAPKPKANQQKQDDGRGLVLPGYKYLGPFNGLDKGEPVNAADAAALEHDKAYDQQLKAGDNPYLRYNHADAEFQERLQEDTSFGGNLGRAVFQAKKRVLEPLGLVEEGANTAPGKKRPVEQSPQEPDSSAGIGKSGAQPAKKRLNFGQTGDTESVPDPQPIGEPPAAPSGVGSLTMASGGGAPVADNNEGADGVGSSSGNWHCDSQWLGDRVITTSTRTWALPTYNNHLYKQISNSTSGGSSNDNAYFGYSTPWGYFDFNRFHCHFSPRDWQRLINNNWGFRPKRLNFKLFNIQVKEVTDNNGVKTIANNLTSTIQVFTDSEYQLPYVLGSAHQGCLPPFPADVFMIPQYGYLTLNNGSQAVGRSSFYCLEYFPSQMLRTGNNFQFTYTFEDVPFHSSYAHSQSLDRLMNPLIDQYLYYLSRTQTTGGTANTQTLGFSQGGPNTMANQAKNWLPGPCYRQQRVSTTTGQNNNSNFAWTAGTKYHLNGRNSLANPGIAMASHKDDKERFFPSNGILIFGKQNAARDNADYSDVMLTSEEEIKTTNPVATEEYGIVADNLQQQNTAPQIGTVNSQGALPGMVWQNRDVYLQGPIWAKIPHTDGNFHPSPLMGGFGLKHPPPQILIKNTPVPADPPTTFNQSKLNSFITQYSTGQVSVEIEWELQKENSKRWNPEIQYTTNYYKSTSVDFAVNTEGVYSEPHPIGTRYLTRPL

SEQ ID NO: 2026 - protein, 736 aa, Artificial Sequence
  Description of Artificial Sequence: Synthetic polypeptide
MAADGYLPDWLEDNLSEGIREWWALKPGAPKPKANQQKQDDGRGLVLPGYKYLGPFNGLDKGEPVNEADAAALEHDKAYDQQLKAGDNPYLRYNHADAEFQERLQEDTSFGGNLGRAVFQAKKRVLEPLGLVEEGAKTAPGKKRPVEQSPQEPDSSSGIGKTGQQPAKKRLNFGQTGDSESVPDPQPLGEPPATPAAVGPTTMASGGGAPMADNNEGADGVGNASGNWHCDSTWLGDRVITTSTRTWALPTYNNHLYKQISSASTGASNDNHYFGYSTPWGYFDFNRFHCHFSPRDWQRLINNNWGFRPKRLNFKLFNIQVKEVTQNEGTKTIANNLTSTIQVFTDSEYQLPYVLGSAHQGCLPPFPADVFMIPQYGYLTLNNGSQAVGRSSFYCLEYFPSQMLRTGNNFQFTYTFEDVPFHSSYAHSQSLDRLMNPLIDQYLYYLSRTQTTGGTANTQTLGFSQGGPNTMANQAKNWLPGPCYRQQRVSTTTGQNNNSNFAWTAGTKYHLNGRNSLANPGIAMATHKDDKERFFPSNGILIFGKQNAARDNADYSDVMLTSEEEIKTTNPVATEEYGIVADNLQQQNTAPQIGTVNSQGALPGMVWQNRDVYLQGPIWAKIPHTDGNFHPSPLMGGFGLKHPPPQILIKNTPVPADPPTTFNQSKLNSFITQYSTGQVSVEIEWELQKENSKRWNPEIQYTSNYYKSTSVDFAVNTEGVYSEPHPIGTRYLTRPL

SEQ ID NO: 2027 - protein, 736 aa, Artificial Sequence
  Description of Artificial Sequence: Synthetic polypeptide
MAADGYLPDWLEDNLSEGIREWWALKPGAPKPKANQQKQDDGRGLVLPGYKYLGPFNGLDKGEPVNEADAAALEHDKAYDQQLKAGDNPYLRYNHADAEFQERLQEDTSFGGNLGRAVFQAKKRVLEPFGLVEEGAKTAPGKKRPVEQSPQEPDSSSGIGKTGQQPAKKRLNFGQTGDSESVPDPQPLGEPPATPAAVGPTTMASGGGAPMADNNEGADGVGNASGNWHCDSQWLGDRVITTSTRTWALPTYNNHLYKQISSASTGASNDNHYFGYSTPWGYFDFNRFHCHFSPRDWQRLINNNWGFRPKRLNFKLFNIQVKEVTDNNGVKTIANNLTSTVQVFSDSEYQLPYVLGSAHQGCLPPFPADVFMIPQYGYLTLNNGSQAVGRSSFYCLEYFPSQMLRTGNNFQFTYTFEDVPFHSSYAHSQSLDRLMNPLIDQYLYYLSRTQTTGGTANTQTLGFSQGGPNTMANQAKNWLPGPCYRQQRVSTTTGQNNNSNFAWTAGTKYHLNGRNSLANPGIAMATHKDDKERFFPSNGILIFGKQNAARDNADYSDVMLTSEEEIKTTNPVATEEYGIVADNLQQQNTAPQIGTVNSQGALPGMVWQNRDVYLQGPIWAKIPHTDGNFHPSPLMGGFGLKHPPPQILIKNTPVPADPPTTFNQSKLNSFITQYSTGQVSVEIEWELQKENSKRWNPEIQYTSNYYKSTSVDFAVNTEGVYSEPHPIGTRYLTRPL

SEQ ID NO: 2028 - protein, 736 aa, Artificial Sequence
  Description of Artificial Sequence: Synthetic polypeptide
MAADGYLPDWLEDTLSEGIRQWWKLKPGPPPPKPAERHKDDSRGLVLPGYKYLGPFNGLDKGEPVNEADAAALEHDKAYDRQLDSGDNPYLKYNHADAEFQERLKEDTSFGGNLGRAVFQAKKRVLEPFGLVEEGAKTAPGKKRPVEQSPQEPDSSSGIGKTGQQPAKKRLNFGQTGDSESVPDPQPLGEPPATPAAVGPTTMASGGGAPMADNNEGADGVGNASGNWHCDSTWLGDRVITTSTRTWALPTYNNHLYKQISSASTGASNDNHYFGYSTPWGYFDFNRFHCHFSPRDWQRLINNNWGFRPKRLNFKLFNIQVKEVTDNNGVKTIANNLTSTVQVFTDSDYQLPYVLGSAHEGCLPPFPADVFMIPQYGYLTLNNGSQAVGRSSFYCLEYFPSQMLRTGNNFQFTYTFEDVPFHSSYAHSQSLDRLMNPLIDQYLYYLSRTQTTGGTANTQTLGFSQGGPNTMANQAKNWLPGPCYRQQRVSTTTGQNNNSNFAWTAGTKYHLNGRNSLANPGIAMATHKDDKERFFPSNGILIFGKQNAARDNADYSDVMLTSEEEIKTTNPVATEEYGIVADNLQQQNTAPQIGTVNSQGALPGMVWQNRDVYLQGPIWAKIPHTDGNFHPSPLMGGFGLKHPPPQILIKNTPVPADPPTTFNQSKLNSFITQYSTGQVSVEIEWELQKENSKRWNPEIQYTSNYYKSTSVDFAVNTEGVYSEPHPIGTRYLTRNL

SEQ ID NO: 2029 - protein, 738 aa, Artificial Sequence
  Description of Artificial Sequence: Synthetic polypeptide
MAADGYLPDWLEDNLSEGIREWWDLKPGAPKPKANQQKQDDGRGLVLPGYKYLGPFNGLDKGEPVNAADAAALEHDKAYDQQLQAGDNPYLRYNHADAEFQERLQEDTSFGGNLGRAVFQAKKRVLEPLGLVEEGAKTAPGKKRPVEPSPQRSPDSSTGIGKKGQQPARKRLNFGQTGDSESVPDPQPLGEPPAAPSGVGPNTMAAGGGAPMADNNEGADGVGSSSGNWHCDSQWLGDRVITTSTRTWALPTYNNHLYKQISNSTSGGSSNDNAYFGYSTPWGYFDFNRFHCHFSPRDWQRLINNNWGFRPKRLSFKLFNIQVKEVTQNEGTKTIANNLTSTIQVFTDSEYQLPYVLGSAHQGCLPPFPADVFMIPQYGYLTLNNGSQAVGRSSFYCLEYFPSQMLRTGNNFTFSYTFEDVPFHSSYAHSQSLDRLMNPLIDQYLYYLSRTQTTGGTANTQTLGFSQGGPNTMANQAKNWLPGPCYRQQRVSTTTGQNNNSNFAWTAGTKYHLNGRNSLANPGIAMATHKDDKERFFPSNGILIFGKQNAARDNADYSDVMLTSEEEIKTTNPVATEEYGIVADNLQQQNTAPQIGTVNSQGALPGMVWQNRDVYLQGPIWAKIPHTDGNFHPSPLMGGFGLKHPPPQILIKNTPVPADPPTTFNQSKLNSFITQYSTGQVSVEIEWELQKENSKRWNPEIQYTSNYYKSTSVDFAVNTEGVYSEPHPIGTRYLTRPL

SEQ ID NO: 2030 - protein, 737 aa, Artificial Sequence
  Description of Artificial Sequence: Synthetic polypeptide
MAADGYLPDWLEDNLSEGIREWWDLKPGAPKPKANQQKQDDGRGLVLPGYKYLGPFNGLDKGEPVNAADAAALEHDKAYDQQLKAGDNPYLRYNHADAEFQERLQEDTSFGGNLGRAVFQAKKRVLEPFGLVEEGAKTAPGKKRPVEQSPQEPDSSSGIGKTGQQPAKKRLNFGQTGDSESVPDPQPLGEPPATPAAVGPTTMASGGGAPMQDNNEGADGVGSSSGNWHCDSTWLGDRVITTSTRTWALPTYNNHLYKQISNGTSGGATNDNTYFGYSTPWGYFDFNRFHCHFSPRDWQRLINNNWGFRPKRLNFKLFNIQVKEVTQNEGTKTIANNLTSTIQVFTDSEYQLPYVLGSAHQGCLPPFPADVFMIPQYGYLTLNNGSQAVGRSSFYCLEYFPSQMLRTGNNFTFSYTFEDVPFHSSYAHSQSLDRLMNPLIDQYLYYLSRTQTTGGTANTQTLGFSQGGPNTMANQAKNWLPGPCYRQQRVSTTTGQNNNSNFAWTAGTKYHLNGRNSLANPGIAMATHKDDKERFFPSNGILIFGKQNAARDNADYSDVMLTSEEEIKTTNPVATEEYGIVADNLQQQNTAPQIGTVNSQGALPGMVWQNRDVYLQGPIWAKIPHTDGNFHPSPLMGGFGLKHPPPQILIKNTPVPADPPTTFNQSKLNSFITQYSTGQVSVEIEWELQKENSKRWNPEIQYTSNYYKSTSVDFAVNTEGVYSEPHPIGTRYLTRPL

SEQ ID NO: 2031 - protein, 736 aa, Artificial Sequence
  Description of Artificial Sequence: Synthetic polypeptide
MAADGYLPDWLEDNLSEGIREWWALKPGAPKPKANQQKQDDGRGLVLPGYKYLGPFNGLDKGEPVNAADAAALEHDKAYDQQLKAGDNPYLRYNHADAEFQERLQEDTSFGGNLGRAVFQAKKRVLEPLGLVEEGAKTAPGKKRPVEQSPQEPDSSSGIGKTGQQPAKKRLNFGQTGDSESVPDPQPLGEPPATPAAVGPTTMASGGGAPMADNNEGADGVGSSSGNWHCDSTWLGDRVITTSTRTWALPTYNNHLYKQISSASTGASNDNHYFGYSTPWGYFDFNRFHCHFSPRDWQRLINNNWGFRPKRLNFKLFNIQVKEVTDNNGVKTIANNLTSTVQVFTDSDYQLPYVLGSAHEGCLPPFPADVFMIPQYGYLTLNNGSQAVGRSSFYCLEYFPSQMLRTGNNFTFSYTFEDVPFHSSYAHSQSLDRLMNPLIDQYLYYLSRTQTTGGTANTQTLGFSQGGPNTMANQAKNWLPGPCYRQQRVSTTTGQNNNSNFAWTAGTKYHLNGRNSLANPGIAMATHKDDKERFFPSNGILIFGKQNAARDNADYSDVMLTSEEEIKTTNPVATEEYGIVADNLQQQNTAPQIGTVNSQGALPGMVWQNRDVYLQGPIWAKIPHTDGNFHPSPLMGGFGLKHPPPQILIKNTPVPADPPTTFNQSKLNSFITQYSTGQVSVEIEWELQKENSKRWNPEIQYTSNYYKSTSVDFAVNTEGVYSEPHPIGTRYLTRPL

SEQ ID NO: 2032 - protein, 737 aa, Artificial Sequence
  Description of Artificial Sequence: Synthetic polypeptide
MAADGYLPDWLEDNLSEGIREWWDLKPGAPKPKANQQKQDDGRGLVLPGYKYLGPFNGLDKGEPVNAADAAALEHDKAYDQQLKAGDNPYLRYNHADAEFQERLQEDTSFGGNLGRAVFQAKKRVLEPLGLVEEGAKTAPGKKRPVEPSPQRSPDSSTGIGKKGQQPARKRLNFGQTGDSESVPDPQPLGEPPATPAAVGPTTMASGGGAPMADNNEGADGVGNASGNWHCDSTWLGDRVITTSTRTWALPTYNNHLYKQISSASTGASNDNHYFGYSTPWGYFDFNRFHCHFSPRDWQRLINNNLGSRPKRLNFKLFIIQVKEVTTNDGVTTIANNLTSTVQVFSDSEYQLPYVLGSAHQGCLPPFPADVFMIPQYGYLTLNNGSQAVGRSSFYCLEYFPSQMLRTGNNFTFSYTFEDVPFHSSYAHSQSLDRLMNPLIDQYLYYLNRTQNQSGSAQNKDLLFSRGSPAGMSVQPKNWLPGPCYRQQRVSKTKTDNNNSNFTWTGASKYNLNGRESIINPGTAMASHKDDKDKFFPMSGVMIFGKESAGASNTALDNVMITDEEEIKATNPVATERFGTVAVNLQSSSTDPATGDVHVMGALPGMVWQDRDVYLQGPIWAKIPHTDGHFHPSPLMGGFGLKHPPPQILIKNTPVPANPPAEFSATKFASFITQYSTGQVSVEIEWELQKENSKRWNPEVQYTSNYAKSANVDFTVDNNGLYTEPRPIGTRYLTRPL

SEQ ID NO: 2033 - protein, 736 aa, Artificial Sequence
  Description of Artificial Sequence: Synthetic polypeptide
MAADGYLPDWLEDNLSEGIREWWALKPGAPKPKANQQKQDDGRGLVLPGYKYLGPFNGLDKGEPVNAADAAALEHDKAYDQQLKAGDNPYLRYNHADAEFQERLQEDTSFGGNLGRAVFQAKKRLLEPLGLVEEAAKTAPGKKRPVEQSPQEPDSSSGIGKTGQQPAKKRLNFGQTGDSESVPDPQPIGEPPATPAAVGPTTMASGGGAPMADNNEGADGVGNSSGNWHCDSTWLGDRVITTSTRTWALPTYNNHLYKQISSASTGASNDNHYFGYSTPWGYFDFNRFHCHFSPRDWQRLINNNWGFRPKRLNFKLFNIQVKEVTQNEGTKTIANNLTSTIQVFTDSEYQLPYVLGSAHQGCLPPFPADVFMIPQYGYLTLNNGSQAVGRSSFYCLEYFPSQMLRTGNNFTFSYTFEDVPFHSSYAHSQSLDRLMNPLIDQYLYYLSRTQTTGGTANTQTLGFSQGGPNTMANQAKNWLPGPCYRQQRVSTTTGQNNNSNFAWTAGTKYHLNGRNSLANPGIAMATHKDDKERFFPSNGILIFGKQNAARDNADYSDVMLTSEEEIKTTNPVATEEYGIVADNLQQQNTAPQIGTVNSQGALPGMVWQNRDVYLQGPIWAKIPHTDGNFHPSPLMGGFGLKHPPPQILIKNTPVPADPPTTFNQSKLNSFITQYSTGQVSVEIEWELQKENSKRWNPEIQYTSNYYKSTSVDFAVNTEGVYSDPHPIGTRYLTRPL

SEQ ID NO: 2034 - protein, 736 aa, Artificial Sequence
  Description of Artificial Sequence: Synthetic polypeptide
MAADGYLPDWLEDNLSEGIREWWALKPGAPKPKANQQEQDDGRGLVLPGYKYLGPFNGLDKGEPVNAADAAALEHDKAYDQQLKAGDNPYLRYNHADAEFQERLQEDTSFGGNLGRAVFQAKKRVLEPFGLVEEGAKTAPGKKRPVEQSPQEPDSSSGIGKTGQQPAKKRLNFGQTGDSESVPDPQPLGEPPAAPSGVGPNTMAAGGGAPMADNNEGADGVGSSSGNWHCDSTWLGDRVITTSTRTWALPTYNNHLYKQISSASTGASNDNHYFGYSTPWGYFDFNRFHCHFSPRDWQRLINNNWGFRPKRLNFKLFNIQVKEVTQNEGTKTIANNLTSTIQVFTDSEYQLPYVLGSAHQGCLPPFPADVFMIPQYGYLTLNNGSQAVGRSSFFCLEYFPSQMLRTGNNFTFSYTFEDVPFHSSYAHSQSLDRLMNPLIDQYLYYLSRTQTTGGTANTQTLGFSQGGPNTMANQAKNWLPGPCYRQQRVSTTTGQNNNSNFAWTAGTKYHLNGRNSLANPGIAMATHKDDKERFFPSNGILIFGKQNAARDNADYSDVMLTSEEEIKTTNPVATEEYGIVADNLQQQNTAPQIGTVNSQGALPGMVWQNRDVYLQGPIWAKIPHTDGNFHPSPLMGGFGLKHPPPQILIKNTPVPADPPTTFNQSKLNSFITQYSTGQVSVEIEWELQKENSKRWNPEIQYTSNYYKSTSVDFAVNTEGVYSEPHPIGTRYLTRPL

SEQ ID NO: 2035 - protein, 736 aa, Artificial Sequence
  Description of Artificial Sequence: Synthetic polypeptide
MAADGYLPDWLEDNLSEGIREWWDLKPGAPKPKANQQKQDDGRGLVLPGYKYLGPFNGLDKGEPVNAADAAALEHDKAYDQQLKAGDNPYLRYNHADAEFQERLQEDTSFGGNLGRAVFQAKKRVLEPLGLVEEGAKTAPGKKRPVEQSPQEPDSSSGIGKTGQQPAKKRLNFGQTGDSESVPDPQPLGEPPATPAAVGPTTMASGGGAPMADNNEGADGVGNASGNWHCDSTWLGDRVITTSTRTWALPTYNNHLYKQISSASTGASNDNHYFGYSTPWGYFDFNRFHCHFSPRDWQRLINNNWGFRPKRLNFKLFNIQVKEVTTNDGVTTIANNLTSTVQVFSDSEYQLPYVLGSAHQGCLPPFPADVFMIPQYGYLTLNNGSQAVGRSSFYCLEYFPSQMLRTGNNFTFSYTFEDVPFHSSYAHSQSLDRLMNPLIDQYLYYLNRTQNQSGSAQNKDLLFSRGSPAGMSVQPKNWLPGPCYRQQRVSKTKTDNNNSNFTWTGASKYNLNGRESIINPGTAMASHKDDKDKFFPMSGVMIFGKESAGASNTALDNVMITDEEEIKATNPVATERFGTVAVNLQNSSTDPATGDVHVMGALPGMVWQDRDVYLQGPIWAKIPHTDGHFHPSPLMGGFGLKHPPPQILIKNTPVPANPPAEFSATKFASFITQYSTGQVSVEIEWELQKENSKRWNPEVQYTSNYAKSANVDFTVDNNGLYTVPRPIGTRYLTRPL

SEQ ID NO: 2036 - protein, 736 aa, Artificial Sequence
  Description of Artificial Sequence: Synthetic polypeptide
MAADGYLPDWLEDNLSEGIREWWALKPGAPKPKANQQKQDDGRGLVLPGYKYLGPFNGLDKGEPVNAADAAALEHDKAYDQQLKAGDNPYLRYNHADAEFQERLQEDTSFGGNLGRAVFQAKKRLLEPLGLVEEGAKTAPGKKRPVEQSPQEPDSSSGIGKTGEQPAKKRLNFGQTGDSESVPDPQPLGEPPATPAAVGPTTMASGGGAPMADNNEGADGVGSASGNWHCDSTWLGDRVITTSTRTWALPTYNNHLYKQISSASTGASNDNHYFGYSTPWGYFDFNRFHCHFSPRDWQRLINNNWGFRPKRLNFKLFNIQVKEVTDNNGVKTIANNLTSTIQVFTDSEYQLPYVLGSAHQGCLPPFPADVFMIPQYGYLTLNNGSQAVGRSSFYCLEYFPSQMLRTGNNFPFSYTFEDVPFHSSYAHSQSLDRLMNPLIDQYLYYLSRTQTTGGTANTQTLGFSQGGPNTMANQAKNWLPGPCYRQQRVSTTTGQNNNSNFAWTAGTKYHLNGRNSLANPGIAMATHKDDKERFFPSNGILIFGKQNAARDNADYSDVMLTSEEEIKTTNPVATEEYGIVADNLQQQNTAPQIGTVNSQGALPGMVWQNRDVYLQGPIWAKIPHTDGNFHPSPLMGGFGLKHPPPQILIKNTPVPADPPTTFNQSKLNSFITQYSTGQVSVEIEWELQKENSKRWNPEIQYTSNYYKSTSVDFAVNTEGVYSEPHPIGTRYLTRPL

SEQ ID NO: 2037 - protein, 736 aa, Artificial Sequence
  Description of Artificial Sequence: Synthetic polypeptide
MAADGYLPDWLEDNLSEGIREWWALKPGAPKPKANQQKQDDGRGLVLPGYKYLGPFNGLDKGEPVNAADAAALEHDKAYDQQLKAGDNPYLRYNHADAEFQERLQEDTSFGGNLGRAVFQAKKRVLEPLGLVEEGAKTAPGKKRPVEQSPQEPDSSSGIGKTGQQPAKKRLNFGQTGDSESVPDPQPLGEPPATPAAVGPTTMASGGGAPMADNNEGADGVGSSSGNWHCDSQWLGDRVITTSTRTWALPTYNNHLYKQISSASTGASNDNHYFGYSTPWGYFDFNRFHCHFSPRDWQRLINNNWGFRPKRLNFKLFNIQVKEVTDNNGVKTIANNLTSTVQVFTDSEYQLPYVLGSAHQDCLPPFPADVFMIPQYGYLTLNNGSQAVGRSSFYCLEYFPSQMLRTGNNFTFSYTFEDVPFHSSYAHSQSLDRLMNPLIDQYLYYLSRTQTTGGTANTQTLGFSQGGPNTMANQAKNWLPGPCYRQQRVSTTTGQNNNSNFAWTAGTKYHLNGRNSLANPGIAMATHKDDKERFFPSNGILIFGKQNAARDNADYSDVMLTSEEEIKTTNPVATEEYGIVADNLQQQNTAPQIGTVNSQGALPGMVWQNRDVYLQGPIWAKIPHTDGNFHPSPLMGGFGLKHPPPQILIKNTPVPADPPTTFNQSKLNSFITQYSTGQVSVEIEWELQKENSKRWNPEIQYTSNYYKSTSVDFAVNTEGVYSEPHPIGTRYLTRPL

SEQ ID NO: 2038 - protein, 735 aa, Artificial Sequence
  Description of Artificial Sequence: Synthetic polypeptide
MAADGYLPDWLEDNLSEGIREWWDLKPGAPKPKANQQKQDDGRGLVLPGYKYLGPFNGLDKGEPVNAADAAALEHDKAYDQQLKAGDNPYLRYNHADAEFQERLQEDTSFGGNLGRAVFQAKKRVLEPLGLVEEGAKTAPGKKRPVEQSPQEPDSSSGIGKTGQQPAKKRLNFGQTGDSESVPDPQPLGEPPATPAAVGPTTMASGGGAPMADNNEGADGVGNASGNWHCDSTWLGDVITTSTRTWALPTYNNHLYKQISSASTGASNDNHYFGYSTPWGYFDFNRFHCHFSPRDWQRLINNNWGFRPKRLNFKLFNIQVKEVTQNEGTKTIANNLTSTIQVFTDSEYQLPYVLGSAHQGCLPPFPADVFMIPQYGYLTLNNGSQAVGRSSFYCLEYFPSQMLRTGNNFQFTYTFEDVPFHSSYAHSQSLDRLMNPLIDQYLYYLSRTQTTGGTANTQTLGFSQGGPNTMANQAKNWLPGPCYRQQRVSTTTGQNNNSNFAWTAGTKYHLNGRNSLANPGIAMATHKDDKERFFPSNGILIFGKQNAARDNADYSDVILTSEEEIKTTNPVATEEYGIVADNLQQQNTAPQIGTVNSQGALPGMVWQNRDVYLQGPIWAKIPHTDGNFHPSPLMGGFGLKHPPPQILIKNTPVPADPPTTFNQSKLNSFITQYSTGQVSVEIEWELQKENSKRWNPEIQYTSNYYKSTSVDFAVNTEGVYSEPHPIGTRYLTRPL

SEQ ID NO: 2039 - protein, 736 aa, Artificial Sequence
  Description of Artificial Sequence: Synthetic polypeptide
MAADGYLPDWLEDTLSEGIRQWWKLKPGPPPPKPAERHKDDSRGLVLPGYKYLGPFNGLDKGEPVNEADAAALEHDKAYDRQLDSGDNPYLKYNHADAEFQERLKEDTSFGGNLGRAVFQAKKRVLEPFGLVEEGAKTAPGKKRPVEQSPQEPDSSSGIGKTGQQPAKKRLNFGQTGDSESVPDPQPLGEPPATPAAVGPTTMASGGGAPMADNNEGADGVGNASGNWHCDSTWLGDRVITTSTRTWALPTYNNHLYKQISSTSTGASNDNHYFGYSTPWGYFDFNRFHCHFSPRDWQRLINNNWGFRPKRLNFKLFNIQVKEVTDNNGVKTIANNLTSTVQVFTDSEYQLPYVLGSAHQGCLPPFPADVFMIPQYGYLTLNNGSQAVGRSSFYCLEYFPSQMLRTGNNFTFSYTFEDVPFHSSYAHSQSLDRLMNPLIDQYLYYLSRTQTTGGTANTQTLGFSQGGPNTMANQAKNWLPGPCYRQQRVSTTTGQNNNSNFAWTAGTKYHLNGRNSLANPGIAMATHKDDKERFFPSNGILIFGKQNAARDNADYSDVMLTSEEEIKTTNPVATEEYGIVADNLQQQNTAPQIGTVNSQGALPGMVWQNRDVYLQGPIWAKIPHTDGNFHPSPLMGGFGLKHPPPQILIKNTPVPADPPTTFNQSKLNSFITQYSTGQVSVEIEWELQKENSKRWNPEIQYTSNYYKSTSVDFAVNTEGVYSEPHPIGTRYLTRPL

SEQ ID NO: 2040 - protein, 735 aa, Artificial Sequence
  Description of Artificial Sequence: Synthetic polypeptide
MAADGYLPDWLEDNLSEGIREWWDLKPGAPKPKANQQKQDDGRGLVLPGYKYLGPFNGLDKGEPVNAADAAALEHDKAYDRQLDSGDNPYLRYNHADAEFQERLKEDTSFGGNLGRAVFQAKKRVLEPFGLVEEGAKTAPGKKRPVEQSPQEPDSSSGIGKTGQQPAKKRLNFGQTGDSESVPDPQPLGEPPATPAAVGPTTMASGGGAPMADNNEGADGVGNASGNWHCDSTWLGDRVITTSTRTWALPTYNNHLYKQISSASTGASNDNHYFGYSTPWGYFDFNRFHCHFSPRDWQRLINNNWGFRPKRLNFKLFNIQVKEVTQNEGTKTIANNLTSTIQVFTDSEYQLPYVLGSAHQGCLPPFPADVFMIPQYGYLTLNNGSQAVGRSSFYCLEYFPSQMLRTGNNFQFTYTFEDVPFHSSYAHSQSLDRLMNPLIDQYLYYLSRTQTTGGTANTQTLGFSQGGPNTMANQAKNWLPGPCYRQQRVSTTTGQNNNSNFAWTAGTKYHLNGRNSLANPGIAMATHKDDRSVFFQYRDPDFGKQNAARDNADYSDVMLTSEEEIKTTNPVATEEYGIVADNLQQQNTAPQIGTVNSQGALPGMVWQNRDVYLQGPIWAKIPHTDGNFHPSPLMGGFGLKHPPPQILIKNTPVPADPPTTFNQSKLNSFITQYSTGQVSVEIEWELQKENSKRWNPEIQYTSNYYKSTSVDFAVNTEGVYSEPHPIGTRYLTRPL

SEQ ID NO: 2041 - protein, 736 aa, Artificial Sequence
  Description of Artificial Sequence: Synthetic polypeptide
MAADGYLPDWLEDNLSEGIREWWALKPGAPKPKANQQKQDDGRGLVLPGYKYLGPFNGLDKGEPVNAADAAALEHDKAYDQQLKAGDNPYLKYNHADAEFQERLQGDTSFGGNLGRAVFQAKKRVLEPLGLVEEAAKTAPGKKRPVEQSPQEPDSSAGIGKSGAQPAKKRLNFGQTGDTESVPDPQPLGEPPAAPSGVGPNTMAAGGGAPMADNNEGADGVGSSSGNWHCDSQWLGDRVITTSTRTWALPTYNNHLYKQISSASTGASNDNHYFGYSTPWGYFDFNRFHCHFSPRDWQRLINNNWGFRPKRLNFKLFNIQVKEVTDNNGVKTIANNLTSTVQVFTDSDYQLPYVLGSAHEGCLPPFPADVFMIPQYGYLTLNNGSQAVGRSSFYCLEYFPSQMLRTGNNFQFTYTFEDVPFHSSYAHSQSLDRLMNPLIDQYLYYLSRTQTTGGTANTQTLGFSQGGPNTMANQAKNWLPGPCYRQQRVSTTTGQNNNSNFAWTAGTKYHLNGRNSLANPGIAMATHKDDKERFFPSNGILIFGKQNAARDNADYSDVMLTSEEEIKTTNPVATEEYGIVADNLQQQNTAPQIGTVNSQGALPGMVWQNRDVYLQGPIWAKIPHTDGNFHPSPLMGGFGLKHPPPQILIKNTPVPADPPTTFNQSKLNSFITQYSTGQVSVEIEWELQKENSKRWNPEIQYTSNYYKSTSVDFAVNTEGVYSEPHPIGTRYLTRPL

SEQ ID NO: 2042 - protein, 736 aa, Artificial Sequence
  Description of Artificial Sequence: Synthetic polypeptide
MAADGYLPDWLEDTLSEGIRQWWKLKPGPPPPKPAERHKDDSRGLVLPGYKYLGPFNGLDKGEPVNEADAAALEHDKAYDRQLDSGDNPYLKYNHADAEFQERLKEDTSFGGNLGRAVFQAKKRVLEPFGLVEEAAKTAPGKKRPVEQSPQEPDSSSGIGKTGQQPAKKRLNFGQTGDSESVPDPQPLGEPPATPAAVGPTTMASGGGAPMADNNEGADGVGNASGNWHCDSTWLGDRVITTSTRTWALPTYNNHLYKQISSASTGASNDNHYFGYSTPWGYFDFNRFHCHFSPRDWQRLINNNWGFRPKRLNFKLFNIQVKEVTDNNGVKTIANNLTSTVQVFTDSDYQLPYVLGSAHEGCLPPFPADVFMIPQYGYLTLNNGSQAVGRSSFYCLEYFPSQMLRTGNNFTFSYTFEDVPFHSSYAHSQSLDRLMNPLIDQYLYYLSRTQTTGGTANTQTLGFSQGGPNTMANQAKNWLPGPCYRQQRVSTTTGQNNNSNFAWTAGTKYHLNGRNSLANPGIAMATHKDDKERFFPSNGILIFGKQNAARDNADYSDVMLTSEEEIKTTNPVATEEYGIVADNLQQQNTAPQIGTVNSQGALPGMVWQNRDVYLQGPIWAKIPHTDGNFHPSPLMGGFGLKHPPPQILIKNTPVPADPPTTFNQSKLNSFITQYSTGQVSVEIEWELQKENSKRWNPEIQYTSNYYKSTSVDFAVNTEGVYSEPHPIGTRYLTRPL

SEQ ID NO: 2043 - protein, 736 aa, Artificial Sequence
  Description of Artificial Sequence: Synthetic polypeptide
MAADGYLPDWLEDNLSEGIREWWALKPGAPKPKANQQKQDDGRGLVLPGYKYLGPFNGLDKGEPVNAADAAALEHDKAYDQQLKAGDNPYLRYNHADAEFQERLQEDTSFGGNLGRAVFQAKKRVLEPLGLVEEGAKTAPGKKRPVEQSPQEPDSSSGIGKTGQQPAKKRLNFGQTGDSESVPDPQPLGEPPATPAAVGPTTMASGGGAPMADNNEGADGVGSSSGNWHCDSTWLGDRVITTSTRTWALPTYNNHLYKQISSASTGASNDNHYFGYSTPWGYFDFNRFHCHFSPRDWQRLINNNWGFRPKRLNFKLFNIQVKEVTDNNGVKTIANNLTSTVQVFTDSEYQLPYVLGSAHQGCLPPFPADVFMIPQYGYLTLNNGSQAVGRSSFYCLEYFPSQMLRTGNNFTFSYTFEDVPFHSSYAHSQSLDRLMNPLIDQYLYYLSRTQTTGGTANTQTLGFSQGGPNTMANQAKNWLPGPCYRQQRVSTTTGQNNNSNFAWTAGTKYHLNGRNSLANPGIAMATHKDDKERFFPSNGILIFGKQNAARDNADYSDVMLTSEEEIKTTNPVATEEYGIVADNLQQQNTAPQIGTVNSQGALPGMVWQNRDVYLQGPIWAKIPHTDGNFHPSPLMGGFGLKHPPPQILIKNTPVPADPPTTFNQSKLNSFITQYSTGQVSVEIEWELQKENSKRWNPEIQYTSNYYKSTSVDFAVNTEGVYSEPHPIGTRYLTRPL

SEQ ID NO: 2044 - protein, 737 aa, Artificial Sequence
  Description of Artificial Sequence: Synthetic polypeptide
MAADGYLPDWLEDNLSEGIREWWALKPGAPKPKANQQKQDDGRGLVLPGYKYLGPFNGLDKGEPVNAADAAALEHDKAYDQQLKAGDNPYLRYNHADAEFQERLQEDTSFGGNLGRAVFQAKKRVLEPLGLVEEGAKTAPGKKRPVEQSPQEPDSSSGIGKTGQQPAKKRLNFGQTGDTESVPDPQPIGEPPAAPSGVGSLTMASGGGAPVADNNEGADGVGSSSGNWHCDSQWLGDRVITTSTRTWALPTYNNHLYKQISNSTSGGSSNDNAYFGYSTPWGYFDFNRFHCHFSPRDWQRLINNNWGFRPKRLNFKLFNIQVKEVTQNEGTKTIANNLTSTIQVFTDSEYQLPYVLGSAHQGCLPPFPADVFMIPQYGYLTLNNGSQAVGRSSFYCLEYFPSQMLRTGNNFQFTYTFEDVPFHSSYAHSQSLDRLMNPLIDQYLYYLSRTQTTGGTANTQTLGFSQGGPNTMANQAKNWLPGPCYRQQRVSTTTGQNNNSNFAWTAGTKYHLNGRNSLANPGIAMATHKDDKERFFPSNGILIFGKQNAARDNADYSDVMLTSEEEIKTTNPVATEEYGIVADNLQQQNTAPQIGTVNSQGALPGMVWQNRDVYLQGPIWAKIPHTDGNFHPSPLMGGFGLKHPPPQILIKNTPVPADPPTTFNQSKLNSFITQYSTGQVSVEIEWELQKENSKRWNPEIQYTSNYYKSTSVDFAVNTEGVYSEPHPIGTRYLTRPL

SEQ ID NO: 2045 - protein, 736 aa, Artificial Sequence
  Description of Artificial Sequence: Synthetic polypeptide
MAADGYLPDWLEDNLSEGIREWWALKPGAPKPKANQQKQDDGRGLVLPGYKYLGPFNGLDKGEPVNAADAAALEHDKAYDQQLKAGDNPYLKYNHADAEFQERLQGDTSFGGNLGRAVFQAKKRVLEPLGLVEEAAKTAPGKKRPVEQSPQEPDSSAGIGKSGAQPAKKRLNFGQTGDTESVPDPQPLGEPPAAPSGVGPNTMAAGGGAPMADNNEGADGVGSSSGNWHCDSQWLGDRVITTSTRTWALPTYNNHLYKQISSASTGASNDNHYFGYSTPWGYFDFNRFHCHFSPRDWQRLINNNWGFRPKRLNFKLFNIQVKEVTDNNGVKTIANNLTSTVQVFTDSEYQLPYVLGSAHQGCLPPFPADVFMIPQYGYLTLNNGSQAVGRSSFYCLEYFPSQMLRTGNNFTFSYTFEDVPFHSSYAHSQSLDRLMNPLIDQYLYYLSRTQTTGGTANTQTLGFSQGGPNTMANQAKNWLPGPCYRQQRVSTTTGQNNNSNFAWTAGTKYHLNGRNSLANPGIAMATHKDDKERFFPSNGILIFDKQNAARDNADYSDVMLTSEEEIKTTNPVATEEYGIVADNLQQQNTAPQIGTVNSQGALPGMVWQNRDVYLQGPIWAKIPHTDGNFHPSPLMGGFGLKHPPPQILIKNTPVPADPPTTFNQSKLNSFITQYSTGQVSVEIEWELQKENSKRWNPEIQYTSNYYKSTSVDFAVNTEGVYSEPHPIGTRYLTRPL

SEQ ID NO: 2046 - protein, 736 aa, Artificial Sequence
  Description of Artificial Sequence: Synthetic polypeptide
MAADGYLPDWLEDTLSEGIRQWWKLKPGPPPPKPAERHKDDSRGLVLPGYKYLGPFNGLDKGEPVNEADAAALEHDKAYDRQLDSGDNPYLKYNHADAEFQERLKEDTSFGGNLGRAVFQAKKRVLEPLGLVEEPVKTAPGKKRPVEHSPVEPDSSSGTGKAGQQPARKRLNFGQTGDSESVPDPQPLGEPPATPAAVGPNTMATGSGAPMADNNEGADGVGNSSGNWHCDSTWMGDRVITTSTRTWALPTYNNHLYKQISSASTGASNDNHYFGYSTPWGYFDFNRFHCHFSPRDWQRLINNNWGFRPKRLNFKLFNIQVKEVTDNNGVKTIANNLTSTIQVFTDSEYQLPYVLGSAHQGCLPPFPADVFMIPQYGYLTLNNGSQAVGRSSFYCLEYFPSQMLRTGNNFTFSYTFEDVPFHSSYAHSQSLDRLMNPLIDQYLYYLSRTQTTGGKANTQTLGFSQGGPNTMANQAKNWLPGPCYRQQRVSTTTGQNNNSNFAWTAGTKYHLNGRNSLANPGIAMATHKDDKERFFPSNGILIFGKQNAARDNADYSDVMLTSEEEIKTTNPVATEEYGIVADNLQQQNTAPQIGTVNSQGALPGMVWQNRDVYLQGPIWAKIPHTDGNFHPSPLMGGFGLKHPPPQILIKNTPVPADPPTTFNQSKLNSFITQYSTGQVSVEIEWELQKENSKRWNPEIQYTSNYYKSTSVDFAVNTEGVYSEPHPIGTRYLTRPL

SEQ ID NO: 2047 - protein, 736 aa, Artificial Sequence
  Description of Artificial Sequence: Synthetic polypeptide
MAADGYLPDWLEDNLSEGIREWWALKPGAPKPKANQQKQDDGRGLVLPGYKYLGPFNGLDKGEPVNAADAAALEHDKAYDQQLKAGDNPYLRYNHADAEFQERLQEDTSFGGNLGRAVFQAKKRVLEPFGLVEEGAKTAPGKKRPVEQSPQEPDSSSGIGKTGQQPAKKRLNFGQTGDSESVPDPQPLGEPPATPAAVGPTTMASGGGAPMADNNEGADGVGNASGNWHCDSTWLGDRVITTSTRTWALPTYNNHLYKQISSASTGASNDNHYFGYSTPWGYFDFNRFHCHFSPRDWQRLINNNWGFRPKRLNFKLFNIQVKEVTDNNGVKTIANNLTSTVQVFTDSEYQLPYVLGSAHQGCLPPFPADVFMIPQYGYLTLNNGSQAVGRSSFYCLEYFPSQMLRTGNNFTFSYTFEDVPFHSSYAHSQSLDRLMNPLIDQYLYYLSRTQTTGGTGNTQTLGFSQGGPNTMANQAKNWLPGPCYRQQRVSTTTGQNNNSNFAWTAGTKYHLNGRNSLANPGIAMATHKDDKERFFPSNGILIFGKQNAARDNADYSDVMLTSEEEIKTTNPVATEEYGIVADNLQQQNTAPQIGTVNSQGALPGMVWQNRDVYLQGPIWAKIPHTDGNFHPSPLMGGFGLKHPPPQILIKNTPVPADPPTTFNQSKLNSFITQYSTGQVSVEIEWELQKENSKRWNPEIQYTSNYYKSTSVDFAVNTEGVYSEPHPIGTRYLTRPL

SEQ ID NO: 2048 - protein, 736 aa, Artificial Sequence
  Description of Artificial Sequence: Synthetic polypeptide
MAADGYLPDWLEDNLSEGIREWWDLKPGAPKPKANQQKQDDGRGLVLPGYKYLGPFNGLDKGEPVNAADAAALEHDKAYDQQLKAGDNPYLRYNHADAEFQERLQEDTSFGGNLGRAVFQAKKRVLEPLGLVEEGAKTAPGKKRPVEQSPQEPDSSSGIGKTGQQPAKKRLNFGQTGDSESVPDPQPLGEPPATPAAVGPTTMASGGGAPMADNNEGADGVGSSSGNWHCDSTWLGDRVITTSTRTWALPTYNNHLYKQISSASTGASNDNHYFGYSTPWGYFDFNRFHCHFSPRDWQRLINNNWGFRPKRLNFKLFNIQVKEVTQNEGTKTIANNLTSTIQVFTDSEYQLPYVLGSAHQGCLPPFPADVFMIPQYGYLTLNNGSQAVGRSSFYCLEYFPSQMLRTGNNFTFSYTFEDVPFHSSYAHSQSLDRLMNPLIDQYLYYLSRTQTTGGTANTQTLGFSQGGPNTMANQAKNWLPGPCYRQQRVSTTTGQNNNSNFAWTAGTKYHLNGRNSLANPGIAMATHKDDKERFFPSNGILIFGKQNAARDNADYSDVMLTSEEEIKTTNPVATEEYGIVADNLQQQNTAPQIGTVNSQGALPGMVWQNRDVYLQGPIWAKIPHTDGNFHPSPLMGGFGLKHPPPQILIKNTPVPADPPTTFNQSKLNSFITQYSTGQVSVEIEWELQKENSKRWNPEIQYTSNYYKSTSVDFAVNTEGVYSEPHPIGTRYLTRPL

SEQ ID NO: 2049 - protein, 736 aa, Artificial Sequence
  Description of Artificial Sequence: Synthetic polypeptide
MAADGYLPDWLEDNLSEGIREWWALKPGAPKPKANQQKQDDGRGLVLPGYKYLGPFNGLDKGEPVNAADAAALEHDKAYDQQLKAGDNPYLRYNHADAEFQERLQEDTSFGGNLGRAVFQAKKRVLEPLGLVEEGAKTAPGKKRPVEQSPQEPDSSSGIGKTGQQPAKKRLNFGQTGDSESVPDPQPLGEPPATPAAVGPTTMAAGGGAPMADNNEGADGVGSSSGNWHCDSTWMGDRVITTSTRTWALPTYNNHLYKQISSASTGASNDNHYFGYSTPWGYFDFNRFHCHFSPRDWQRLINNNWGFRPKRLSFKLFNIQVKEVTQNEGTKTIANNLTSTIQVFTDSEYQLPYVLGSAHQGCLPPFPADVFMIPQYGYLTLNNGSQAVGRSSFYCLEYFPSQMLRTGNNFTFSYTFEDVPFHSSYAHSQSLDRLMNPLIDQYLYYLSRTQTTGGTANTQTLGFSQGGPNTMANQAKNWLQGPCYRQQRVSTTTGQNNNSNFAWTAGTKYHLNGRNSLANPGIAMATHKDDKERFFPSNGILIFGKQNAARDNADYSDVMLTSEEEIKTTNPVATEEYGIVADNLQQQNTAPQIGTVNSQGALPGMVWQNLDVYLQGPIWAKIPHTDGNFHPSPLMGGFGLKHPPPQILIKNTPVPADPPTTFNQSKLNSFITQYSTGQVSVEIEWELQKENSKRWNPEIQYTSNYYKSTSVDFAVNTEGVYSEPHPIGTRYLTRPL

SEQ ID NO: 2050 - protein, 737 aa, Artificial Sequence
  Description of Artificial Sequence: Synthetic polypeptide
MAADGYLPDWLEDNLSEGIREWWALKPGAPKPKANQQKQDDGRGLVLPGYKYLGPFNGLDKGEPVNAADAAALEHDKAYDQQLKAGDNPYLRYNHADAEFQERLQEDTSFGGNLGRAVFQAKKRVLEPLGLVEEGAKTAPGKKRPVEPSPQRSPDSSSGIGKTGQQPAKKRLNFGQTGDSESVPDPQPLGEPPATPAAVGPTTMASGGGAPMADNNEGADGVGNASGNWHCDSQWLGDRVITTSTRTWALPTYNNHLYKQISSASTGASNDNHYFGYSTPWGYFDFNRFHCHFSPRDWQRLINNNWGFRPKRLNFKLFNIQVKEVTDNNGVKTIANNLTSTVQVFTDSDYQLPYVLGSAHEGCLPPFPADVFMIPQYGYLTLNNGSQAVGRSSFYCLEYFPSQMLRTGNNFQFTYTFEDVPFHSSYAHSQSLDRLMNPLIDQYLYYLSRTQTTGGTANTQTLGFSQGGPNTMANQAKNWVPGPCYRQQRVSTATGQNNNSNFAWTAGTKYHLKGRNSLANPGIAMATHKDDKERFFPSNGILIFGKQNAARDNADYSDVMLTSEEEIKTTNPVATEEYGIVADNLQQQNTAPQIGTVNSQGALPGMVWQNRDVYLQGPIWAKIPHTDGNFHPSPLMGGFGLKHPPPQILIKNTPVPADPPTTFNQSKLNSFITQYSTGQVSVEIEWELQKENSKRWNPEIQYTSNYYKSTSVDFAVNTEGVYSEPHPIGTRYLTRPL

SEQ ID NO: 2051 - protein, 737 aa, Artificial Sequence
  Description of Artificial Sequence: Synthetic polypeptide
  misc_feature (226)..(226): Xaa can be any naturally occurring amino acid
  misc_feature (233)..(233): Xaa can be any naturally occurring amino acid
  misc_feature (239)..(239): Xaa can be any naturally occurring amino acid
  misc_feature (250)..(250): Xaa can be any naturally occurring amino acid
  misc_feature (253)..(253): Xaa can be any naturally occurring amino acid
  misc_feature (255)..(255): Xaa can be any naturally occurring amino acid
MAADGYLPDWLEDTLSEGIRQWWKLKPGPPPPKPAERHKDDSRGLVLPGYKYLGPFNGLDKGEPVNEADAAALEHDKAYDRQLDSGDNPYLKYNHADAEFQERLKEDTSFGGNLGRAVFQAKKRVLEPLGLVEEGAKTAPGKKRPVEQSPQEPDSSSGIGKTGQQPAKKRLNFGQTGDSESVPDPQPLGEPPATPSGVGPNTMAAGGGAPMADNNEGADGVGSSSXNWHCDSXWLGDRXITTSTRTWALXTYXNXLYKQISNSTSGGATNDNTYFGYSTPWGYFDFNRFHCHFSPRDWQRLINNNWGFRPKRLNFKLFNIQVKEVTQNEGTKTIANNLTSTIQVFTDSEYQLPYVLGSAHQGCLPPFPADVFMIPQYGYLTLNNGSQAVGRSSFYCLEYFPSQMLRTGNNFQFTYTFEDVPFHSSYAHSQSLDRLMNPLIDQYLYYLSRTQTTGGTANTQTLGFSQGGPNTMANQAKNWLPGPCYRQQRVSTTTGQNNNSNFAWTAGTKYHLNGRNSLANPGIAMATHKDDKERFFPSNGILIFGKQNAARDNADYSDVMLTSEEEIKTTNPVATEEYGIVADNLQQQNTAPQIGTVNSQGALPGMVWQNRDVYLQGPIWAKIPHTDGNFHPSPLMGGFGLKHPPPQILIKNTPVPADPPTTFSQAKLASFITQYSTGQVSVEIEWELQKENSKRWNPEVQYTSNYAKSANVDFTVDNNGLYTEPRPIGTRYLTRPL

SEQ ID NO: 2052 - protein, 737 aa, Artificial Sequence
  Description of Artificial Sequence: Synthetic polypeptide
MAADGYLPDWLEDNLSEGIREWWDLKPGAPKPKANQQKQDDGRGLVLPGYKYLGPFNGLDKGEPVNAADAAALEHDKAYDQQLKAGDNPYLRYNHADAEFQERLQEDTSFGGNLGRAVFQAKKRVLEPLGLVEEGAKTAPGKKRPVEPSPQRSPDSSTGIGKKGQQPAKKRLNFGQTGDSESVPDPQPIGEPPAGPSGVGSLTMASGGGAPVADNNEGADGVGSSSGNWHCDSQWLGDRVITTSTRTWALPTYNNHLYKQISSASTGASNDNHYFGYSTPWGYFDFNRFHCHFSPRDWQRLINNNWGFRPKRLNFKLFNIQVKEVTDNDGVKTIANNLTSTIQVFTDSEYQLPYVLGSAHQGCLPPFPADVFMIPQYGYLTLNNGSQAVGRSSFYCLEYFPSQMLRTGNNFTFSYTFEDVPFHSSYAHSQSLDRLMNPLIDQYLYYLSRTQTTGGTANTQTLGFSQGGPNTMANHAKNWLPGPCYRQQRVSTTTGQNNNSNFAWTAGTKYHLNGRNSLANPGIAMATHKDDKERFFPSNGILIFGKQNAARDNADYSDVMLTSEEEIKTTNPVATEEYGIVADNLQQQNTAPQIGTVNSQGALPGMVWQNRDVYLQGPIWAKIPHTDGNFHPSPLMGGFGLKHPPPQILIKNTPVPADPPTTFNQSKLNSFITQYSTGQVSVEIEWELQKENSKRWNPEIQYTSNYYKSTSVDFAVNTEGVYSEPHPIGTRYLTRPL

SEQ ID NO: 2053 - protein, 736 aa, Artificial Sequence
  Description of Artificial Sequence: Synthetic polypeptide
MAADGYLPDWLEDTLSEGIRQWWKLKPGPPPPKPAERHKDDSRGLVLPGYKYLGPFNGLDKGEPVNEADAAALEHDKAYDRQLDSGDNPYLKYNHADAEFQERLKEDTSFGGNLGRAVFQAKKRVLEPLGLVEEPVKTAPGKKRPVEHSPVEPDSSSGTGKAGQQPAKKRLNFGQTGDSESVPDPQPLGEPPATPAAVGPTTMASGGGAPMADNNEGADGVGNASGNWHCDSTWLGDRVITTSTRTWALPTYNNHLYKQISSASTGASNDNHYFGYSTPWGYFDFNRFHCHFSPRDWQRLINNNWGFRPKRLNFKLFNIQVKEVTQNEGTKTIANNLTSTIQVFTDSEYQLPYVLGSAHQGCLPPFPADVFMIPQYGYLTLNNGSQAVGRSSFYCLEYFPSQMLRTGNNFQFTYTFEDVPFHSSYAHSQSLDRLMNPLIDQYLYYLSRTQTTGGTANTQTLGFSQGGPNTMANQAKNWLPGPCYRQQRVSTTTGQNNNSNFAWTAGTKYHLNGRNSLANPGIAMATHKDDKERFFPSNGILIFGKQNAARDNADYSDVMLTSEEEIKTTNPVATEEYGIVADNLQQQNTAPQIGTVNSQGALPGMVWQNRDVYLQGPIWAKIPHTDGNFHPSPLMGGFGLKHPPPQILIKNTPVPADPPTTFNQSKLNSFITQYSTGQVSVEIEWELQKENSKRWNPEIQYTSNYYKSTSVDFAVNTEGVYSEPHPIGTRYLTRPL

SEQ ID NO: 2054 - protein, 736 aa, Artificial Sequence
  Description of Artificial Sequence: Synthetic polypeptide
MAADGYLPDWLEDNLSEGIREWWALKPGAPKPKANQQKQDDGRGLVLPGYKYLGPFNGLDKGEPVNAADAAALEHDKAYDQQLQAGDNPYLRYNHADAEFQERLQGDTSFGGNLGRAVFQAKKRVLEPLGLVEEGAKTAPGKKRPVEQSPQEPDSSSGIGKTGQQPAKKRLNFGQTGDSESVPDPQPLGEPPATPAAVGPTTMASGGGAPMADNNEGADGVGNASGNWHCDSTWLGDRVITTSTRTWALPTYNNHLYKQISSASTGASNDNHYFGYSTPWGYFDFNRFHCHFSPRDWQRLINNNWGFRPKRLNFKLFNIQVKEVTDNNGVKTIANNLTSTIQVFTDSEYQLPYVLGSAHQGCLPPFPADVFMIPQYGYLTLNNGSQAVGRSSFYCLEYFPSQMLRTGNNFQFTYTFEDVPFHSSYAHSQSLDRLMNPLIDQYLYYLSRTQTTGGTANTQTLGFSQGGPNTMANQAKNWLPGPCYRQQRVSTTTGQNNNSNFAWTAGTKYHLNGRNSLANPGIAMATHKDDKERFFPSNGILIFGKQNAARDNADYSDVMLTSEEEIKTTNPVATEEYGIVADNLQQQNTAPQIGTVNSQGALPGMVWQNRDVYLQGPIWAKIPHTDGNFHPSPLMGGFGLKHPPPQILIKNTPVPADPPTTFNQSKLNSFITQYSTGQVSVEIEWELQKENSKRWNPEIQYTSNYYKSTSVDFAVNTEGVYSEPHPIGTRYLTRPL

SEQ ID NO: 2055 - protein, 738 aa, Artificial Sequence
  Description of Artificial Sequence: Synthetic polypeptide
MAADGYLPDWLEDTLSEGIRQWWKLKPGPPPPKPAERHKDDSRGLVLPGYKYLGPFNGLDKGEPVNAADAAALEHDKAYDQQLKAGDNPYLRYNHADAEFQERLKEDTSFGGNLGRAVFQAKKRVLEPLGLVEEGAKTAPGKKRPVEPSPQRSPDSSTGIGKKGQQPARKRLNFGQTGDSESVPDPQPLGEPPAAPSGVGPNTMAAGGGAPMADNNEGADGVGSSSGNWHCDSQWLGDRVITTSTRTWALPTYNNHLYKQISNSTSGGSSNDNAYFGYSTPWGYFDFNRFHCHFSPRDWQRLINNNWGFRPKRLNFKLFNIQVKEVTDNNGVKTIANNLTSTVQVFTDSEYQLPYVLGSAHQGCLPPFPADVFMIPQYGYLTLNNGSQAVGRSSFYCLEYFPSQMLRTGNNFTFSYTFEDVPFHSSYAHSQSLDRLMNPLIDQYLYYLSRTQTTGGTANTQTLGFSQGGPNTMANQAKNWLPGPCYRQQRVSTTTGQNNNSNFAWTAGTKYHLNGRNSLANPGIAMATHKDDKERFFPSNGILIFGKQNAARDNADYSDVMLTSEEEIKTTNPVATEEYGIVADNLQQQNTAPQIGTVNSQGALPGMVWQNRDVYLQGPIWAKIPHTDGHFHPSPLMGGFGLKHPPPQILIKNTPVPANPPTTFNQSKLNSFITQYSTGQVSVEIEWELQKENSKRWNPEVQYTSNYAKSANVDFTVDNNGLYTEPRPIGTRYLTRPL

SEQ ID NO: 2056 - protein, 738 aa, Artificial Sequence; identical to SEQ ID NO: 2055
  Description of Artificial Sequence: Synthetic polypeptide

SEQ ID NO: 2057 - protein, 736 aa, Artificial Sequence
  Description of Artificial Sequence: Synthetic polypeptide
MAADGYLPDWLEDNLSEGIREWWALKPGAPKPKANQQKQDDGRGLVLPGYKYLGPFNGLDKGEPVNAADAAALEHDKAYDQQLKAGDNPYLRYNHADAEFQERLQEDTSFGGNLGRAVFQAKKRLLEPLGLVEEGAKTAPGKKRPVEQSPQEPDSSSGIGKTGQQPAKKRLNFGQTGDSESVPDPQPLGEPPATPAAVGPTTMASGGGAPMADNNEGADGVGNSSGNWHCDSTWMGDRVITTSTRTWALPTYNNHLYKQISSASTGASNDNHYFGYSTPWGYFDFNRFHCHFSPRDWQRLINNNWGFRPKRLNFKLFNIQVKEVTQNEGTKTIANNLTSTIQVFTDSEYQLPYVLGSAHQGCLPPFPADVFIIPQYGYLTLNNGSQAVGRSSFYCLEYFPSQMLRTGNNFTFSYTFEDVPFHSSYAHSQSLDRLMNPLIDQYLYYLSRTQTTGGTANTQTLGFSQGGPNTMANQAKNWLPGPCYRQQRVSTTTGQNNNSNFAWTAGTKYHLNGRNSLANPGIAMATHKDDKERFFPSNGILIFGKQNAARDNADYSDVMLTSEEEIKTTNPVATEEYGIVADNLQQQNTAPQIGTVNSQGALPGMVWQNRDVYLQGPIWAKIPHTDGNFHPSPLMGGFGLKHPPPQILIKNTPVPADPPTTFNQSKLNSFITQYSTGQVSVEIEWELQKENSKRWNPEIQYTSNYYKSTSVDFAVNTEGVYSEPHPIGTRYLTRPL

SEQ ID NO: 2058 - protein, 736 aa, Artificial Sequence
  Description of Artificial Sequence: Synthetic polypeptide
MAADGYLPDWLEDNLSEGIREWWALKPGAPKPKANQQKQDDGRGLVLPGYKYLGPFNGLDKGEPVNAADAAALEHDKAYDQQLKAGDNPYLRYNHADAEFQERLQEDTSFGGNLGRAVFQAKKRVLEPFGLVEEAAKTAPGKKRPVEQSPQEPDSSSGIGKTGQQPAKKRLNFGQTGDSESVPDPQPLGEPPATPAAVGPTTMASGGGAPMADNNEGADGVGNASGNWHCDSTWLGDRVITTSTRTWALPTYNNHLYKQISSASTGASNDNHYFGYSTPWGYFDFNRFHCHFSPRDWQRLINNNWGFRPKRLNFKLFNIQVKEVTQNEGTKTIANNLTSTIQVFTDSEYQLPYVLGSAHQGCLPPFPADVFMIPQYGYLTLNNGSQAVGRSSFYCLEYFPSQMLRTGNNFTFSYTFEDVPFHSSYAHSQSLDRLMNPLIDQYLYYLSRTQTTGGTANTQTLGFSQGGPNTMANHAKNWLPGPCYRQQRVSTTTGQNNNSNFAWTAGTKYHLNGRNSLANPGIAMATHKDDKERFFPSNGILIFGKQNAARDNADYSDVMLTSEEEIKTTNPVATEEYGIVADNLQQQNTAPQIGTVNSQGALPGMVWQNRDVYLQGPIWAKIPHTDGNFHPSPLMGGFGLKHPPPQILIKNTPVPADPPTTFNQSKLNSFITQYSTGQVSVEIEWELQKENSKRWNPEIQYTSNYYKSTSVDFAVNTEGVYSEPHPIGTRYLTRPL

SEQ ID NO: 2059 - protein, 736 aa, Artificial Sequence
  Description of Artificial Sequence: Synthetic polypeptide
MAADGYLPDWLEDNLSEGIREWWALKPGAPKPKANQQKQDDGRGLVLPGYKYLGPFNGLDKGEPVNEADAAALEHDKAYDQQLKAGDNPYLRYNHADAEFQERLQEDTSFGGNLGRAVFQAKKRLLEPLGLVEEAAKTAPGKKRPVEQSPQEPDSSAGIGKSGAQPAKKRLNFGQTGDSESVPDPQPLGEPPATPAAVGPTTMASGGGAPMADNNEGADGVGNASGNWHCDSTWLGDRVITTSTRTWALPTYNNHLYKQISSASTGASNDNHYFGYSTPWGYFDFNRFHCHFSPRDWQRLINNNWGFRPKRLNFKLFNIQVKEVTDNDGVKTIANNLTSTIQVFTDSEYQLPYVLGSAHQGCLPPFPADVFMIPQYGYLTLNNGSQAVGRSSFYCLEYFPSQMLRTGNNFQFTYTFEDVPFHSSYAHSQSLDRLMNPLIDQYLYYLSRTQTTGGTANTQTLGFSQGGPNTMANQAKNWLPGPCYRQQRVSTTTGQNNNSNFAWTAGTKYHLNGRNSLANPGIAMATHKDDKERFFPSNGILIFGKQNAARDNADYSDVMLTSEEEIKTTNPVATEEYGIVADNLQQQNTAPQIGTVNSQGALPGMVWQNRDVYLQGPIWAKIPHTDGNFHPSPLMGGFGLKHPPPQILIKNTPVPADPPTTFNQSKLNSFITQYSTGQVSVEIEWELQKENSKRWNPEIQYTSNYYKSTSVDFAVNTEGVYSEPHPIGTRYLTRPL

SEQ ID NO: 2060 - protein, 736 aa, Artificial Sequence
  Description of Artificial Sequence: Synthetic polypeptide
MAADGYLPDWLEDNLSEGIREWWALKPGAPKPKANQQKQDDGRGLVLPGYKYLGPFNGLDKGEPVNAADAAALEHDKAYDQQLKAGDNPYLRYNHADAEFQERLQEDTSFGGNLGRAVFQAKKRVLEPLGLVEEGAKTAPGKKRPVEQSPQEPDSSAGIGKTGAQPAKKRLNFGQTGDSESVPDPQPLGEPPATPAAVGPTTMASGGGAPMADNNEGADGVGSASGNWHCDSTWLGDRVITTSTRTWALPTYNNHLYKQISSASTGASNDNHYFGYSTPWGYFDFNRFHCHFSPRDWQRLINNNWGFRPKRLNFKLFNIQVKEVTDNNGVKTIANNLTSTIQVFTDSEYQLPYVLGSAHQGCLPPFPADVFMIPQYGYLTLNNGSQAVGRSSFYCLEYFPSQMLRTGNNFTFSYTFEDVPFHSSYAHSQSLDRLMNPLIDQYLYYLSRTQTTGGTANTQTLGFSQGGPNTMANQAKNWLPGPCYRQQRVSTTTGQNNNSNFAWTAGTKYHLNGRNSLANPGIAMATHKDDKERFFPSNGILIFGKQNAARDNADYSDVMLTSEEEIKTTNPVATEEYGIVADNLQQQNTAPQIGTVNSQGALPGMVWQNRDVYLQGPIWAKIPHTDGNFHPSPLMGGFGLKHPPPQILIKNTPVPADPPTTFNQSKLNSFITQYSTGQVSVEIEWELQKENSKRWNPEIQYTSNYYKSTSVDFAVNTEGVYSEPHPIGTRYLTRPL

SEQ ID NO: 2061 - protein, 736 aa, Artificial Sequence
  Description of Artificial Sequence: Synthetic polypeptide
MAADGYLPDWLEDNLSEGIREWWDLKPGAPKPKANQQKQDDGRGLVLPGYKYLGPFNGLDKGEPVNAADAAALEHDKAYDQQLKAGDNPYLRYNHADAEFQERLQEDTSFGGNLGRAVFQAKKRLLEPLGLVEEAAKTAPGKKRPVEQSPQEPDSSAGIGKSGAQPAKKRLNFGQTGDTESVPDPQPIGEPPAAPSGVGPNTMAAGGGAPMADNNEGADGVGSSSGNWHCDSQWLGDRVITTSTRTWALPTYNNHLYKQISSASTGASNDNHYFGYSTPWGYFDFNRFHCHFSPRDWQRLINNNWGFRPKRLNFKLFNIQVKEVTQNEGTKTIANNLTSTIQVFTDSEYQLPYVLGSAHQGCLPPFPADVFMIPQYGYLTLNNGSQAVGRSSFYCLEYFPSQMLRTGNNFQFTYTFEDVPFHSSYAHSQSLDRLMNPLIDQYLYYLSRTQTTGGTANTQTLGFSQGGPNTMANHAKNWLPGPCYRQQRVSTTTGQNNNSNFAWTAGTKYHLNGRNSLANPGIAMATHKDDKERFFPSNGILIFGKQNAARDNADYSDVMLTSEEEIKTTNPVATEEYGIVADNLQQQNTAPQIGTVNSQGALPGMVWQNRDVYLQGPIWAKIPHTDGNFHPSPLMGGFGLKHPPPQILIKNTPVPADPPTTFNQSKLNSFITQYSTGQVSVEIEWELQKENSKRWNPEIQYTSNYYKSTSVDFAVNTEGVYSEPHPIGTRYLTRPL

SEQ ID NO: 2062 - protein, 737 aa, Artificial Sequence; identical to SEQ ID NO: 2044
  Description of Artificial Sequence: Synthetic polypeptide

SEQ ID NO: 2063 - protein, 737 aa, Artificial Sequence
  Description of Artificial Sequence: Synthetic polypeptide
MAADGYLPDWLEDNLSEGIREWWALKPGAPKPKANQQKQDDGRGLVLPGYKYLGPFNGLDKGEPVNAADAAALEHDKAYDQQLKAGDNPYLRYNHADAEFQERLKEDTSFGGNLGRAVFQAKKRVLEPFGLVEEGAKTAPGKKRPVEQSPQEPDSSSGIGKTGQQPAKKRLNFGQTGDSESVPDPQPLGEPPAAPSGVGPNTMAAGGGAPMADNNEGADGVGSSSGNWHCDSQWLGNRVITTSTRTWALPTYNNHLYKQISNSTSGGSSNDNAYFGYSTPWGYFDFNRFHCHFSPRDWQRLINNNWGFRPKRLNFKLFNIQVKEVTDNNGVKTIANNLTSTVQVFTDSEYQLPYVLGSAHQGCLPPFPADVFMIPQYGYLTLNNGSQAVGRSSFYCLEYFPSQMLRTGNNFQFTYTFEDVPFHSSYAHSQSLDRLMNPLIDQYLYYLSRTQTTGGTANTQTLGFSQGGPNTMANQAKNWLPGPCYRQQRVSTTTGQNNNSNFAWTAGTKYHLNGRNSLANPGIAMATHKDDKERFFPSNGILIFGKQNAARDNADYSDVMLTSEEEIKTTNPVATEEYGIVADNLQQQNTAPQIGTVNSQGALPGMVWQNRDVYLQGPIWAKIPHTDGNFHPSPLMGGFGLKHPPPQILIKNTPVPADPPTTFNQSKLNSFITQYSTGQVSVEIEWELQKENSKRWNPEIQYTSNYYKSTSVDFAVNTEGVYSEPHPIGTRYLTRPL

SEQ ID NO: 2064 - protein, 736 aa, Artificial Sequence
  Description of Artificial Sequence: Synthetic polypeptide
MAADGYLPDWLEDNLSEGIREWWDLKPGAPKPKANQQKQDDGRGLVLPGYKYLGPFNGLDRGEPVNAADAAALEHDKAYDQQLKAGDNPYLRYNHADAEFQERLQEDTSFGGNLGRAVFQAKKRVLEPLGLVEEGAKTAPGKKRPVEQSPQEPDSSSGIGKTGQQPAKKRLNFGQTGDSESVPDPQPLGEPPATPAAVGPTTMASGGGAPMADNNEGADGVGNASGNWHCDSTWLGDRVITTSTRTWALPTYNNHLYKQISSASTGASNDNHYFGYSTPWGYFDFNRFHCHFSPRDWQRLINNNWGFRPKRLNFKLFNIQVKEVTDNNGVKTIANNLTSTIQVFTDSEYQLPYVLGSAHQGCLPPFPADVFMIPQYGYLTLNNGSQAVGRSSFYCLEYFPSQMLRTGNNFQFTYTFEDVPFHSSYAHSQSLDRLMNPLIDQYLYYLSRTQTTGGTANTQTLGFSQGGPNTMANQAKNWLPGPCYRQQRVSTTTGQNNNSNFAWTAGTKYHLNGRNSLANPGIAMATHKDDKERFFPSNGILIFGKQNAARDNADYSDVMLTSEEEIKTTNPVATEEYGIVADNLQQQNTAPQIGTVNSQGALPGMVWQNRDVYLQGPIWAKIPHTDGNFHPSPLMGGFGLKHPPPQILIKNTPVPADPPTTFNQSKLNSFITQYSTGQVSVEIEWELQKENSKRWNPEIQYTSNYYKSTSVDFAVNTEGVYSEPHPIGTRYLTRPL

SEQ ID NO: 2065 - protein, 736 aa, Artificial Sequence
  Description of Artificial Sequence: Synthetic polypeptide
MAADGYLPDWLEDNLSEGIREWWDLKPGAPKPKANQQKQDDGRGLVLPGYKYLGPFNGLDKGEPVNAADAAALEHDKAYDQQLKAGDNPYLRYNHADAEFQERLQEDTSFGGNLGRAVFQAKKRVLEPLGLVEEGAKTAPGKKRPVEQSPQEPDSSSGIGKKGQQPARKRLNFGQTGDSESVPDPQPLGEPPAAPSGVGSLTMASGGGAPMADNNEGADGVGNASGNWHCDSTWLGDRVITTSTRTWALPTYNNHLYKQISSASTGASNDNHYFGYSTPWGYFDFNRFHCHFSPRDWQRLINNNWGFRPKRLNFKLFNIQVKEVTQNEGTKTIANNLTSTVQVFTDSDYQLPYVLGSAHQGCLPPFPADVFMIPQYGYLTLNNGSQAVGRSSFYCLEYFPSQMLRTGNNFQFTYTFEDVPFHSSYAHSQSLDRLMNPLIDQYLYYLSRTQTTGGTANTQTLGFSQGGPNTMANQAKNWLPGPCYRQQRVSTTTGQNNNSNFAWTAGTKYHLNGRNSLSNPGIAMATHKDDKERFFPSNGILIFGKQNAARDNADYSDVMLTSEEEIKTTNPVATEEYGIVADNLQQQNTAPQIGTVNSQGALPGMVWQNRDMYLQGPIWAKIPHTDGNFHPSPLMGGFGLKHPPPQILIKNTPVPADPPTTFNQSKLNSFITQYSTGQVSVEIEWELQKENSKRWNPEIQYTSNYYKSTSVDFAVNTEGVYSEPHPIGTRYLTRPL

SEQ ID NO: 2066 - protein, 736 aa, Artificial Sequence
  Description of Artificial Sequence: Synthetic polynucleotide
MAADGYLPDWLEDNLSEGIREWWALKPGAPKPKANQQKQDDGRGLVLPGYKYLGPFNGLDKGEPVNAADAAALEHDKAYDQQLKAGDNPYLRYNHADAEFQERLQEDTSFGGNLGRAVFQAKKRVLEPFGLVEEGAKTAPGKKRPVEQSPQEPDSSSGIGKTGQQPAKKRLNFGQTGGSESVPDPQPLGEPPATPAAVGPTTMAAGGGAPMADNNEGADGVGSSSGNWHCDSTWLGDRVITTSTRTWALPTYNNHLYKQISSASTGASNDNHYFGYSTPWGYFDFNRFHCHFSPRDWQRLINNNWGFRPKRLNFKLFNIQVKEVTDNNGVKTIANNLTSTVQVFTDSEYQLPYVLGSAHQGCLPPFPADVFMIPQYGYLTLNNGSQAVGRSSFYCLEYFPSQMLRTGNNFTFSYTFEEVPFHSSYAHSQSLDRLMNPLIDQYLYYLSRTQTTGGTANTQTLGFSQGGPNTMANQAKNWLPGPCYRQQRVSTTTGQNNNSNFAWTAGTKYHLNGRNSLANPGIAMASHKDDKERFFPSNGILIFGKQNAARDNADYSDVMLTSEEEIKTTNPVATEEYGIVADNLQQQNTAPQIGTVNSQGALPGMVWQNRDVYLQGPIWAKIPHTDGNFHPSPLMGGFGLKHPPPQILIKNTPVPADPPTTFNQSKLNSFITQYSTGQVSVEIEWELQKENSKRWNPEIQYTSNYYKSTSVDFAVNTEGVYSEPHPIGTRYLTRPL

SEQ ID NO: 2067 - DNA, 2211 bp, Artificial Sequence
  Description of Artificial Sequence: Synthetic polynucleotide
atggctgccgatggttatcttccagattggctcgaggacaacctctctgagggcattcgcgagtggtgggacttgaaacctgcatccccgaaacccaaagccaaccagcaaaagcaggacgacggccggggtctggtgcttcctggctacaagtacctcggacccttcaacggactcgacaagggggagcccgtcaacgcggcggacgcagcggccctcgagcacgacaaggcctacgaccagcagctcaaagcgggtgacaatccgtacctgcggtataaccacgccgacgccgagtttcaggagcgtctgcaagaagatacgtcttttgggggcaacctcgggcgagcagtcttccaggccaaaaagaggcttcttgaacctcttggtctggttgaggaagcggctaagacggctcctggaaagaagaggcctgtagagcagtctcctcaggaaccggactcctccgcgggtattggcaaatcgggtgcacagcccgccaaaaagagactcaatttcggtcagactggcggcacagagtcagttccagaccctcaacctctcggagaacctccagcagcgccctctggtgtgggacctaatacaatggctgcaggcggtggcgcaccaatggcagacaataacgaaggcgccgacggagtgggtagttcctcgggaaattggcattgcgattccacatggctgggcgacagagtcatcaccaccagcaccagaacctgggccctgcccacttacaacaaccatctctacaagcaaatctccagtgcttcaacgggggccagcaacgacaaccactacttcggctacagcaccccctgggggtattttgatttcaacagattccactgccacttctcaccacgtgactggcagcgactcatcaacaacaactggggattccggcccaagagactcagcttcaagctcttcaacatccaggtcaaggaggtcacgcagaatgaaggcaccaagaccatcgccaataacctcaccagcaccatccaggtgtttacggactcggagtaccagctgccgtacgttctcggctctgcccaccagggctgcctgcctccgttcccggcggacgtgttcatgattccccagtacggatacctaacactcaacaacggtagtcaggccgtgggacgctcctccttctactgcctggaatactttccttcgcagatgctgagaaccggcaacaacttccagtttacttacaccttcgaggacgtgcctttccacagcagctacgcccacagccagagcttggaccggctgatgaatcctctgattgaccagtacctgtactacttgtctcggactcaaacaacaggaggcacggcaaatacgcagactctgggcttcagccaaggtgggcctaatacaatggccaatcaggcaaagaactggctgccaggaccctgttaccgccaacaacgcgtctcaacgacaaccgggcaaaacaacaatagcaactttgcctggactgctgggaccaaataccatctgaatggaagaaattcattggctaatcctggcatcgctatggcaacacacaaagacgacaaggagcgtttttttcccagtaacgggatcctgatttttggcaaacaaaatgctgccagagacaatgcggattacagcgatgtcatgctcaccagcgaggaagaaatcaaaaccactaaccctgtggctacagaggaatacggtatcgtggcagataacttgcagcagcaaaacacggctcctcaaattggaactgtcaacagccagggggccttacccggtatggtctggcagaaccgggacgtgtacctgcagggtcccatctgggccaagattcctcacacggacggcaacttccacccgtctccgctgatgggcggctttggcctgaaacatcctccgcctcagatcctgatcaagaacacgcctgtacctgcggatcctccgaccaccttcaaccagtcaaagctgaactctttcatcacgcaatacagcaccggacaggtcagcgtggaaattgaatgggagctgcagaaggaaaacagcaagcgctggaaccccgagatccagtacacctccaactactacaaatctacaagtgtggactttgctgttaatacagaaggcgtgtactctgaaccccaccccattggcacccgttacctcacccgtcccctgtaa

SEQ ID NO: 2068 - DNA, 2211 bp, Artificial Sequence
  Description of Artificial Sequence: Synthetic polynucleotide
atggctgccgatggttatcttccagattggctcgaggacaacctctctgagggcattcgcgagtggtgggacttgaaacctggagccccgaaacccaaagccaaccagcaaaagcaggacgacggccggggtctggtgcttcctggctacaagtacctcggacccttcaacggactcgacaagggggagcccgtcaacgcggcggacgcagcggccctcgagcacgacaaggcctacgaccagcagctcaaagcgggtgacaatccgtacctgcggtataaccacgccgacgccgagtttcaggagcgtctgcaagaagatacgtcttttgggggcaacctcgggcgagcagtcttccaggccaagaagagggttctcgaaccttttggtctggttgaggaaggcgctaagacggctcctggaaagaaacgtccggtagagcagtcgccacaagagccagactcctcctcgggcattggcaagacaggccagcagcccgctaaaaagagactcaattttggtcagactggcgactcagagtcagtccccgacccacaacctctcggagaacctccagcaacccccgctgctgtgggacctactacaatggcttcaggtggtggcgcaccaatggcagacaataacgaaggcgccgacggagtgggtaatgcctcaggaaattggcattgcgattcccaatggctgggggacagagtcatcaccaccagcacccgaacctgggccctgcccacctacaacaatcacctctacaagcaaatctccagtgcttcaacgggggccagcaacgacaaccactacttcggctacagcaccccctgggggtattttgatttcaacagattccactgccatttctcaccacgtgactggcagcgactcatcaacaacaattggggattccggcccaagagactcaacttcaaactcttcaacatccaagtcaaggaggtcacgcagaatgaaggcaccaagaccatcgccaataacctcaccagcaccatccaggtgtttacggactcggagtaccagctgccgtacgttctcggctccgcccaccagggctgcctgcctccgttcccggcggacgtgttcatgattccccagtacggctacctaacactcaacaacggtagtcaggccgtgggacgctcctccttctactgcctggaatactttccttcgcagatgctgagaaccggcaacaacttccagtttacttacaccttcgaggacgtgcctttccacagcagctacgcccacagccagagcttggaccggctgatgaatcctctgattgaccagtacctgtactacttgtctcggactcaaacaacaggaggcacggcaaatacgcagactctgggcttcagccaaggtgggcctaatacaatggccaatcaggcaaagaactggctgccaggaccctgttaccgccaacaacgcgtctcaacgacaaccgggcaaaacaacaatagcaactttgcctggactgctgggaccaaataccatctgaatggaagaaattcattggctaatcctggcatcgctatggcaacacacaaagacgacaaggagcgtttttttcccagtaacgggatcctgatttttggcaaacaaaatgctgccagagacaatgcggattacagcgatgtcatgctcaccagcgaggaagaaatcaaaaccactaaccctgtggctacagaggaatacggtatcgtggcagataacttgcagcagcaaaacacggctcctcaaattggaactgtcaacagccagggggccttacccggtatggtctggcagaaccgggacgtgtacctgcagggtcccatctgggccaagattcctcacacggacggcaacttccacccgtctccgctgatgggcggctttggcctgaaacatcctccgcctcagatcctgatcaagaacacgcctgtacctgcggatcctccgaccaccttcaaccagtcaaagctgaactctttcatcacgcaatacagcaccggacaggtcagcgtggaaattgaatgggagctgcagaaggaaaacagcaagcgctggaaccccgagatccagtacacctccaactactacaaatctacaagtgtggactttgctgttaatacagaaggcgtgtactctgaaccccaccccattggcacccgttacctcacccgtcccctgtaa

SEQ ID NO: 2069 - DNA, 2211 bp, Artificial Sequence
  Description of Artificial Sequence: Synthetic polynucleotide
atggctgccgatggttatcttccagattggctcgaggacaacctctctgagggcattcgcgagtggtgggacttggaacctggagccccgaagcccaaagccaaccagcaaaagcaggacgacggccggggtctggtgcttcctggctacaagtacctcggacccttcaacggactcgacaagggggagcccgtcaacgcggcggacgcagcggccctcgagcacgacaaggcctacgaccagcagctcaaagcgggtgacaatccgtacctgcggtataaccacgccgacgccgagtttcaggagcgtctgcaagaagatacgtcttttgggggcaacctcgggcgagcagtcttccaggccaagaagcgggttctcgaacctctcggtctggttgaggaaggcgctaagacggctcctggaaagaaacgtccggtagagcagtcgccacaagagccagactcctcctcgggcatcggcaagacaggccagcagcccgctaaaaagagactcaattttggtcagactggcgactcagagtcagtccccgatccacaacctctcggagaacctccagcaacccccgctgctgtgggacctactacaatggcttcaggcggtggcgcaccaatggcagacaataacgaaggcgccgacggagtgggtaatgcctcaggaaattggcattgcgattccacatggctgggcgacagagtcatcaccaccagcacccgcacctgggccttgcccacctacaataaccacctctacaagcaaatctccagtgcttcaacaggggccagcaacgacaaccactacttcggctacagcaccccctgggggtattttgacttcaacagattccactgccacttctcaccacgtgactggcagcgactcatcaacaacaactggggattccggcctaagcgactcaacttcaagctcttcaacattcaggtcaaagaggttacggacaacaatggagtcaagaccatcgccaataaccttaccagcacggtccaggtcttcacggactcggagtaccagttgccgtacgtcctcggctctgcgcaccagggctgcctccctccgttcccggcggacgtgttcatgattccgcagtacggctacctaacgctcaacaacggtagtcaggccgtgggacgctcctccttctactgcctggaatactttccttcgcagatgctgagaaccggcaacaacttccagtttacttacaccttcgaggacgtgcctttccacagcagctacgcccacagccagagcttggaccggctgatgaatcctctgattgaccagtacctgtactacttgtctcggactcaaacaacaggaggcacggcaaatacgcagactctgggcttcagccaaggtgggcctaatacaatggccaatcaggcaaagaactggctgccaggaccctgttaccgccaacaacgcgtctcaacgacaaccgggcaaaacaacaatagcaactttgcctggactgctgggaccaaataccatctgaatggaagaaattcattggctaatcctggcatcgctatggcaacacacaaagacgacaaggagcgtttttttcccagtaacgggatcctgatttttggcaaacaaaatgctgccagagacaatgcggattacagcgatgtcatgctcaccagcgaggaagaaatcaaaaccactaaccctgtggctacagaggaatacggtatcgtggcagataacttgcagcagcaaaacacggctcctcaaattggaactgtcaacagccagggggccttacccggtatggtctggcagaaccgggacgtgtacctgcagggtcccatctgggccaagattcctcacacggacggcaacttccacccgtctccgctgatgggcggctttggcctgaaacatcctccgcctcagatcctgatcaagaacacgcctgtacctgcggatcctccgaccaccttcaaccagtcaaagctgaactctttcatcacgcaatacagcaccggacaggtcagcgtggaaattgaatgggagctgcagaaggaaaacagcaagcgctggaaccccgagatccagtacacctccaactactacaaatctacaagtgtggactttgctgttaatacagaaggcgtgtactctgaaccccaccccattggcacccgttacctcacccgtcccctgtaa

SEQ ID NO: 2070 - DNA, 2211 bp, Artificial Sequence
  Description of Artificial Sequence: Synthetic polynucleotide
atggctgccgatggttatcttccagattggctcgaggacactctctctgaaggaataagacagtggtggaagctcaaacctggcccaccaccaccaaagcccgcagagcggcataaggacgacagcaggggtcttgtgcttcctgggtacaagtacctcggacccttcaacggactcgacaagggagagccggtcaacgaggcagacgccgcggccctcgagcacgacaaagcctacgaccggcagctcgacagcggagacaacccgtacctcaagtacaaccacgccgacgcggagtttcaggagcgccttaaagaagatacgtcttttgggggcaacctcgggcgagcagtcttccaggccaagaagagggttctcgaaccttttggtctggttgaggaaggtgctaagacggctcctggaaagaaacgtccggtagagcagtcgccacaagagccagactcctcctcgggcattggcaagacaggccagcagcccgctaaaaagagactcaattttggtcagactggcgactcagagtcagtccccgacccacaacctctcggagaacctccagcaacccccgctgctgtgggacctactacaatggcttcaggcggtggcgcaccaatggcagacaataacgaaggcgccgacggagtgggtaatgcctcaggaaattggcattgcgattccacatggctgggcgacagagtcatcaccaccagcacccgaacatgggccttgcccacctataacaaccacctctacaagcaaatctccagtgcttcaacgggggccagcaacgacaaccactacttcggctacagcaccccctgggggtattttgacttcaacagattccactgccacttctcaccacgtgactggcagcgactcatcaacaacaactggggattccggcctaagcgactcaacttcaagctcttcaacattcaggtcaaagaggttacggacaacaatggagtcaagaccatcgccaataaccttaccagcacggtccaggtcttcacggactcagactatcagctcccgtacgtgctcgggtcggctcacgagggctgcctcccgccgttcccagcggacgttttcatgattcctcagtacggctacctaacactcaacaacggtagtcaggccgtgggacgctcctccttctactgcctggaatactttccttcgcagatgctgagaaccggcaacaacttccagtttacttacaccttcgaggacgtgcctttccacagcagctacgcgcacagccagagtctggaccggctgatgaatcctctgattgaccagtacctgtactacttgtctcggactcaaacaacaggaggcacggcaaatacgcagactctgggcttcagccaaggtgggcctaatacaatggccaatcaggcaaagaactggctgccaggaccctgttaccgccaacaacgcgtctcaacgacaaccgggcaaaacaacaatagcaactttgcctggactgctgggaccaaataccatctgaatggaagaaattcattggctaatcctggcatcgctatggcaacacacaaagacgacaaggagcgtttttttcccagtaacgggatcctgattttcggcaaacaaaatgctgccagagacaatgcggattacagcgatgtcatgctcaccagcgaggaagaaatcaaaaccactaaccctgtggctacagaggaatacggtatcgtggcagataacttgcagcagcaaaacacggctcctcaaattggaactgtcaacagccagggggccttacccggtatggtctggcagaaccgggacgtgtacctgcagggtcccatctgggccaagattcctcacacggacggcaacttccacccgtctccgctgatgggcggctttggcctgaaacatcctccgcctcagatcctgatcaagaacacgcctgtacctgcggatcctccgaccaccttcaaccagtcaaagctgaactctttcatcacgcaatacagcaccggacaggtcagcgtggaaattgaatgggagctgcagaaggaaaacagcaagcgctggaaccccgagatccagtacacctccaactactacaaatctacaagtgtggactttgctgttaatacagaaggcgtgtactctgaaccccaccccattggcaccagatacctgactcgtaatctgtaa

SEQ ID NO: 2071 - DNA, 2208 bp, Artificial Sequence
  Description of Artificial Sequence: Synthetic polynucleotide
atggctgccgatggttatcttccagattggctcgaggacactctctctgaaggaataagacagtggtggaagctcaaacctggcccaccaccaccaaagcccgcagagcggcataaggacgacagcaggggtcttgtgcttcctgggtacaagtacctcggacccttcaacggactcgacaagggagagccggtcaacgaggcagacgccgcggccctcgagcacgacaaagcctacgaccggcagctcgacagcggagacaacccgtacctcaagtacaaccacgccgacgcggagtttcaggagcgccttaaagaagatacgtcttttgggggcaacctcggacgagcagtcttccaggcgaaaaagagggttcttgaacctctgggcctggttgaggaacctgttaagacggctccgggaaaaaagaggccggtagagcagtcgccacaagagccagactcctcctcgggcatcggcaagaaaggccagcagcccgctaaaaagagactcaattttggtcagactggcgactcagagtcagtccccgacccacaacctctcggagaacctccagcaacccccgctgctgtgggacctactacaatggcttcaggcggtggcgcaccaatggcggacaataacgaaggcgccgatggagtgggtaatgcctcaggaaattggcattgcgattccacatggctgggcgacagagtcatcaccaccagcacccgaacatgggccttgcccacctataacaaccacctctacaagcaaatctccagtgcttcaacgggggccagcaacgacaaccactacttcggctacagcaccccctgggggtattttgacttcaacagattccactgccacttctcaccacgtgactggcagcgactcatcaacaacaactggggattccggcctaagcgactcaacttcaagctcttcaacattcaggtcaaagaggttacggacaacaatggagtcaagaccatcgccaataaccttaccagcacggtccaggtcttcacggactcagactatcagctcccgtacgttctcggctctgcccaccagggctgcctgcctccgttcccggcggacgtgttcatgattccccagtacggctacctaacactcaacaacggtagtcaggccgtgggacgctcctccttctactgcctggaatactttccttcgcagatgctgagaaccggcaacaacttccagtttacttacaccttcgaggacgtgcctttccacagcagctacgcccacagccagagcttggaccggctgatgaatcctctgattgaccagtacctgtactacttgtctcggactcaaacaacaggaggcacggcaaatacgcagactctgggcttcagccaaggtgggcctaatacaatggccaatcaggcaaagaactggctgccaggaccctgttaccgccaacaacgcgtctcaacgacaaccgggcaaaacaacaatagcaactttgcctggactgctgggaccaaataccatctgaatggaagaaattcattggctaatcctggcatcgctatggcaacacacaaagacgacaaggagcgtttttttcccagtaacgggatcctgatttttggcaaacaaaatgctgccagagacaatgcggattacagcgatgtcatgctcaccagcgaggaagaaatcaaaaccactaaccctgtggctacagaggaatacggtatcgtggcagataacttgcagcagcaaaacacggctcctcaaattggaactgtcaacagccagggggccttacccggtatggtctggcagaaccgggacgtgtacctgcagggtcccatctgggccaagattcctcacacggacggcaacttccacccgtctccgctgatgggcggctttggcctgaaacatcctccgcctcagatcctgatcaagaacacgcctgtacctgcggatcctccgaccaccttcaaccagtcaaagctgaactctttcatcacgcaatacagcaccggacaggtcagcgtggaaattgaatgggagctgcagaaggaaaacagcaagcgctggaaccccgagatccagtacacctccaactactacaaatctacaagtgtggactttgctgttaatacagaaggcgtgtactctgaaccccaccccattggcacccgttacctcacccgtcccctg

SEQ ID NO: 2072 - DNA, 2211 bp, Artificial Sequence
  Description of Artificial Sequence: Synthetic polynucleotide
atggctgccgatggttatcttccagattggctcgaggacactctctctgaaggaataagacagtggtggaagctcaaacctggcccaccaccaccaaagcccgcagagcggcataaggacgacagcaggggtcttgtgcttcctgggtacaagtacctcggacccttcaacggactcgacaagggagagccggtcaacgaggcagacgccgcggccctcgagcacgacaaagcctacgaccagcagctccaagcgggtgacaatccgtacctgcggtataaccacgccgacgccgagtttcaggagcgtcttcaaggagatacgtcttttgggggcaacctcggacgagcagtcttccaggccaaaaagaggcttcttgaacctcttggtctggttgaggaagcggctaagacggctcctggaaagaagaggcctgtagagcagtctcctcaggaaccggactcctccgcgggtattggcaaatcgggtgcacagcccgctaaaaagagactcaatttcggtcagactggcgacacagagtcagtcccagaccctcaaccaatcggagaacctcccgcagccccctcaggtgtgggatctcttacaatggcttcaggtggtggcgcaccagtggcagacaataacgaaggtgccgatggagtgggtagttcctcgggaaattggcattgcgattcccaatggctgggggacagagtcatcaccaccagcacccgaacatgggccttgcccacctataacaaccacctctacaagcaaatctccagtgcttcaacgggggccagcaacgacaaccactacttcggctacagcaccccctgggggtattttgacttcaaccgcttccactgccacttctcaccacgtgactggcagcgactcatcaacaacaactggggattccggcccaagagactcagcttcaagctcttcaaccatccaggtcaaggaggtcacgcagaatgaaggcaccaagaccatcgccaataacctcaccagcacatccaggtgtttacggactcggagtaccagctgccgtacgttctcggctctgcccaccagggctgcctgcctccgttcccggcggacgtgttcatgattccccagtacggctacctaacactcaacaacggtagtcaggccgtgggacgctcctccttctactgcctggaatactttccttcgcagatgctgagaaccggcaacaacttccagttcacttacaccttcgaggacgtgcctttccacagcagctacgcgcacagccagagcttggaccggctgatgaatcctctgattgaccagtacctgtactacttgtctcggactcaaacaacaggaggcacggcaaatacgcagactctgggcttcagccaaggtgggcctaatacaatggccaatcaggcaaagaactggctgccaggaccctgttaccgccaacaacgcgtctcaacgacaaccgggcaaaacaacaatagcaactttgcctggactgctgggaccaaataccatctgaatggaagaaattcattgggtaatcctggcatcgctatggcaacacacaaagacgacaaggagcgtttttttcccagtaacgggatcctgatttttggcaaacaaaatgctgccagagacaatgcggattacagcgatgtcatgctcaccagcgaggaagaaatcaaaaccactaaccctgtggctacagaggaatacggtatcgtggcagataacttgcagcagcaaaacacggctcctcaaattggaactgtcaacagccagggggccttacccggtatggtctggcagaaccgggacgtgtacctgcagggtcccatctgggccaagattcctcacacggacggcaacttccacccgtctccgctgatgggcggctttggcctgaaacatcctccgcctcagatcctcatcaaaaacacacctgtacctgcggatcctccaacggccttcaaccagtcaaagctgaactctttcatcacgcaatacagcaccggacaggtcagcgtggaaattgaatgggagctgcagaaggaaaacagcaagcgctggaaccccgagatccagtacacctccaactactacaaatctacaagtgtggactttgctgttaatacagaaggcgtgtactctgaaccccaccccattggcacccgttacctcacccgtcccctgtaa

SEQ ID NO: 2073 - DNA, 2214 bp, Artificial Sequence
  Description of Artificial Sequence: Synthetic polynucleotide
atggctgccgatggttatcttccagattggctcgaggacaacctctctgagggcattcgcgagtggtgggacttgaaacatggagccccgaaacccaaagccaaccagcaaaagcaggacgacggccggggtctggtgcttcctggctacaagtacctcggacccttcaacggactcgacaagggggagcccgtcaacgcggcggatgcagcggccctcgagcacgacaaggcctacgaccagcagctcaaagcgggtgacaatccgtacctgcggtataaccacgccgacgccgagtttcaggagcgtctgcaagaagatacgtcttttgggggcaacctcgggcgagcagtcttccaggccaagaagagggttctcgaaccttttggtctggttgaggaaggtgctaagacggctcctggaaagaaacgtccggtagagcagtcgccacaagagccagactcctcctcgggcattggcaagacaggccagcagcccgctaaaaagagactcaattttggtcagactggcgactcagagtcagtccccgacccacaacctctcggagaacctccagcaacccccgctgctgtgggacctactacaatggcttcaggcggtggcgcaccaatggcagacaataacgaaggcgccgacggagtgggtaatgcctcaggaaattggcattgcgattccacatggctgggcgacagagtcatcaccaccagcacccgaacatgggccttgcccacctataacaaccacctctacaagcaaatctccaacgggacttcgggaggaagcaccaacgacaacacctacttcggctacagcaccccctgggggtattttgactttaacagattccactgccacttctcaccacgtgactggcagcgactcatcaacaacaactggggattccggcccaagagactcaacttcaaactcttcaacatccaagtcaaggaggtcacgcagaatgaaggcaccaagaccatcgccaataacctcaccagcaccatccaggtgtttacggactcggagtaccagctgccgtacgttctcggctccgcccaccagggctgcctgcctccgttcccggcggacgtgttcatgattccccagtacggctacctaacactcaacaacggtagtcaggccgtgggacgctcctccttctactgcctggaatactttccttcgcagatgctgagaacgggcaacaactttaccttcagctacacctttgaggacgttcctttccacagcagctacgctcacagccagagtctggaccgtctcatgaatcctctgattgaccagtacctgtactacttgtctcggactcaaacaacaggaggcacggcaaatacgcagactctgggcttcagccaaggtgggcctaatacaatggccaatcaggcaaagaactggctgccaggaccctgttaccgccaacaacgcgtctcaacgacaaccgggcaaaacaacaatagcaactttgcctggactgctgggaccaaataccatctgaatggaagaaattcattggctaatcctggcatcgctatggcaacacacaaagacgacaaggagcgtttttttcccagtaacgggatcctgatttttggcaaacaaaatgctgccagagacaatgcggattacagcgatgtcatgctcaccagcgaggaagaaatcaaaaccactaaccctgtggctacagaggaatacggtatcgtggcagataacttgcagcagcaaaacacggctcctcaaattggaactgtcaacagccagggggccttacccggtatggtctggcagaaccgggacgtgtacctgcagggtcccatctgggccaagattcctcacacggacggcaacttccacccgtctccgctgatgggcggctttggcctgaaacatcctccgcctcagatcctgatcaagaacacgcctgtacctgcggatcctccgaccaccttcaaccagtcaaagctgaactctttcatcacgcaatacagcaccggacaggtcagcgtggaaattgaatgggagctgcagaaggaaaacagcaagcgctggaaccccgagatccagtacacctccaactactacaaatctacaagtgtggactttgctgttaatacagaaggcgtgtactctgatccccaccccattggcacccgttacctcacccgtcccctgtaa

SEQ ID NO: 2074 - DNA, 2214 bp, Artificial Sequence
  Description of Artificial Sequence: Synthetic polynucleotide
atggctgccgatggttatcttccagattggctcgaggacaacctctctgagggcattcgcgagtggtgggcgctgaaacctggagccccgaagcccaaagccaaccagcaaaagcaggacgacggccggggtctggtgcttcctggctacaagtacctcggacccttcaacggactcgacaaaggagagccggtcaacgaggcggacgcggcagccctcgaacacgacaaggcctacgaccagcagctcaaagcgggtgacaatccgtacctgcggtataaccacgccgacgccgagtttcaggagcgtctgcaagaagatacgtcttttgggggcaacctcgggcgagcagtcttccaggccaagaagcgggttctcgaacctctcggtctggttgaggaaggcgctaagacggctcctggaaagaagagaccggtagagccatcaccccagcgttctccagactcctctacgggcatcggcaagaaaggccagcagcccgccagaaaaagactcaattttggtcagactggcgactcagagtcagttccagaccctcaacctctcggagaacctccagcagcgccctctggtgtgggacctaatacaatggcttcaggcggtggcgcaccaatggcagacaataacgagggcgccgacggagtgggtaattcctcgggaaattggcattgcgattccacatggatgggcgacagagtcatcaccaccagcacccgaacctgggccctgcccacctacaacaaccacctctacaagcaaatctccagtgcttcaacgggggccagcaacgacaaccactacttcggctacagcaccccctgggggtattttgactttaacagattccactgccacttttcaccacgtgactggcagcgactcatcaacaacaactggggattccggcccaagagactcaacttcaagctcttcaacatccaagtcaaggaggtcacgcagaatgaaggcaccaagaccatcgccaataacctcaccagcaccatccaggtgtttacggactcggagtaccagctgccgtacgttctcggctctgcccaccagggctgcctgcctccgttcccggcggacgtgttcatgattccccagtacggctacctaacactcaacaacggtagtcaggccgtgggacgctcctccttctactgcctggaatactttccttcgcagatgctgagaaccggcaacaacttccagtttacttacaccttcgaggacgtgcctttccacagcagctacgcgcacagccagagcttggaccggctgatgaatcctctgattgaccagtacctgtactacttgtctcggactcaaacaacaggaggcacggcaaatacgcagactctgggcttcagccaaggtgggcctaatacaatggccaatcaggcaaagaactggctgccaggaccctgttaccgccaacaacgcgtctcaacgacaaccgggcaaaacaacaatagcaactttgcctggactgctgggaccaaataccatctgaatggaagaaattcattggctaatcctggcatcgctatggcaacacacaaagacgacaaggagcgtttttttcccagtaacgggatcctgatttttggcaaacaaaatgctgccagagacaatgcggattacagcgatgtcatgctcaccagcgaggaagaaatcaaaaccactaaccctgtggctacagaggaatacggtatcgtggcagataacttgcagcagcaaaacacggctcctcaaattggaactgtcaacagccagggggccttacccggtatggtctggcagaaccgggacgtgtacctgcagggtcccatctgggccaagattcctcacacggacggcaacttccacccgtctccgctgatgggcggctttggcctgaaacatcctccgcctcagatcctgatcaagaacacgcctgtacctgcggatcctccgaccaccttcaaccagtcaaagctgaactctttcatcacacaatacagcaccggacaggtcagcgtggaaattgaatgggagctgcagaaggaaaacagcaagcgctggaaccccgagatccagtacacctccaactactacaaatctacaagtgtggactttgctgttaatacagaaggcgtgtactctgaaccccaccccattggcacccgttacctcacccgtcccctgtaa

SEQ ID NO: 2075 - DNA, 2211 bp, Artificial Sequence
  Description of Artificial Sequence: Synthetic polynucleotide
  misc_feature (676)..(676): n is a, c, g, or t
atggctgccgatggttatcttccagattggctcgaggacactctctctgaaggaataagacagtggtggaagctcaaacctggcccaccaccaccaaagcccgcagagcggcataaggacgacagcaggggtcttgtgcttcctgggtacaagtacctcggacccttcaacggactcgacaagggagagccggtcaacgaggcagacgccgcggccctcgagcacgacaaagcctacgaccggcagctcgacagcggagacaacccgtacctcaagtacaaccacgccgacgcggagtttcaggagcgccttaaagaagatacgtcttttgggggcaacctcggacgagcagtcttccaggcgaaaaagagggttcttgaacctctgggcctggttgaggaacctgttaagacggctccgggaaaaaagaggccggtagagcagtcgccacaagagccagactcctcctcgggcatcggcaagaaaggccagcagcccgctaaaaagagactcaattttggtcagactggcgactcagagtcagtccccgacccacaacctctcggagaacctccagcaacccccgctgctgtgggacctactacaatggcttcaggcggtggcgcaccaatggcggacaataacgaaggcgccgatggagtgggtaatgcctcangaaattggcattgcgattccacatggctgggcgacagagtcatcaccaccagcacccgaacatgggccttgccacctataacaaccacctctacaagcaaatctccagtgcttcaacgggggcgcagcaacgacaaccactacttcggctacagcaccccctgggggtattttgacttcaacagattccactgccacttctcaccacgtgactggcagcgactcatcaacaacaactggggattccggcctaagcgactcaacttcaagctcttcaacattcaggtcaaagaggttacggacaacaatggagtcaagaccatcgccaataaccttaccagcacggtccaggtcttcacggactcagactatcagctcccgtacgttctcggctctgcccaccagggctgcctgcctccgttcccggcggacgtgttcatgattccccagtacggctacctaacactcaacaacggtagtcaggccgtgggacgctcctccttctactgcctggaatactttccttcgcagatgctgagaaccggcaacaacttccagtttacttacaccttcgaggacgtgcctttccacagcagctacgcccacagccagagcttggaccggctgatgaatcctctgattgaccagtacctgtactacttgtctcggactcaaacaacaggaggcacggcaaatacgcagactctgggcttcagccaaggtgggcctaatacaatggccaatcaggcaaagaactggctgccaggaccctgttaccgccaacaacgcgtctcaacgacaaccgggcaaaacaacaatagcaactttgcctggactgctgggaccaaataccatctgaatggaagaaattcattggctaatcctggcatcgctatggcaacacacaaagacgacaaggagcgtttttttcccagtaacgggatcctgatttttggcaaacaaaatgctgccagagacaatgcggattacagcgatgtcatgctcaccagcgaggaagaaatcaaaaccactaaccctgtggctacagaggaatacggtatcgtggcagataacttgcagcagcaaaacacggctcctcaaattggaactgtcaacagccagggggccttacccggtatggtttggcagaaccgggacgtgtacctgcagggtcccatctgggccaagattcctcacacggacggcaacttccacccgtctccgctgatgggcggctttggcctgaaacatcctccgcctcagatcctgatcaagaacacgcctgtacctgcggatcctccgaccaccttcaaccagtcaaagctgaactctttcatcacacagtactccacgggacaggtcagcgtggaaattgaatgggagctgcagaaggaaaacagcaagcgctggaacccggagatccagtacacttccaactactacaaatctacaaatgtggactttgctgttaacacagaaggcgtgtactctgaaccccaccccattggcacccgttacctcacccgtcccctgtaa

SEQ ID NO: 2076 - DNA, 2211 bp, Artificial Sequence
  Description of Artificial Sequence: Synthetic polynucleotide
  misc_feature (715)..(715): n is a, c, g, or t
atggctgccgatggttatcttccagattggctcgaggacaacctctctgagggcattcgcgagtggtgggacttgaaacctggagccccgaaacccaaagccaaccagcaaaagcaggacgacggccggggtctggtgcttcctggctacaagtacctcggacccttcaacggactcgacaagggggagcccgtcaacgcggcggatgcagcggccctcgagcacgacaaggcctacgaccagcagctccaagcgggtgacaatccgtacctgcggtataaccacgccgacgccgagtttcaggagcgtcttcaaggagatacgtcttttgggggcaacctcggacgagcagtcttccaggccaagaagcgggttctcgaacctctcggtctggttgaggaagcggctaagacggctcctggaaagaagaggcctgtagagcagtctcctcaggaaccggactcctccgcgggtattggcaaatcgggtgcacagcccgctaaaaagagactcaatttcggtcagactggcgacacagagtcagtcccagaccctcaaccaatcggagaacctcccgcagccccctctggtgtgggacctaatacaatggctgcaggcggtggcgcaccaatggcagacaataacgaaggcgccgatggagtgggtagttcctcgggaaattggcattgcgattccacatggctgggcgacagantcatcaccaccagcacccgaacctgggccctgcccacctataacaaccatctctacaagcaaatctccagtgcttcaacgggggccagcaacgacaaccactacttcggctacagcaccccctgggggtattttgacttcaacagattccactgccacttctcaccacgtgactggcagcgactcatcaacaacaactggggattccggcctaagcgactcaacttcaagctcttcaacattcaggtcaaagaggttacggacaacaatggagtcaagaccatcgccaataaccttaccagcacggtccaggtcttcacggactcggagtaccagttgccgtacgtcctcggctctgcgcaccagggctgcctgcctccgttcccggcggacgtgttcatgattccgcagtacggctacctaacgctcaacaatggcagccaggcagtgggacggtcatccttttactgcctggaatatttcccatcgcagatgctgagaacgggcaacaactttaccttcagctacacttttgaggacgttcctttccacagcagctacgctcacagccagagtctggaccgtctcatgaatcctctgattgaccagtacctgtactacttgtctcggactcaaacaacaggaggcacggcaaatacgcagactctgggcttcagccaaggtgggcctaatacaatggccaatcaggcaaagaactggctgccaggaccctgttaccgccaacaacgcgtctcaacgacaaccggacaaaacaacaatagcaactttgcctggactgctgggaccaaataccatctgaatggaagaaattcattggctaatcctggcatcgctatggcaacacacaaagacgacaaggagcgtttttttcccagtaacgggatcctgatttttggcaaacaaaatgctgccagagacaatgcggattacagcgatgtcatgctcaccagcgaggaagaaatcaaaaccactaaccctgtggctacagaggaatacggtatcgtggcagataactttcagcagcaaaacacggctcctcaaattggaactgtcaacagccagggggccttacccggtatggtctggcagaaccgggacgtgtacctgcagggtcccatctgggccaagattcctcacacggacggcaacttccacccgtctccgctgatgggcggctttggcctgaaacatcctccgcctcagatcctgatcaagaacacgcctgtacctgcggatcctccgaccaccttcaaccagtcaaagctgaactctttcatcacgcaatacagcaccggacaggtcagcgtggaaattgaatgggagctgcagaaggaaaacagcaagcgctggaaccccgagatccagtacacctccaactactacaaatctacaagtgtggactttgctgttaatacagaaggcgtgtactctgaaccccaccccattggcacccgttacctcacccgtcccctgtaa

SEQ ID NO: 2077 - DNA, 2211 bp, Artificial Sequence
  Description of Artificial Sequence: Synthetic polynucleotide
atggctgccgatggttatcttccagattggctcgaggacaacctctctgagggcattcgcgagtggtgggcgctgaaacctggagccccgaagcccaaagccaaccagcaaaagcaggacgacggccggggtctggtgcttcctggctacaagtacctcggacccttcaacggactcgacaaaggagagccggtcaacgaggcggacgcggcagccctcgaacacgacaaagcttacgaccagcagctcaaggccggtgacaacccctacctcaagtataaccacgccgacgccgagtttcaggagcgtctgcaagaagatacgtcttttgggggcaacctcgggcgagcagtcttccaggccaaaaagaggcttcttgaacctcttggtctggttgaggaagcggctaagacggctcctggaaagaagaggcctgtagagcagtctcctcaggaaccggactcctccgcgggtattggcaaatcgggtgcacagcccgctaaaaagagactcaatttcggtcagactggcgacacagagtcagtcccagacccacaacctctcggagaacctccagcaacccccgctgctgtgggacctactacaatggcttcaggcggtggcgcaccaatggcggacaataacgaaggcgccgatggagtgggtaatgcctcaggaaattggcattgcgattccacatggctgggcgacagagtcatcaccaccagcacccgaacatgggccttgcccacctataacaaccacctctacaagcaaatctccagtgcttcaacgggggccagcaacgacaaccactacttcggctacagcaccccctgggggtattttgacttcaacagattccactgccacttctcaccacgtgactggcagcgactcatcaacaacaactggggattccggcccaagagactcagcttcaagctcttcaacatccaggtcaaggaggtcacgcagaatgaaggcaccaagaccatcgccaataacctcaccagcaccatccaggtgtttacggactcggagtaccagctgccgtacgttctcggctccgcccaccagggctgcctgcctccgttcccggcggacgtgttcatgattccccagtacggctacctaacactcaacaacggtagtcaggccgtgggacgctcctccttctactgcctggaatactttccttcgcagatgctgagaaccggcaacaacttccagtttacttacaccttcgaggacgtgcctttccacagcagctacgcccacagccagagcttggaccggctgatgaatcctctgattgaccagtacctgtactacttgtctcggactcaaacaacaggaggcacggcaaatacgcagactctgggcttcagccaaggtgggcctaatacaatggccaatcaggcaaagaactggctgccaggaccctgttaccgccaacaacgcgtctcaacgacaaccgggcaaaacaacaatagcaactttgcctggactgctgggaccaaataccatctgaatggaagaaattcattggctaatcctggcatcgctatggcaacacacaaagacgacaaggagcgtttttttcccagtaacgggatcctgatttttggcaaacaaaatgctgccagagacaatgcggattacagcgatgtcatgctcaccagcgaggaagaaatcaaaaccactaaccctgtggctacagaggaatacggtatcgtggcagataacttgcagcagcaaaacacggctcctcaaattggaactgtcaacagccagggggccttacccggtatggtctggcagaaccgggacgtgtacctgcagggtcccatctgggccaagattcctcacacggacggcaacttccacccgtctccgctgatgggcggctttggcctgaaacatcctccgcctcagatcctgatcaagaacacgcctgtacctgcggatcctccgaccaccttcaaccagtcaaagctgaactctttcatcacgcaatacagcaccggacaggtcagcgtggaaattgaatgggagctgcagaaggaaaacagcaagcgctggaaccccgagatccagtacacctccaactactacaaatctacaagtgtggactttgctgttaatacagaaggcgtgtactctgaaccccaccccattggcacccgttacctcacccgtcccctgtaa

SEQ ID NO: 2078 - DNA, 2211 bp, Artificial Sequence
  Description of Artificial Sequence: Synthetic polynucleotide
atggctgccgatggttatcttccagattggctcgaggacactctctctgaaggaataagacagtggtggaagctcaaacctggcccaccaccaccaaagcccgcagagcggcataaggacgacagcaggggtcttgtgcttcctgggtacaagtacctcggacccttcaacggactcgacaagggagagccggtcaacgaggcagacgccgcggccctcgagcacgacaaagcctacgaccagcagctccaagcgggtgacaatccgtacctgcggtataaccacgccgacgccgagtttcaggagcgtcttcaaggagatacgtcttttgggggcaacctcggacgagcagtcttccaggccaaaaagaggcttcttgaacctcttggtctggttgaggaagcggctaagacggctcctggaaagaagaggcctgtagagcagtctcctcaggaaccggactcctccgcgggtattggcaaatcgggtgcacagcccgctaaaaagagactcaatttcggtcagactggcgacacagagtcagtcccagaccctcaaccaatcggagaacctcccgcagccccctcaggtgtgggatctcttacaatggcttcaggtggtggcgcaccagtggcagacaataacgaaggtgccgatggagtgggtagttcctcgggaaattggcattgcgattcccaatggctgggggacagagtcatcaccaccagcacccgaacatgggccttgcccacctataacaaccacctctacaagcaaatctccagtgcttcaacgggggccagcaacgacaaccactacttcggctacagcaccccctgggggtattttgacttcaaccgcttccactgccacttctcaccacgtgactggcagcgactcatcaacaacaactggggattccggcccaagagactcagcttcaagctcttcaacatccaggtcaaggaggtcacgcagaatgaaggcaccaagaccatcgccaataacctcaccagcaccatccaggtgtttacggactcggagtaccagctgccgtacgttctcggctctgcccaccagggctgcctgcctccgttcccggcggacgtgttcatgattccccagtacggctacctaacactcaacaacggtagtcaggccgtgggacgctcctccttctactgcctggaatactttccttcgcagatgctgagaaccggcaacaacttccagtttacttacaccttcgaggacgtgcctttccacagcagctacgcccacagccagagcttggaccggctgatgaatcctctgattgaccagtacctgtactacttgtctcggactcaaacaacaggaggcacggcaaatacgcagactctgggcttcagccaaggtgggcctaatacaatggccaatcaggcaaagaactggctgccaggaccctgttaccgccaacaacgcgtctcaacgacaaccgggcaaaacaacaatagcaactttgcctggactgctgggaccaaataccatctgaatggaagaaattcattggctaatcctggcatcgctatggcaacacacaaagacgacaaggagcgtttttttcccagtaacgggatcctgatttttggcaaacaaaatgctgccagagacaatgcggattacagcgatgtcatgctcaccagcgaggaagaaatcaaaaccactaaccctgtggctacagaggaatacggtatcgtggcagataacttgcagcagcaaaacacggctcctcaaattggaactgtcaacagccagggggccttacccggtatggtctggcagaaccgggacgtgtacctgcagggtcccatctgggccaagattcctcacacggacggcaacttccacccgtctccgctgatgggcggctttggcctgaaacatcctccgcctcagatcctgatcaagaacacgcctgtacctgcggatcctccgaccaccttcaaccagtcaaagctgaactctttcatcacgcaatacagcaccggacaggtcagcgtggaaattgaatgggagctgcagaaggaaaacagcaagcgctggaaccccgagatccagtacacctccaactactacaaatctacaagtgtggactttgctgttaatacagaaggcgtgtactctgaaccccaccccattggcacccgttacctcacccgtcccctgtaa

SEQ ID NO: 2079 - DNA, 2217 bp, Artificial Sequence
  Description of Artificial Sequence: Synthetic polynucleotide
atggctgccgatggttatcttccagattggctcgaggacaacctctctgagggaataagacagtggtggaagctcaaacctggcccaccaccaccaaagcccgcagagcggcataaggacgacagcaggggtcttgtgcttcctgggtacaagtacctcggacccttcaacggactcgacaagggagagccggtcaacgcggcggacgcagcggccctcgagcacgacaaggcctacgaccagcagctcaaagcgggtgacaatccgtacctgcggtataaccacgccgacgccgagtttcaggagcgtctgcaagaagatacgtcttttgggggcaacctcgggcgagcagtcttccaggccaagaagcgggttctcgaacctctcggtctggttgaggaaggcgctaagacggctcctggaaagaagagaccggtagagccatcaccccagcgttctccagactcctctacgggcatcggcaagaaaggccagcagcccgctaaaaagagactcaattttggtcagactggcgactcagagtcagtccccgacccacaacctctcggagaacctccagcaacccccgctgctgtgggacctactacaatggcttcaggcggtggcgcaccaatggcagacaataacgaaggcgccgacggagtgggtaatgcctcaggaaattggcattgcgattccacatggctgggggacagagtcatcaccaccagcacccgaacctgggccctgcccacctacaacaaccacctctacaagcaaatctccaacgggacttcgggaggaagcaccaacgacaacacctacttcggctgcgtcacgccctgggggtattttgactttaacaaattccactgccacttttcaccggatgactggcaacgactcatcaacaacggctggggattccggactaagcgactcaacttcaagctcttcagcatgaaagtcaaaaagggtacggacaacactggaatcaagaccatcgcgaataaccttaccaacacggtccatgtcttcgcggactcggagtaccagttgccgtacgtcctcggctctgcgcaccagggctgcctccctccgttcccggcggacgtgttcatgattccgcagtacggctacctaacgctcaacaatggcagccaggcagtgggacggtcatccttttactgcctggaatatttcccatcgcagatgctgagaacgggcaacaactttaccttcagctacacctttgaggacgttcctttccacagcagctacgctcacagccagagtctggaccgtctcatgaatcctctgattgaccagtacctgtactacttgtctcggactcaaacaacaggaggcacggcaaatacgcagactctgggcttcagccaaggtgggcctaatacaatggccaatcaggcaaagaactggctgccaggaccctgttaccgccaacaacgcgtctcaacgacaaccgggcaaaacaacaatagcaactttgcctggactgctgggaccaaataccatctgaatggaagaaattcattggctaatcctggcatcgctatggcaacacacaaagacgacaaggagcgtttttttcccagtaacgggatcctgatttttggcaaacaaaatgctgccagagacaatgcggattacagcgatgtcatgctcaccagcgaggaagaaatcaaaaccactaaccctgtggctacagaggaatacggtatcgtggcagataacttgcagcagcaaaacacggctcctcaaattggaactgtcaacagccagggggccttacccggtatggtctggcagaaccgggacgtgtacctgcagggtcccatctgggccaagattcctcacacggacggcaacttccacccgtctccgctgatgggcggctttggcctgaaacatcctccgcctcagatcctgatcaagaacacgcctgtacctgcggatcctccgaccaccttcaaccagtcaaagctgaactctttcatcacgcaatacagcaccggacaggtcagcgtggagatcgagtgggagctgcagaaggaaaacagcaagcgctggaacccggagatccagtacacctccaactactacaaatctacaagtgtggactttgctgttaatacagaaggcgtgtactctgaaccccaccccattggcacccgttacctcacccgtcccctgtaa

SEQ ID NO: 2080 - DNA, 2214 bp, Artificial Sequence
  Description of Artificial Sequence: Synthetic polynucleotide
atggctgccgatggttatcttccagattggctcgaggacactctctctgaaggaataagacagtggtggaagctcaaacctggcccaccaccaccaaagcccgcagagcggcataaggacgacagcaggggtcttgtgcttcctgggtacaagtacctcggacccttcaacggactcgacaagggggagcccgtcaacgcggcggacgcagcggccctcgagcacgacaaggcctacgaccagcagctcaaagcgggtgacaatccgtacctgcggtataaccacgccgacgccgagtttcaggagcgtctgcaagaagatacgtcttttgggggcaacctcgggcgagcagtcttccaggccaagaagcgggttctcgaacctctcggtctggttgaggaaggcgctaagacggctcctggaaagaagagaccggtagagccatcaccccagcgttctccagactcctctacgggcatcggcaagaaaggccagcagcccgcgaaaaagagactcaactttgggcagactggcgactcagagtcagtgcccgaccctcaaccaatcggagaaccccccgcaggcccctctggtctgggatctggtacaatggctgcaggcggtggcgctccaatggcagacaataacgaaggcgccgatggagtgggtagttcctcgggaaattggcattgcgattccacatggctgggggacagagtcatcaccaccagcacccgaacctgggccctgcccacctacaacaaccacctctacaaacaaatttccagcgcttcaacgggagcctcgaacgacaatcactactttggctacagcaccccctgggggtattttgacttcaacagattccactgccacttctcaccacgtgactggcagcgactcatcaacaacaactggggattccggcctaagcgactcaacttcaagctcttcaacattcaggtcaaagaggttacggacaacaatggagtcaagaccatcgccaataaccttaccagcacggtccaggtcttcacggactcggagtaccagttgccgtacgtcctcggctctgcgcaccagggctgcctccctccgttcccggcggacgtgttcatgattccgcagtacggctacctaacgctcaacaatggcagccaggcagtgggacggtcatccttttactgcctggaatatttcccatcgcagatgctgagaacgggcaacaactttaccttcagctacacctttgaggacgttcctttccacagcagctacgctcacagccagagtctggaccgtctcatgaatcctctgattgaccagtacctgtactacttgtctcggactcaaacaacaggaggcacggcaaatacgcagactctgggcttcagccaaggtgggcctaatacaatggccaatcaggcaaagaactggctgccaggaccctgttaccgccaacaacgcgtctcaacgacaaccgggcaaaacaacaatagcaactttgcctggactgctgggaccaaataccatctgaatggaagaaattcattggctaatcctggcatcgctatggcaacacacaaagacgacaaggagcgtttttttcccagtaacgggatcctgatttttggcaaacaaaatgctgccagagacaatgcggattacagcgatgtcatgctcaccagcgaggaagaaatcaaaaccactaaccctgtggctacagaggaatacggtatcgtggcagataacctgcagcagcaaaacacggctcctcaaattggaactgtcaacagccagggggccttacccggtatggtctggcagaaccgggacgtgtacctgcagggtcccatctgggccaagattcttcacacggacggcaactttcacccttctccgctgatgggagggtttggaatgaagcacccgcctcctccgatcctgatcaagaacacgcctgtacctgcggatcctccgaccaccttcaaccagtcaaagctgaactctttcatcacgcaatacagcaccggacaggtcagcgtggaaattgaatgggagctgccgaaggaaaacagcaagcgctggaaccccgagatccagtacacctccaactactacaaatctacaagtgtggactttgctgttaatacagaaggtgtgtactatgaaccccaccccattggcacccgttacctcacccctcccctgtaa

SEQ ID NO: 2081 - DNA, 2214 bp, Artificial Sequence
  Description of Artificial Sequence: Synthetic polynucleotide
atggctgccgatggttatcttccagattggctcgaggacaacctctctgagggcattcgcgagtggtgggcgctgaaacctggagccccgaagcccaaagccaaccagcaaaagcaggacgacggccggggtctggtgcttcctggctacaagtacctcggacccttcaacggactcgacaagggggagcccgtcaacgcggcggacgcagcggccctcgagcacgacaaggcctacgaccagcagctcaaagcgggtgacaatccgtacctgcggtataaccacgccgacgccgagtttcaggagcgtctgcaagaagatacgtcttttgggggcaacctcgggcgagcagtcttccaggccaagaagcgggttctcgaacctctcggtctggttgaggaaggcgctaagacggctcctggaaagaagagaccggtagagccatcaccccagcgctctccagactcctctacgggcatcggcaagaaaggccaacagcccgccagaaaaagactcaattttggtcagactggcgactcagagtcagttccagaccctcaacctctcggagaacctccagcagcgccctctggtgtggcacctaatacaatggctgcaggcggtggcgcaccaatggcagacaataacgaaggcgccgacggagtgggtaatgcctcaggaaattggcattgcgattccacatggctgggcgacagagtcatcaccaccagcacccgaacatgggccttgcccacctataacaaccacctctacaagcaaatctccagtgcttcaacgggggccagcaacgacaaccactacttcggctacagcaccccctgggggtattttgatttcaacagattccactgccacttttcaccacgtgactggcagcgactcatcacaacaattgggggattccggcctaagcgactcaacttcaagctcttcaacattcaggtcaaagaggttacggacaacaatggagtcaagaccatcgccaataaccttaccagcacggtccaggtcttcacggactcggagtaccagttgccgtacgtcctcggctctgcgcaccagggctgcctccctccgttcccggcggacgtgttcatgattccgcagtacggctacctaacgctcaacaatggcagccaggcagtgggacggtcatccttttactgcctggaatatttcccatcgcagatgctgagaacgggcaacaactttaccttcagctacacctttgaggacgttcctttccacagcagctacgctcacagccagagtctggaccggctgatgaatcctctgattgaccagtacctgtactacttgtctcggactcaaacaacaggaggcacggcaaatacgcagactctgggcttcagccaaggtgggcctaatacaatggccaatcaggcaaagaactggctgccaggaccctgttaccgccaacaacgcgtctcaacgacaaccgggcaaaacaacaatagcaactttgcctggactgctgggaccaaataccatctgaatggaagaaattcattggctaatcctggcatcgctatggcaacacacaaagacgacaaggagcgtttttttcccagtaacgggatcctgatttttggcaaacaaaatgctgccagagacaatgcggattacagcgatgtcatgctcaccagcgaggaagaaatcaaaaccactaaccctgtggctacagaggaatacggtatcgtggcagataacttgcagcagcaaaacacggctcctcaaattggaactgtcaacagccagggggccttacccggtatggtctggcagaaccgggacgtgtacctgcagggtcccatctgggccaagattcctcacacggacggcaacttccacccgtctccgctgatgggcggctttggcctgaaacatcctccgcctcagatcctgatcaagaacacgcctgtacctgcggatcctccgaccaccttcaaccagtcaaagctgaactctttcatcacgcaatacagcaccggacaggtcagcgtggaaattgaatgggagctgcagaaggaaaacagcaagcgctggaaccccgagatccagtacacctccaactactacaaatctacaagtgtggactttgctgttaatacagaaggcgtgtactctgaaccccaccccattggcacccgttacctcacccgtcccctgtaa

SEQ ID NO: 2082 - DNA, 2211 bp, Artificial Sequence
  Description of Artificial Sequence: Synthetic polynucleotide
atggctgccgatggttatcttccagattggctcgaggacactctctctgaaggaataagacagtggtggaagctcaaacctggcccaccaccaccaaagcccgcagagcggcataaggacgacggccggggtctggtgcttcctggctacaagtacctcggacccttcaacggactcgacaagggggagcccgtcaacgcggcggacgcagcggccctcgagcacgacaaggcctacgaccagcagctcaaagcgggtgacaatccgtacctgcggtataaccacgccgacgccgagtttcaggagcgtctgcaagaagatacgtcttttgggggcaacctcggacgagcagtcttccaggcgaaaaagagggttcttgaacctctgggcctggttgaggaacctgttaagacggctccgggaaaaaagaggccggtagagcagtcgccacaagagccagactcctcctcgggcatcggcaagaaaggccagcagcccgctaaaaagagactcaattttggtcagactggcgactcagagtcagtccccgacccacaacctctcggagaacctccagcaacccccgctgctgtgggacctactacaatggcttcaggcggtggcgcaccaatggcagacaataacgaaggcgccgacggagtgggtaatgcctcaggaaattggcattgcgattccacatggatgggcgacagagtcatcaccaccagcacccgaacatgggccttgcccacctataacaaccacctctacaagcaaatctccagtgcttcaacgggggccagcaacgacaaccactacttcggctacagcaccccctgggggtattttgactttaacagattccactgccacttttcaccacgtgactggcagcgactcatcaacaacaactggggattccggcctaagcgactcaacttcaagctcttcaacattcaggtcaaggaggtcacgcagaatgaaggcaccaagaccatcgccaataacctcaccagcaccatccaggtgtttacggactcggagtaccagctgccgtacgttctcggctccgcccaccagggctgcctgcctccgttcccggcggacgtgttcatgatcccccagtacggctacctaacactcaacaacggtagtcaggccgtgggacgctcctccttctactgcctggaatactttccttcgcagatgctgagaaccggcaacaacttccagtttacttacaccttcgaggacgtgcctttccacagcagctacgcgcacagccagagcttggaccggctgatgaatcctctgattgaccagtacctgtactacttgtctcggactcaaacaacaggaggcacggcaaatacgcagactctgggcttcagccaaggtgggcctaatacaatggccaatcacgcaaagaactggctgccaggaccctgttaccgccaacaacgcgtctcaacgacaaccgggcaaaacaacaatagcaactttgcctggactgctgggaccaaataccatctgaatggaagaaattcattggctaatcctggcatcgctatggcaacacacaaagacgacaaggagcgtttttttcccagtaacgggatcctgatttttggcaaacaaaatgctgccagagacaatgcggattacagcgatgtcatgctcaccagcgaggaagaaatcaaaaccactaaccctgtggctacagaggaatacggtatcgtggcagataacttgcagcagcaaaacacggctcctcaaattggaactgtcaacagccagggggccttacccggtatggtctggcagaaccgggacgtgtacctgcagggtcccatctgggccaagattcctcacacggacggcaacttccacccgtctccgctgatgggcggcttcggcctgaaacatcctccgcctcagatcctgatcaagaacacgcctgtacctgcggatcctccgaccaccttcaaccagtcaaagctgaactctttcatcacgcaatacagcaccggacaggtcagcgtggaaattgaatgggagctgcagaaggaaaacagcaagcgctggaaccccgagatccagtacacctccaactactacaaatctacaagtgtggactttgctgttaatacagaaggcgtgtactctgaaccccaccccattggcacccgttacctcacccgtcccctgtaa

SEQ ID NO: 2083 - DNA, 2214 bp, Artificial Sequence
  Description of Artificial Sequence: Synthetic polynucleotide
atggctgccgatggttatcttccagattggctcgaggacaacctctctcagggcattcgcgagtggtgggacttgaaacctggagccccgaaacccaaagccaaccagcaaaagcaggacgacggccggggtctggtgcttcctggctacaagtacctcggacccttcaacggactcgacaagggggagcccgtcaacgcggcggacgcagcggccctcgagcacgacaaggcctacgaccagcagctcaaagcgggtgacaatccgtacctgcggtataaccacgccgacgccgagtttcaggagcgtctgcaagaagatacgtcttttgggggcaacctcggacgagcagtcttccaggccaagaagcgggttctcgaacctctcggtctggttgaggaaggcgctaagacggctcctggaaagaagagaccggtagagccatcaccccagcgttctccagactcctctacgggcatcggcaagaaaggccaacagcccgccagaaaaagactcaattttggtcagactggcgactcagagtcagttccagaccctcaacctctcggagaacctccagcagcgcccgctgctgtgggacctactacaatggcttcaggcggtggcgcaccaatggcagacaataacgaaggcgccgacggagtgggtagttcctcgggaaattggcattgcgattcccaatggctgggggacagagtcatcaccaccagcacccgaacctgggccctgcccacctacaacaaccacctctacaagcaaatctccagtgcttcaacgggggccagcaacgacaaccactacttcggctacagcaccccctgggggtattttgacttcaacagattccactgccacttttcaccacgtgactggcaaagactcatcaacaacaactggggattccggcccaagagactcagcttcaagctcttcaacatccaggtcaaggaggtcacgcagaatgaaggcaccaagaccatcgccaataacctcaccagcaccatccaggtgtttacggactcggagtaccagctgccgtacgttctcggctctgcccaccagggctgcctgcctccgttcccggcggacgtgttcatgattccccagtacgggtacctgactctgaacaatggcagtcaggccgtgggccgttcctccttctactgcctggagtactttccttctcaaatgctgagaaccggcaacaacttccagtttacttacaccttcgaggacgtgcctttccacagcagctacgcccacagccagagcttggaccggctgatgaatcctctgattgaccagtacctgtactacttgtctcggactcaaacaacaggaggcacgacaaatgcgcagactctgggcttcagccaaggtgggcctaatacaatggccaatcaggcaaagaactggctgccaggaccctgttaccgccaacaacgcgtctcaacgacaaccgggcaaaacaacaatagcaactttgcctggactgctgggaccaaataccatctgaatggaagaaattcattggctaatcctggcatcgctatggcaacacacaaagacgacaaggagcgtttttttcccagtaacgggatcctgatttttggcaaacaaaatgctgccagagacaatgcggattacagcgatgtcatgctcaccagcgaggaagaaatcaaaaccactaaccctgtggctacagaggaatacggtatcgtggcagataacttgcagcagcaaaacacggctcctcaaattggaactgtcaacagccagggggccttacccggtatggtctggcagaaccgggacgtgtacctgcagggtcccatctgggccaagattcctcacacggacggcaacttccacccgtctccgctgatgggcggctttggcctgaaacatcctccgcctcagatcctgatcaagaacacgcctgtacctgcggatcctccgaccaccttcaaccagtcaaagctgaactctttcatcacacagtactccacgggacaggtcagcgtggaaattgaatgggagctgcagaaggaaaacagcaagcgctggaacccggagatccagtacacttccaactactacaaatctacaaatgtggactttgctgttaacacagaaggcgtgtactctgaaccccaccccattggcacccgttacctcacccgtcccctgtaa

SEQ ID NO: 2084 - DNA, 2211 bp, Artificial Sequence
  Description of Artificial Sequence: Synthetic polynucleotide
atggctgccgatggttatcttccagattggctcgaggacaacctctctgagggcattcgcgagtggtgggacttgaaacctggagccccgaaacccaaagccaaccagcaaaagcaggacgacggccggggtctggtgcttcctggctacaagtacctcggacccttcaacggactcgacaagggggagcccgtcaacgcggcggacgcagcggccctcgagcacgacaaggcctacgaccagcagctcaaagcgggtgacaatccgtacctgcggtataaccacgccgacgccgagtttcaggagcgtctgcaagaagatacgtcttttgggggcaacctcgggcgagcagtcttccaggccaagaagagggttctcgaaccttttggtctggttgaggaaggcgctaagacggctcctggaaagaaacgtccggtagagcagtcgccacaagagccagactcctcctcgggcatcggcaagacaggccagcagcccgctaaaaagagactcaatttcggtcagactggcgacacagagtcagtcccagaccctcaaccaatcggagaacctcccgcagccccctcaggtgtgggacctaatacaatggctgcaggcggtggcgcaccaatggcagacaataacgaaggcgccgacggagtgggtagttcctcgggaaattggcattgcgattccacatggatgggtgacagagtcatcaccaccagcacccgaacctgggccctgcccacctacaataaccacctctacaagcaaatctccagtgcttcaacgggggccagcaacgacaaccactacttcggctacagcaccccctgggggtattttgacttcaacagattccactgccacttctcaccacgtgactggcagcgactcatcaacaacaactggggattccggcctaagcgactcaacttcaagctcttcaacattcaggtcaaggaggtcacgcagaatgaaggcaccaagaccatcgccaataacctcaccagcaccatccaggtgtttacggactcggagtaccagctgccgtacgttctcggctctgcccaccagggctgcctgcctccgttcccggcggacgtgttcatgattccccagtacggctacctaacactcaacaacggtagtcaggccgtgggacgctcctccttctactgcctggaatactttccttcgcagatgctgagaaccggcaacaacttccagtttacttacaccttcgaggacgtgcctttccacagcagctacgcccacagccagagcttggaccggctgatgaatcctctgattgaccagtacctgtactacttgtctcggactcaaacaacaggaggcacggcaaatacgcagactctgggcttcagccaaggtgggcctaatacaatggccaatcaggcaaagaactggctgccaggaccctgttaccgccaacaacgcgtctcaacgacaaccgggcaaaacaacaatagcaactttgcctggactgctgggaccaaataccatctgaatggaagaaattcattggctaatcctggcatcgctatggcaacacacaaagacgacaaggagcgtttttttcccagtaacgggatcctgatttttggcaaacaaaatgctgccagagacaatgcggattacagcgatgtcatgctcaccagcgaggaagaaatcaaaaccactaaccctgtggctacagaggaatacggtatcgtggcagataacttgcagcagcaaaacacggctcctcaaattggaactgtcaacagccagggggccttacccggtatggtctggcagaaccgggacgtgtacctgcagggtcccatctgggccaagattcctcacacggacggcaacttccacccgtctccgctgatgggcggctttggcctgaaacatcctccgcctcagatcctgatcaagaacacgcctgtacctgcggatcctccgaccaccttcaaccagtcaaagctgaactctttcatcacacagtactccacgggacaggtcagcgtggaaattgaatgggagctgcagaaggaaaacagcaagcgctggaacccggagatccagtacacttccaactactacaaatctacaaatgtggactttgctgttaacacagaaggcgtgtactctgaaccccaccccattggcacccgttacttcacccgtcccctgtaa

SEQ ID NO: 2085 - DNA, 2211 bp, Artificial Sequence
  Description of Artificial Sequence: Synthetic polynucleotide
atggctgccgatggttatcttccagattggctcgaggacaacctctctgagggcattcgcgagtggtgggacttgaaacctggagccccgaaacccaaagccaaccagcaaaagcaggacgacggccggggtctggtgcttcctggctacaagtacctcggacccttcaacggactcgacaagggggagcccgtcaacgcggcggacgcagcggccctcgagcacgacaaggcctacgaccagcagctcaaagcgggtgacaatccgtacctgcggtataaccacgccgacgccgagtttcaggagcgtctgcaagaagatacgtcttttgggggcaacctcgggcgagcagtcttccaggccaagaagcgggttctcgaacctctcggtctggttgaggaaggcgctaagacggctcctggaaagaaacgtccggtagagcagtcgccacaagagccagactcctcctcgggcatcggcaagacaggccagcagcccgctaaaaaaagactcaattttggtcagactggcgactcagagtcagttccagaccctcaacctctcggagaacctccagcaacccccgctgctgtgggacctactacaatggcttcaggtggtggcgcaccaatggcagacaataacgagggcgccgacggagtgggtaattcctcgggaaattggcattgcgattccacatggatgggcgacagagtcatcaccaccagcacccgaacctgggccctgcccacctacaacaatcacctctacaagcaaatctccagtgcttcaacgggggccagcaacgacaaccactacttcggctacagcaccccctgggggtattttgacttcaacagattccactgccacttctcaccacgtgactggcagcgactcatcaacaacaactggggattccggcctaagcgactcaacttcaagctcttcaacattcaggtcaaagaggttacggacaacaatggagtcaagaccatcgccaataaccttaccagcacggtccaggtcttcacggactcggagtaccagttgccgtacgtcctcggctctgcgcaccagggctgcctccctccgttcccggcggacgtgttcatgattccgcagtacggctacctaacgctcaacaacggtagtcaggccgtgggacgctcctccttctactgcctggaatactttccttcgcagatgctgagaaccggcaacaacttccagtttacttacaccttcgaggacgtgcctttccacagcagctacgcccacagccagagcttggaccggctgatgaatcctctgattgaccagtacctgtactacttgtctcggactcaaacaacaggaggcacggcaaatacgcagactctgggcttcagccaaggtgggcctaatacaatggccaatcaggcaaagaactggctgccaggaccctgttaccgccaacaacgcgtctcgacgacaaccgggcaaaacaacaatagcaactttgcctggactgctgggaccaaataccatctgaatggaagaaattcattggctaatcctggcatcgctatggcaacacacaaagacgacaaggagcgtttttttcccagtaacgggatcctgatttttggcaaacaaaatgctgccagagacaatgcggattacagcgatgtcatgctcaccagcgaggaagaaatcaaaaccactaaccctgtggctacagaggaatacggtatcgtggcagataacttgcagcagcaaaacacggctcctcaaattggaactgtcaacagccagggggccttacccggtatggtttggcagaaccgggacgtgtacctgcagggtcccatctgggccaagattcctcacacggacggcaacttccacccgtctccgctgatgggcggctttggcctgaaacatcctccgcctcagatcctgatcaagaacacgcctgtacctgcggatcctccgaccaccttcaaccagtcaaagctgaactctttcatcacacagtactccacgggacaggtcagcgtggaaattgaatgggagctgcagaaggaaaacagcaagcgctggaacccggagatccagtacacttccaactactacaaatctacaaatgtggactttgctgttaacacagaaggcgtgtactctgaaccccaccccattggcacccgttacctcacccgtcccctgtaa

SEQ ID NO: 2086 - DNA, 2211 bp, Artificial Sequence
  Description of Artificial Sequence: Synthetic polynucleotide
atggctgccgatggttatcttccagattggctcgaggacaacctctctgagggcattcgcgagtggtgggacttgaaacctggagccccgaagcccaaagccaaccagcaaaagcaggacgacggccggggtctggtgcttcctggctacaagtacctcggacccttcaacggactcgacaagggggagcccgtcaacgcggcggacgcagcggccctcgagcacgacaaggcctacgaccagcagctcaaagcgggtgacaatccgtacctgcggtataaccacgccgacgccgagtttcaggagcgtctgcaagaagatacgtcttttgggggcaacctcgggcgagcagtcttccaggccaagaagcgggttctcgaacctctcggtctggttgaggaaggcgctaagacggctcctggaaagaaacgtccggtagagcagtcaccacaagagccagactcctcctcgggcatcggcaagacaggccagcagcccgctaaaaagagactcaattttggtcagactggcgactcagagtcagtccccgacccacaacctctcggagaacctccagcaacccccgctgctgtgggacctactacaatggcttcaggcggtggcgcaccaatggcggacaataacgaaggcgccgatggagtgggtaatgcctcaggaaattggcattgcgattccacatggctgggcgacagagtcatcaccaccagcacccgaacatgggccttgcccacctataacaaccacctctacaagcaaatctccagtgcttcaacgggggccagcaacgacaaccactacttcggctacagcaccccctgggggtattttgactttaacagattccactgccacttctcaccacgtgactggcagcgactcatcaacaacaactggggattccggcccaagagactcaacttcaagctcttcaacatccaggtcaaggaggtcacgcagaatgaaggcaccaagaccatcgccaataacctcaccagcaccatccaggtgtttacggactcggagtaccagctgccgtacgttctcggctctgcccaccagggctgcctgcctccgttcccggcggacgtgttcatgattccccagtacggctacctgactctgaacaatggcagtcaggccgtgggccgttcctccttctactgcctagagtactttccttctcaaatgctgagaacgggcaacaactttgagttcagctaccagtttgaggacgtgccttttcacagcagctacgcgcacagccaaagcctggaccggctgatgaatcctctgattgaccagtacctgtactacttgtctcggactcaaacaacaggaggcacggcaaatacgcagactctgggcttcagccaaggtgggcctaatacaatggccaatcaggcaaagaactggctgccaggaccctgttaccgccaacaacgcgtctcaacgacaaccgggcaaaacaacaatagcaactttgcctggactgctgggaccaaataccatatgaatggaagaaattcattggttaatcctggcatcgctatggcaacacacaaagacgacaaggagcgtttttttcccagtaacgggatcctgatttttggcaaacaaaatgttgccagagacaatgcggattacagcgatgtcatgctcaccagcgaggaagaaatcaaaaccactaaccctgtggctacagaggaatacggtattgtggcagataacttgcagcagcaaaacacggctcctcaaattggaactgtcaacagccagggggccttacccggtatggtctggcagaaccgggacgtgtacctgcagggtcccatctgggccaagattcctcacacggacggcaacttccacccgtcgccgctgatgggcggctttggcctgaaacatcctccgcctcagatcctgatcaagaacacgcctgtacctgcggatcctccgaccaccttcaaccagtcaaagctgaactctttcatcacgcaatacagcaccggacaggtcagcgtggaaattgaatgggagctgcagaaggaaaacagcaagcgctggaaccccgagatccagtacacctccaactactacaaatctacaagtgtggactttgctgttaatacagaaggcgtgtactctgaaccccaccccattggcacccgttacctcacccgtcccctgtaa

SEQ ID NO: 2087 - protein, 736 aa, Artificial Sequence
  Description of Artificial Sequence: Synthetic polypeptide
MAADGYLPDWLEDTLSEGIRQWWKLKPGPPPPKPAERHKDDSRGLVLPGYKYLGPFNGLDKGEPVNEADAAALEHDKAYDRQLDSGDNPYLKYNHADAEFQERLKEDTSFGGNLGRAVFQAKKRVLEPLGLVEEPVKTAPGKKRPVEQSPQEPDSSSGIGKKGQQPAKKRLNFGQTGDSESVPDPQPLGEPPATPAAVGPTTMASGGGAPMADNNEGADGVGNASGNWHCDSTWMGDRVITTSTRTWALPTYNNHLYKQISSASTGASNDNHYFGYSTPWGYFDFNRFHCHFSPRDWQRLINNNWGFRPKRLNFRLFNIQVKEVTDNNGVKTIANNLTSTVQVFTDSEYQLPYVLGSAHQGCLPPFPADVFMIPQYGYLTLNNGSQAVGRSSFYCLEYFPSQMLRTGNNFTFSYTFEEVPFHSSYAHSQSLDRLMNPLIDQYLYYLSRTQTTGGTANTQTLGFSQGGPNTMANQAKNWLPGPCYRQQRVSTTTGQNNNSNFAWTAGTKYHLNGRNSLANPGIAMATHKDDKERFFPSNGILIFGKQNAARDNADYSDVMLTSEEEIKTTNPVATEEYGIVADNLQQQNTAPQIGTVNSQGALPGMVWQNRDVYLQGPIWAKIPHTDGNFHPSPLMGGFGLKHPPPQILIKNTPVPADPPTTFNQSKLNSFITQYSTGQVSVEIEWELQKENSKRWNPEIQYTSNYYKSTSVDFAVNTEGVYSEPHPIGTRYLTRPL

SEQ ID NO: 2088 - protein, 736 aa, Artificial Sequence
  Description of Artificial Sequence: Synthetic polypeptide
MAADGYLPDWLEDNLSEGIREWWDLKPASPKPKANQQKQDDGRGLVLPGYKYLGPFNGLDKGEPVNAADAAALEHDKAYDQQLKAGDNPYLRYNHADAEFQERLQEDTSFGGNLGRAVFQAKKRLLEPLGLVEEAAKTAPGKKRPVEQSPQEPDSSAGIGKSGAQPAKKRLNFGQTGGTESVPDPQPLGEPPAAPSGVGPNTMAAGGGAPMADNNEGADGVGSSSGNWHCDSTWLGDRVITTSTRTWALPTYNNHLYKQISSASTGASNDNHYFGYSTPWGYFDFNRFHCHFSPRDWQRLINNNWGFRPKRLSFKLFNIQVKEVTQNEGTKTIANNLTSTIQVFTDSEYQLPYVLGSAHQGCLPPFPADVFMIPQYGYLTLNNGSQAVGRSSFYCLEYFPSQMLRTGNNFQFTYTFEDVPFHSSYAHSQSLDRLMNPLIDQYLYYLSRTQTTGGTANTQTLGFSQGGPNTMANQAKNWLPGPCYRQQRVSTTTGQNNNSNFAWTAGTKYHLNGRNSLANPGIAMATHKDDKERFFPSNGILIFGKQNAARDNADYSDVMLTSEEEIKTTNPVATEEYGIVADNLQQQNTAPQIGTVNSQGALPGMVWQNRDVYLQGPIWAKIPHTDGNFHPSPLMGGFGLKHPPPQILIKNTPVPADPPTTFNQSKLNSFITQYSTGQVSVEIEWELQKENSKRWNPEIQYTSNYYKSTSVDFAVNTEGVYSEPHPIGTRYLTRPL

SEQ ID NO: 2089 - protein, 736 aa, Artificial Sequence; identical to SEQ ID NO: 2028
  Description of Artificial Sequence: Synthetic polypeptide

SEQ ID NO: 2090 - protein, 736 aa, Artificial Sequence
  Description of Artificial Sequence: Synthetic polypeptide
MAADGYLPDWLEDNLSEGIREWWDLEPGAPKPKANQQKQDDGRGLVLPGYKYLGPFNGLDKGEPVNAADAAALEHDKAYDQQLKAGDNPYLRYNHADAEFQERLQEDTSFGGNLGRAVFQAKKRVLEPLGLVEEGAKTAPGKKRPVEQSPQEPDSSSGIGKTGQQPAKKRLNFGQTGDSESVPDPQPLGEPPATPAAVGPTTMASGGGAPMADNNEGADGVGNASGNWHCDSTWLGDRVITTSTRTWALPTYNNHLYKQISSASTGASNDNHYFGYSTPWGYFDFNRFHCHFSPRDWQRLINNNWGFRPKRLNFKLFNIQVKEVTDNNGVKTIANNLTSTVQVFTDSEYQLPYVLGSAHQGCLPPFPADVFMIPQYGYLTLNNGSQAVGRSSFYCLEYFPSQMLRTGNNFQFTYTFEDVPFHSSYAHSQSLDRLMNPLIDQYLYYLSRTQTTGGTANTQTLGFSQGGPNTMANQAKNWLPGPCYRQQRVSTTTGQNNNSNFAWTAGTKYHLNGRNSLANPGIAMATHKDDKERFFPSNGILIFGKQNAARDNADYSDVMLTSEEEIKTTNPVATEEYGIVADNLQQQNTAPQIGTVNSQGALPGMVWQNRDVYLQGPIWAKIPHTDGNFHPSPLMGGFGLKHPPPQILIKNTPVPADPPTTFNQSKLNSFITQYSTGQVSVEIEWELQKENSKRWNPEIQYTSNYYKSTSVDFAVNTEGVYSEPHPIGTRYLTRPL

SEQ ID NO: 2091 - protein, 736 aa, Artificial Sequence; identical to SEQ ID NO: 2028
  Description of Artificial Sequence: Synthetic polypeptide

SEQ ID NO: 2092 - protein, 736 aa, Artificial Sequence
  Description of Artificial Sequence: Synthetic polypeptide
MAADGYLPDWLEDTLSEGIRQWWKLKPGPPPPKPAERHKDDSRGLVLPGYKYLGPFNGLDKGEPVNEADAAALEHDKAYDRQLDSGDNPYLKYNHADAEFQERLKEDTSFGGNLGRAVFQAKKRVLEPLGLVEEPVKTAPGKKRPVEQSPQEPDSSSGIGKKGQQPAKKRLNFGQTGDSESVPDPQPLGEPPATPAAVGPTTMASGGGAPMADNNEGADGVGNASGNWHCDSTWLGDRVITTSTRTWALPTYNNHLYKQISSASTGASNDNHYFGYSTPWGYFDFNRFHCHFSPRDWQRLINNNWGFRPKRLNFKLFNIQVKEVTDNNGVKTIANNLTSTVQVFTDSDYQLPYVLGSAHQGCLPPFPADVFMIPQYGYLTLNNGSQAVGRSSFYCLEYFPSQMLRTGNNFQFTYTFEDVPFHSSYAHSQSLDRLMNPLIDQYLYYLSRTQTTGGTANTQTLGFSQGGPNTMANQAKNWLPGPCYRQQRVSTTTGQNNNSNFAWTAGTKYHLNGRNSLANPGIAMATHKDDKERFFPSNGILIFGKQNAARDNADYSDVMLTSEEEIKTTNPVATEEYGIVADNLQQQNTAPQIGTVNSQGALPGMVWQNRDVYLQGPIWAKIPHTDGNFHPSPLMGGFGLKHPPPQILIKNTPVPADPPTTFNQSKLNSFITQYSTGQVSVEIEWELQKENSKRWNPEIQYTSNYYKSTSVDFAVNTEGVYSEPHPIGTRYLTRPL

SEQ ID NO: 2093 - protein, 734 aa, Artificial Sequence
  Description of Artificial Sequence: Synthetic polypeptide
MAADGYLPDWLEDTLSEGIRQWWKLKPGPPPPKPAERHKDDSRGLVLPGYKYLGPFNGLDKGEPVNEADAAALEHDKAYDQQLQAGDNPYLRYNHADAEFQERLQGDTSFGGNLGRAVFQAKKRLLEPLGLVEEAAKTAPGKKRPVEQSPQEPDSSAGIGKSGAQPAKKRLNFGQTGDTESVPDPQPIGEPPAAPSGVGSLTMASGGGAPVADNNEGADGVGSSSGNWHCDSQWLGDRVITTSTRTWALPTYNNHLYKQISSASTGASNDNHYFGYSTPWGYFDFNRFHCHFSPRDWQRLINNNWGFRPKRLSFKLFNHPGQGGHAERHQDHRQPHQHIQVFTDSEYQLPYVLGSAHQGCLPPFPADVFMIPQYGYLTLNNGSQAVGRSSFYCLEYFPSQMLRTGNNFQFTYTFEDVPFHSSYAHSQSLDRLMNPLIDQYLYYLSRTQTTGGTANTQTLGFSQGGPNTMANQAKNWLPGPCYRQQRVSTTTGQNNNSNFAWTAGTKYHLNGRNSLGNPGIAMATHKDDKERFFPSNGILIFGKQNAARDNADYSDVMLTSEEEIKTTNPVATEEYGIVADNLQQQNTAPQIGTVNSQGALPGMVWQNRDVYLQGPIWAKIPHTDGNFHPSPLMGGFGLKHPPPQILIKNTPVPADPPTAFNQSKLNSFITQYSTGQVSVEIEWELQKENSKRWNPEIQYTSNYYKSTSVDFAVNTEGVYSEPHPIGTRYLTRPL

SEQ ID NO: 2094 - protein, 737 aa, Artificial Sequence
  Description of Artificial Sequence: Synthetic polypeptide
MAADGYLPDWLEDNLSEGIREWWDLKHGAPKPKANQQKQDDGRGLVLPGYKYLGPFNGLDKGEPVNAADAAALEHDKAYDQQLKAGDNPYLRYNHADAEFQERLQEDTSFGGNLGRAVFQAKKRVLEPFGLVEEGAKTAPGKKRPVEQSPQEPDSSSGIGKTGQQPAKKRLNFGQTGDSESVPDPQPLGEPPATPAAVGPTTMASGGGAPMADNNEGADGVGNASGNWHCDSTWLGDRVITTSTRTWALPTYNNHLYKQISNGTSGGSTNDNTYFGYSTPWGYFDFNRFHCHFSPRDWQRLINNNWGFRPKRLNFKLFNIQVKEVTQNEGTKTIANNLTSTIQVFTDSEYQLPYVLGSAHQGCLPPFPADVFMIPQYGYLTLNNGSQAVGRSSFYCLEYFPSQMLRTGNNFTFSYTFEDVPFHSSYAHSQSLDRLMNPLIDQYLYYLSRTQTTGGTANTQTLGFSQGGPNTMANQAKNWLPGPCYRQQRVSTTTGQNNNSNFAWTAGTKYHLNGRNSLANPGIAMATHKDDKERFFPSNGILIFGKQNAARDNADYSDVMLTSEEEIKTTNPVATEEYGIVADNLQQQNTAPQIGTVNSQGALPGMVWQNRDVYLQGPIWAKIPHTDGNFHPSPLMGGFGLKHPPPQILIKNTPVPADPPTTFNQSKLNSFITQYSTGQVSVEIEWELQKENSKRWNPEIQYTSNYYKSTSVDFAVNTEGVYSDPHPIGTRYLTRPL

SEQ ID NO: 2095 - protein, 737 aa, Artificial Sequence
  Description of Artificial Sequence: Synthetic polypeptide
MAADGYLPDWLEDNLSEGIREWWALKPGAPKPKANQQKQDDGRGLVLPGYKYLGPFNGLDKGEPVNEADAAALEHDKAYDQQLKAGDNPYLRYNHADAEFQERLQEDTSFGGNLGRAVFQAKKRVLEPLGLVEEGAKTAPGKKRPVEPSPQRSPDSSTGIGKKGQQPARKRLNFGQTGDSESVPDPQPLGEPPAAPSGVGPNTMASGGGAPMADNNEGADGVGNSSGNWHCDSTWMGDRVITTSTRTWALPTYNNHLYKQISSASTGASNDNHYFGYSTPWGYFDFNRFHCHFSPRDWQRLINNNWGFRPKRLNFKLFNIQVKEVTQNEGTKTIANNLTSTIQVFTDSEYQLPYVLGSAHQGCLPPFPADVFMIPQYGYLTLNNGSQAVGRSSFYCLEYFPSQMLRTGNNFQFTYTFEDVPFHSSYAHSQSLDRLMNPLIDQYLYYLSRTQTTGGTANTQTLGFSQGGPNTMANQAKNWLPGPCYRQQRVSTTTGQNNNSNFAWTAGTKYHLNGRNSLANPGIAMATHKDDKERFFPSNGILIFGKQNAARDNADYSDVMLTSEEEIKTTNPVATEEYGIVADNLQQQNTAPQIGTVNSQGALPGMVWQNRDVYLQGPIWAKIPHTDGNFHPSPLMGGFGLKHPPPQILIKNTPVPADPPTTFNQSKLNSFITQYSTGQVSVEIEWELQKENSKRWNPEIQYTSNYYKSTSVDFAVNTEGVYSEPHPIGTRYLTRPL

SEQ ID NO: 2096 - protein, 736 aa, Artificial Sequence
  Description of Artificial Sequence: Synthetic polypeptide
  misc_feature (226)..(226): Xaa can be any naturally occurring amino acid
MAADGYLPDWLEDTLSEGIRQWWKLKPGPPPPKPAERHKDDSRGLVLPGYKYLGPFNGLDKGEPVNEADAAALEHDKAYDRQLDSGDNPYLKYNHADAEFQERLKEDTSFGGNLGRAVFQAKKRVLEPLGLVEEPVKTAPGKKRPVEQSPQEPDSSSGIGKKGQQPAKKRLNFGQTGDSESVPDPQPLGEPPATPAAVGPTTMASGGGAPMADNNEGADGVGNASXNWHCDSTWLGDRVITTSTRTWALPPITTTSTSKSPVLQRGRSNDNHYFGYSTPWGYFDFNRFHCHFSPRDWQRLINNNWGFRPKRLNFKLFNIQVKEVTDNNGVKTIANNLTSTVQVFTDSDYQLPYVLGSAHQGCLPPFPADVFMIPQYGYLTLNNGSQAVGRSSFYCLEYFPSQMLRTGNNFQFTYTFEDVPFHSSYAHSQSLDRLMNPLIDQYLYYLSRTQTTGGTANTQTLGFSQGGPNTMANQAKNWLPGPCYRQQRVSTTTGQNNNSNFAWTAGTKYHLNGRNSLANPGIAMATHKDDKERFFPSNGILIFGKQNAARDNADYSDVMLTSEEEIKTTNPVATEEYGIVADNLQQQNTAPQIGTVNSQGALPGMVWQNRDVYLQGPIWAKIPHTDGNFHPSPLMGGFGLKHPPPQILIKNTPVPADPPTTFNQSKLNSFITQYSTGQVSVEIEWELQKENSKRWNPEIQYTSNYYKSTNVDFAVNTEGVYSEPHPIGTRYLTRPL

SEQ ID NO: 2097 - protein, 736 aa, Artificial Sequence
  Description of Artificial Sequence: Synthetic polypeptide
  misc_feature (239)..(239): Xaa can be any naturally occurring amino acid
MAADGYLPDWLEDNLSEGIREWWDLKPGAPKPKANQQKQDDGRGLVLPGYKYLGPFNGLDKGEPVNAADAAALEHDKAYDQQLQAGDNPYLRYNHADAEFQERLQGDTSFGGNLGRAVFQAKKRVLEPLGLVEEAAKTAPGKKRPVEQSPQEPDSSAGIGKSGAQPAKKRLNFGQTGDTESVPDPQPIGEPPAAPSGVGPNTMAAGGGAPMADNNEGADGVGSSSGNWHCDSTWLGDRXITTSTRTWALPTYNNHLYKQISSASTGASNDNHYFGYSTPWGYFDFNRFHCHFSPRDWQRLINNNWGFRPKRLNFKLFNIQVKEVTDNNGVKTIANNLTSTVQVFTDSEYQLPYVLGSAHQGCLPPFPADVFMIPQYGYLTLNNGSQAVGRSSFYCLEYFPSQMLRTGNNFTFSYTFEDVPFHSSYAHSQSLDRLMNPLIDQYLYYLSRTQTTGGTANTQTLGFSQGGPNTMANQAKNWLPGPCYRQQRVSTTTGQNNNSNFAWTAGTKYHLNGRNSLANPGIAMATHKDDKERFFPSNGILIFGKQNAARDNADYSDVMLTSEEEIKTTNPVATEEYGIVADNFQQQNTAPQIGTVNSQGALPGMVWQNRDVYLQGPIWAKIPHTDGNFHPSPLMGGFGLKHPPPQILIKNTPVPADPPTTFNQSKLNSFITQYSTGQVSVEIEWELQKENSKRWNPEIQYTSNYYKSTSVDFAVNTEGVYSEPHPIGTRYLTRPL

SEQ ID NO: 2098 - protein, 736 aa, Artificial Sequence
  Description of Artificial Sequence: Synthetic polypeptide
MAADGYLPDWLEDNLSEGIREWWALKPGAPKPKANQQKQDDGRGLVLPGYKYLGPFNGLDKGEPVNEADAAALEHDKAYDQQLKAGDNPYLKYNHADAEFQERLQEDTSFGGNLGRAVFQAKKRLLEPLGLVEEAAKTAPGKKRPVEQSPQEPDSSAGIGKSGAQPAKKRLNFGQTGDTESVPDPQPLGEPPATPAAVGPTTMASGGGAPMADNNEGADGVGNASGNWHCDSTWLGDRVITTSTRTWALPTYNNHLYKQISSASTGASNDNHYFGYSTPWGYFDFNRFHCHFSPRDWQRLINNNWGFRPKRLSFKLFNIQVKEVTQNEGTKTIANNLTSTIQVFTDSEYQLPYVLGSAHQGCLPPFPADVFMIPQYGYLTLNNGSQAVGRSSFYCLEYFPSQMLRTGNNFQFTYTFEDVPFHSSYAHSQSLDRLMNPLIDQYLYYLSRTQTTGGTANTQTLGFSQGGPNTMANQAKNWLPGPCYRQQRVSTTTGQNNNSNFAWTAGTKYHLNGRNSLANPGIAMATHKDDKERFFPSNGILIFGKQNAARDNADYSDVMLTSEEEIKTTNPVATEEYGIVADNLQQQNTAPQIGTVNSQGALPGMVWQNRDVYLQGPIWAKIPHTDGNFHPSPLMGGFGLKHPPPQILIKNTPVPADPPTTFNQSKLNSFITQYSTGQVSVEIEWELQKENSKRWNPEIQYTSNYYKSTSVDFAVNTEGVYSEPHPIGTRYLTRPL

SEQ ID NO: 2099 - protein, 736 aa, Artificial Sequence
  Description of Artificial Sequence: Synthetic polypeptide
MAADGYLPDWLEDTLSEGIRQWWKLKPGPPPPKPAERHKDDSRGLVLPGYKYLGPFNGLDKGEPVNEADAAALEHDKAYDQQLQAGDNPYLRYNHADAEFQERLQGDTSFGGNLGRAVFQAKKRLLEPLGLVEEAAKTAPGKKRPVEQSPQEPDSSAGIGKSGAQPAKKRLNFGQTGDTESVPDPQPIGEPPAAPSGVGSLTMASGGGAPVADNNEGADGVGSSSGNWHCDSQWLGDRVITTSTRTWALPTYNNHLYKQISSASTGASNDNHYFGYSTPWGYFDFNRFHCHFSPRDWQRLINNNWGFRPKRLSFKLFNIQVKEVTQNEGTKTIANNLTSTIQVFTDSEYQLPYVLGSAHQGCLPPFPADVFMIPQYGYLTLNNGSQAVGRSSFYCLEYFPSQMLRTGNNFQFTYTFEDVPFHSSYAHSQSLDRLMNPLIDQYLYYLSRTQTTGGTANTQTLGFSQGGPNTMANQAKNWLPGPCYRQQRVSTTTGQNNNSNFAWTAGTKYHLNGRNSLANPGIAMATHKDDKERFFPSNGILIFGKQNAARDNADYSDVMLTSEEEIKTTNPVATEEYGIVADNLQQQNTAPQIGTVNSQGALPGMVWQNRDVYLQGPIWAKIPHTDGNFHPSPLMGGFGLKHPPPQILIKNTPVPADPPTTFNQSKLNSFITQYSTGQVSVEIEWELQKENSKRWNPEIQYTSNYYKSTSVDFAVNTEGVYSEPHPIGTRYLTRPL

SEQ ID NO: 2100 - protein, 738 aa, Artificial Sequence
  Description of Artificial Sequence: Synthetic polypeptide
MAADGYLPDWLEDNLSEGIRQWWKLKPGPPPPKPAERHKDDSRGLVLPGYKYLGPFNGLDKGEPVNAADAAALEHDKAYDQQLKAGDNPYLRYNHADAEFQERLQEDTSFGGNLGRAVFQAKKRVLEPLGLVEEGAKTAPGKKRPVEPSPQRSPDSSTGIGKKGQQPAKKRLNFGQTGDSESVPDPQPLGEPPATPAAVGPTTMASGGGAPMADNNEGADGVGNASGNWHCDSTWLGDRVITTSTRTWALPTYNNHLYKQISNGTSGGSTNDNTYFGCVTPWGYFDFNKFHCHFSPDDWQRLINNGWGFRTKRLNFKLFSMKVKKGTDNTGIKTIANNLTNTVHVFADSEYQLPYVLGSAHQGCLPPFPADVFMIPQYGYLTLNNGSQAVGRSSFYCLEYFPSQMLRTGNNFTFSYTFEDVPFHSSYAHSQSLDRLMNPLIDQYLYYLSRTQTTGGTANTQTLGFSQGGPNTMANQAKNWLPGPCYRQQRVSTTTGQNNNSNFAWTAGTKYHLNGRNSLANPGIAMATHKDDKERFFPSNGILIFGKQNAARDNADYSDVMLTSEEEIKTTNPVATEEYGIVADNLQQQNTAPQIGTVNSQGALPGMVWQNRDVYLQGPIWAKIPHTDGNFHPSPLMGGFGLKHPPPQILIKNTPVPADPPTTFNQSKLNSFITQYSTGQVSVEIEWELQKENSKRWNPEIQYTSNYYKSTSVDFAVNTEGVYSEPHPIGTRYLTRPL

SEQ ID NO: 2101 - protein, 737 aa, Artificial Sequence
  Description of Artificial Sequence: Synthetic polypeptide
MAADGYLPDWLEDTLSEGIRQWWKLKPGPPPPKPAERHKDDSRGLVLPGYKYLGPFNGLDKGEPVNAADAAALEHDKAYDQQLKAGDNPYLRYNHADAEFQERLQEDTSFGGNLGRAVFQAKKRVLEPLGLVEEGAKTAPGKKRPVEPSPQRSPDSSTGIGKKGQQPAKKRLNFGQTGDSESVPDPQPIGEPPAGPSGLGSGTMAAGGGAPMADNNEGADGVGSSSGNWHCDSTWLGDRVITTSTRTWALPTYNNHLYKQISSASTGASNDNHYFGYSTPWGYFDFNRFHCHFSPRDWQRLINNNWGFRPKRLNFKLFNIQVKEVTDNNGVKTIANNLTSTVQVFTDSEYQLPYVLGSAHQGCLPPFPADVFMIPQYGYLTLNNGSQAVGRSSFYCLEYFPSQMLRTGNNFTFSYTFEDVPFHSSYAHSQSLDRLMNPLIDQYLYYLSRTQTTGGTANTQTLGFSQGGPNTMANQAKNWLPGPCYRQQRVSTTTGQNNNSNFAWTAGTKYHLNGRNSLANPGIAMATHKDDKERFFPSNGILIFGKQNAARDNADYSDVMLTSEEEIKTTNPVATEEYGIVADNLQQQNTAPQIGTVNSQGALPGMVWQNRDVYLQGPIWAKILHTDGNFHPSPLMGGFGMKHPPPPILIKNTPVPADPPTTFNQSKLNSFITQYSTGQVSVEIEWELPKENSKRWNPEIQYTSNYYKSTSVDFAVNTEGVYYEPHPIGTRYLTPPL

SEQ ID NO: 2102 - protein, 737 aa, Artificial Sequence
  Description of Artificial Sequence: Synthetic polypeptide
MAADGYLPDWLEDNLSEGIREWWALKPGAPKPKANQQKQDDGRGLVLPGYKYLGPFNGLDKGEPVNAADAAALEHDKAYDQQLKAGDNPYLRYNHADAEFQERLQEDTSFGGNLGRAVFQAKKRVLEPLGLVEEGAKTAPGKKRPVEPSPQRSPDSSTGIGKKGQQPARKRLNFGQTGDSESVPDPQPLGEPPAAPSGVAPNTMAAGGGAPMADNNEGADGVGNASGNWHCDSTWLGDRVITTSTRTWALPTYNNHLYKQISSASTGASNDNHYFGYSTPWGYFDFNRFHCHFSPRDWQRLITTIGGFRPKRLNFKLFNIQVKEVTDNNGVKTIANNLTSTVQVFTDSEYQLPYVLGSAHQGCLPPFPADVFMIPQYGYLTLNNGSQAVGRSSFYCLEYFPSQMLRTGNNFTFSYTFEDVPFHSSYAHSQSLDRLMNPLIDQYLYYLSRTQTTGGTANTQTLGFSQGGPNTMANQAKNWLPGPCYRQQRVSTTTGQNNNSNFAWTAGTKYHLNGRNSLANPGIAMATHKDDKERFFPSNGILIFGKQNAARDNADYSDVMLTSEEEIKTTNPVATEEYGIVADNLQQQNTAPQIGTVNSQGALPGMVWQNRDVYLQGPIWAKIPHTDGNFHPSPLMGGFGLKHPPPQILIKNTPVPADPPTTFNQSKLNSFITQYSTGQVSVEIEWELQKENSKRWNPEIQYTSNYYKSTSVDFAVNTEGVYSEPHPIGTRYLTRPL

SEQ ID NO: 2103 - protein, 736 aa, Artificial Sequence
  Description of Artificial Sequence: Synthetic polypeptide
MAADGYLPDWLEDTLSEGIRQWWKLKPGPPPPKPAERHKDDGRGLVLPGYKYLGPFNGLDKGEPVNAADAAALEHDKAYDQQLKAGDNPYLRYNHADAEFQERLQEDTSFGGNLGRAVFQAKKRVLEPLGLVEEPVKTAPGKKRPVEQSPQEPDSSSGIGKKGQQPAKKRLNFGQTGDSESVPDPQPLGEPPATPAAVGPTTMASGGGAPMADNNEGADGVGNASGNWHCDSTWMGDRVITTSTRTWALPTYNNHLYKQISSASTGASNDNHYFGYSTPWGYFDFNRFHCHFSPRDWQRLINNNWGFRPKRLNFKLFNIQVKEVTQNEGTKTIANNLTSTIQVFTDSEYQLPYVLGSAHQGCLPPFPADVFMIPQYGYLTLNNGSQAVGRSSFYCLEYFPSQMLRTGNNFQFTYTFEDVPFHSSYAHSQSLDRLMNPLIDQYLYYLSRTQTTGGTANTQTLGFSQGGPNTMANHAKNWLPGPCYRQQRVSTTTGQNNNSNFAWTAGTKYHLNGRNSLANPGIAMATHKDDKERFFPSNGILIFGKQNAARDNADYSDVMLTSEEEIKTTNPVATEEYGIVADNLQQQNTAPQIGTVNSQGALPGMVWQNRDVYLQGPIWAKIPHTDGNFHPSPLMGGFGLKHPPPQILIKNTPVPADPPTTFNQSKLNSFITQYSTGQVSVEIEWELQKENSKRWNPEIQYTSNYYKSTSVDFAVNTEGVYSEPHPIGTRYLTRPL

SEQ ID NO: 2104 - protein, 737 aa, Artificial Sequence
  Description of Artificial Sequence: Synthetic polypeptide
MAADGYLPDWLEDNLSQGIREWWDLKPGAPKPKANQQKQDDGRGLVLPGYKYLGPFNGLDKGEPVNAADAAALEHDKAYDQQLKAGDNPYLRYNHADAEFQERLQEDTSFGGNLGRAVFQAKKRVLEPLGLVEEGAKTAPGKKRPVEPSPQRSPDSSTGIGKKGQQPARKRLNFGQTGDSESVPDPQPLGEPPAAPAAVGPTTMASGGGAPMADNNEGADGVGSSSGNWHCDSQWLGDRVITTSTRTWALPTYNNHLYKQISSASTGASNDNHYFGYSTPWGYFDFNRFHCHFSPRDWQRLINNNWGFRPKRLSFKLFNIQVKEVTQNEGTKTIANNLTSTIQVFTDSEYQLPYVLGSAHQGCLPPFPADVFMIPQYGYLTLNNGSQAVGRSSFYCLEYFPSQMLRTGNNFQFTYTFEDVPFHSSYAHSQSLDRLMNPLIDQYLYYLSRTQTTGGTTNAQTLGFSQGGPNTMANQAKNWLPGPCYRQQRVSTTTGQNNNSNFAWTAGTKYHLNGRNSLANPGIAMATHKDDKERFFPSNGILIFGKQNAARDNADYSDVMLTSEEEIKTTNPVATEEYGIVADNLQQQNTAPQIGTVNSQGALPGMVWQNRDVYLQGPIWAKIPHTDGNFHPSPLMGGFGLKHPPPQILIKNTPVPADPPTTFNQSKLNSFITQYSTGQVSVEIEWELQKENSKRWNPEIQYTSNYYKSTNVDFAVNTEGVYSEPHPIGTRYLTRPL

SEQ ID NO: 2105 - protein, 736 aa, Artificial Sequence
  Description of Artificial Sequence: Synthetic polypeptide
MAADGYLPDWLEDNLSEGIREWWDLKPGAPKPKANQQKQDDGRGLVLPGYKYLGPFNGLDKGEPVNAADAAALEHDKAYDQQLKAGDNPYLRYNHADAEFQERLQEDTSFGGNLGRAVFQAKKRVLEPFGLVEEGAKTAPGKKRPVEQSPQEPDSSSGIGKTGQQPAKKRLNFGQTGDTESVPDPQPIGEPPAAPSGVGPNTMAAGGGAPMADNNEGADGVGSSSGNWHCDSTWMGDRVITTSTRTWALPTYNNHLYKQISSASTGASNDNHYFGYSTPWGYFDFNRFHCHFSPRDWQRLINNNWGFRPKRLNFKLFNIQVKEVTQNEGTKTIANNLTSTIQVFTDSEYQLPYVLGSAHQGCLPPFPADVFMIPQYGYLTLNNGSQAVGRSSFYCLEYFPSQMLRTGNNFQFTYTFEDVPFHSSYAHSQSLDRLMNPLIDQYLYYLSRTQTTGGTANTQTLGFSQGGPNTMANQAKNWLPGPCYRQQRVSTTTGQNNNSNFAWTAGTKYHLNGRNSLANPGIAMATHKDDKERFFPSNGILIFGKQNAARDNADYSDVMLTSEEEIKTTNPVATEEYGIVADNLQQQNTAPQIGTVNSQGALPGMVWQNRDVYLQGPIWAKIPHTDGNFHPSPLMGGFGLKHPPPQILIKNTPVPADPPTTFNQSKLNSFITQYSTGQVSVEIEWELQKENSKRWNPEIQYTSNYYKSTNVDFAVNTEGVYSEPHPIGTRYFTRPL

SEQ ID NO: 2106 - protein, 736 aa, Artificial Sequence
  Description of Artificial Sequence: Synthetic polypeptide
MAADGYLPDWLEDNLSEGIREWWDLKPGAPKPKANQQKQDDGRGLVLPGYKYLGPFNGLDKGEPVNAADAAALEHDKAYDQQLKAGDNPYLRYNHADAEFQERLQEDTSFGGNLGRAVFQAKKRVLEPLGLVEEGAKTAPGKKRPVEQSPQEPDSSSGIGKTGQQPAKKRLNFGQTGDSESVPDPQPLGEPPATPAAVGPTTMASGGGAPMADNNEGADGVGNSSGNWHCDSTWMGDRVITTSTRTWALPTYNNHLYKQISSASTGASNDNHYFGYSTPWGYFDFNRFHCHFSPRDWQRLINNNWGFRPKRLNFKLFNIQVKEVTDNNGVKTIANNLTSTVQVFTDSEYQLPYVLGSAHQGCLPPFPADVFMIPQYGYLTLNNGSQAVGRSSFYCLEYFPSQMLRTGNNFQFTYTFEDVPFHSSYAHSQSLDRLMNPLIDQYLYYLSRTQTTGGTANTQTLGFSQGGPNTMANQAKNWLPGPCYRQQRVSTTTGQNNNSNFAWTAGTKYHLNGRNSLANPGIAMATHKDDKERFFPSNGILIFGKQNAARDNADYSDVMLTSEEEIKTTNPVATEEYGIVADNLQQQNTAPQIGTVNSQGALPGMVWQNRDVYLQGPIWAKIPHTDGNFHPSPLMGGFGLKHPPPQILIKNTPVPADPPTTFNQSKLNSFITQYSTGQVSVEIEWELQKENSKRWNPEIQYTSNYYKSTNVDFAVNTEGVYSEPHPIGTRYLTRPL

SEQ ID NO: 2107 - protein, 736 aa, Artificial Sequence
  Description of Artificial Sequence: Synthetic polypeptide
MAADGYLPDWLEDNLSEGIREWWDLKPGAPKPKANQQKQDDGRGLVLPGYKYLGPFNGLDKGEPVNAADAAALEHDKAYDQQLKAGDNPYLRYNHADAEFQERLQEDTSFGGNLGRAVFQAKKRVLEPLGLVEEGAKTAPGKKRPVEQSPQEPDSSSGIGKTGQQPAKKRLNFGQTGDSESVPDPQPLGEPPATPAAVGPTTMASGGGAPMADNNEGADGVGNASGNWHCDSTWLGDRVITTSTRTWALPTYNNHLYKQISSASTGASNDNHYFGYSTPWGYFDFNRFHCHFSPRDWQRLINNNWGFRPKRLNFKLFNIQVKEVTQNEGTKTIANNLTSTIQVFTDSEYQLPYVLGSAHQGCLPPFPADVFMIPQYGYLTLNNGSQAVGRSSFYCLEYFPSQMLRTGNNFEFSYQFEDVPFHSSYAHSQSLDRLMNPLIDQYLYYLSRTQTTGGTANTQTLGFSQGGPNTMANQAKNWLPGPCYRQQRVSTTTGQNNNSNFAWTAGTKYHMNGRNSLVNPGIAMATHKDDKERFFPSNGILIFGKQNVARDNADYSDVMLTSEEEIKTTNPVATEEYGIVADNLQQQNTAPQIGTVNSQGALPGMVWQNRDVYLQGPIWAKIPHTDGNFHPSPLMGGFGLKHPPPQILIKNTPVPADPPTTFNQSKLNSFITQYSTGQVSVEIEWELQKENSKRWNPEIQYTSNYYKSTSVDFAVNTEGVYSEPHPIGTRYLTRPL

SEQ ID NO: 2108 - DNA, 2217 bp, Artificial Sequence
  Description of Artificial Sequence: Synthetic polynucleotide
atggctgccgatggttatcttccagattggctcgaggacaacctctctgagggcattcgcgagtggtgggcgctgaaacctggagccccgaagcccaaagccaaccagcaaaagcaggacgacggccggggtctggtgcttcctggctacaagtacctcggacccttcaacggactcgacaagggggagcccgtcaacgcggcggacgcagcggccctcgagcacgacaaggcctacgaccagcagctgcaggcgggtgacaatccgtacctgcggtataaccacgccgacgccgagtttcaggagcgtctgcaagaagatacgtcttttgggggcaacctcgggcgagcagtcttccaggccaagaagcgggttctcgaacctctcggtctggttgaggaaggcgctaagacggctcctggaaagaagagaccggtagagccatcaccccagcgttctccagactcctctacgggcatcggcaagaaaggccaacagcccgccagaaaaagactcaattttggtcagactggcgactcagagtcagttccagaccctcaacctctcggagaacctccagcagcgccctctggtgtgggacctaatacaatggctgcaggcggtggcgcaccaatggcagacaataacgaaggcgccgacggagtgggtagttcctcgggaaattggcattgcgattccacatggctgggcgacagagtcatcaccaccagcacccgaacctgggccctgcccacctacaacaaccacctctacaagcaaatctccaacgggacatcgggaggagccaccaacgacaacacctacttcggctacagcaccccctgggggtattttgactttaacagattccactgccacttttcaccacgtgactggcagcgactcatcaacaacaactggggattccggcccaagagactcagcttcaagctcttcaacatccaggtcaaggaggtcacgcagaatgaaggcaccaagaccatcgccaataacctcaccagcaccatccaggtgtttacggactcggagtaccagctgccgtacgttctcggctctgcccaccagggctgcctgcctccgttcccggcggacgtgttcatgattccccagtacggctacctaacactcaacaacggtagtcaggccgtgggacgctcctccttctactgcctggaatactttccttcgcagatgctgagaaccggcaacaacttccagtttacttacaccttcgaggacgtgcctttccacagcagctacgcccacagccagagcttggaccggctgatgaatcctctgattgaccagtacctgtactacttgtctcggactcaaacaacaggaggcacggcaaatacgcagactctgggcttcagccaaggtgggcctaatacaatggccaatcaggcaaagaactggctgccaggaccctgttaccgccaacaacgcgtctcaacgacaaccgggcaaaacaacaatagcaactttgcctggactgctgggaccaaataccatctgaatggaagaaattcattggctaatcctggcatcgctatggcaacacacaaagacgacgaggagcgtttttttcccagtaacgggatcctgatttttggcaaacaaaatgctgccagagacaatgcggattacagcgatgtcatgctcaccagcgaggaagaaatcaaaaccactaaccctgtggctacagaggaatacggtatcgtggcagataacttgcagcagcaaaacacggctcctcaaattggaactgtcaacagccagggggccttacccggtatggtttggcagaaccgggacgtgtacctgcagggtcccatctgggccaagattcctcacacggacggcaacttccacccgtctccgctgatgggcggctttggcctgaaacatcctccgcctcagatcctgatcaagaacacgcctgtacctgcggatcctccgaccaccttcaaccagtcaaagctgaactctttcatcacgcaatacagcaccggacaggtcagcgtggaaattgaatgggagctgcagaaggaaaacagcaagcgctggaaccccgagatccagtacacctccaactactacaaatctacaagtgtggactttgctgttaatacagaaggcgtgtactctgaaccccgccccattggcacccgttacctcacccgtaatctgtaa

SEQ ID NO: 2109 - protein, 738 aa, Artificial Sequence; identical to SEQ ID NO: 105
  Description of Artificial Sequence: Synthetic polypeptide

SEQ ID NO: 2110 - protein, 735 aa, Artificial Sequence
  Description of Artificial Sequence: Synthetic polypeptide
MAADGYLPDWLEDNLSEGVREWWALQPGAPKPKANQQHQDNARGLVLPGYKYLGPGNGLDKGEPVNAADAAALEHDKAYDQQLKAGDNPYLKYNHADAEFQQRLQGDTSFGGNLGRAVFQAKKRVLEPLGLVEQAGETAPGKKRPLIESPQQPDSSTGIGKKGKQPAKKKLVFEDETGAGDGPPEGSTSGAMSDDSEMRAAAGGAAVEGGQGADGVGNASGDWHCDSTWSEGHVTTTSTRTWVLPTYNNHLYKRLGESLQSNTYNGFSTPWGYFDFNRFHCHFSPRDWQRLINNNWGMRPKAMRVKIFNIQVKEVTTSNGETTVANNLTSTVQIFADSSYELPYVMDAGQEGSLPPFPNDVFMVPQYGYCGLVTGNTSQQQTDRNAFYCLEYFPSQMLRTGNNFEITYSFEKVPFHSMYAHSQSLDRLMNPLIDQYLWGLQSTTTGTTLNAGTATTNFTKLRPTNFSNFKKNWLPGPSIKQQGFSKTANQNYKIPATGSDSLIKYETHSTLDGRWSALTPGPPMATAGPADSKFSNSQLIFAGPKQNGNTATVPGTLIFTSEEELAATNATDTDMWGNLPGGDQSNSNLPTVDRLTALGAVPGMVWQNRDIYYQGPIWAKIPHTDGHFHPSPLIGGFGLKHPPPQIFIKNTPVPANPATTFSSTPVNSFITQYSTGQVSVQIDWEIQKERSKRWNPEVQFTSNYGQQNSLLWAPDAAGKYTEPRAIGTRYLTHHL

SEQ ID NO: 2111 - protein, 735 aa, Artificial Sequence
  Description of Artificial Sequence: Synthetic polypeptide
MAADGYLPDWLEDNLSEGVREWWALQPGAPKPKANQQHQDNARGLVLPGYKYLGPGNGLDKGEPVNAADAAALEHDKAYDQQLKAGDNPYLKYNHADAEFQQRLQGDTSFGGNLGRAVFQAKKRVLEPLGLVEQAGETAPGKKRPLIESPQQPDSSTGIGKKGKQPAKKKLVFEDETGAGDGPPEGSTSGAMSDDSEMRAAAGGAAVEGGQGADGVGNASGDWHCDSTWSEGHVTTTSTRTWVLPTYNNHLYKRLGESLQSNTYNGFSTPWGYFDFNRFHCHFSPRDWQRLINNNWGMRPKAMRVKIFNIQVKEVTTSNGETTVANNLTSTVQIFADSSYELPYVMDAGQEGSLPPFPNDVFMVPQYGYCGLVTGNTSQQQTDRNAFYCLEYFPSQMLRTGNNFEITYSFEKVPFHSMYAHSQSLDRLMNPLIDQYLWGLQSTTTGTTLNAGTATTNFTKLRPTNFSNFKKNWLPGPSIKQQGFSKTANQNYLIPATGSDSLIRYETHSTLDGRWSALTPGPPMATAGPADSKFSNSQLIFAGPKQNGNTATVPGTLIFTSEEELAATNATDTDMWGNLPFRDLSSSNLPTVDRSTPLGAVPGMVWQNRDIYYQGPIWAKIPHTDGHFHPSPLIGGFGLKHPPPQIFIKNTPVPANPATTFSSTPVNSFITQYSTGQVSVQIDWEIQKERSKRWNPEVQFTSNYGQQNSLLWAPDAAGKYTEPRAIGTRYLTHHL

SEQ ID NO: 2112 - protein, 735 aa, Artificial Sequence
  Description of Artificial Sequence: Synthetic polypeptide
MAADGYLPDWLEDNLSEGVREWWALQPGAPKPKANQQHQDNARGLVLPGYKYLGPGNGLDKGEPVNAADAAALEHDKAYDQQLKAGDNPYLKYNHADAEFQQRLQGDTSFGGNLGRAVFQAKKRVLEPLGLVEQAGETAPGKKRPLIESPQQPDSSTGIGKKGKQPAKKKLVFEDETGAGDGPPEGSTSGAMSDDSEMRAAAGGAAVEGGQGADGVGNASGDWHCDSTWSEGHVTTTSTRTWVLPTYNNHLYKRLGESLQSNTYNGFSTPWGYFDFNRFHCHFSPRDWQRLINNNWGMRPKAMRVKIFNIQVKEVTTSNGETTVANNLTSTVQIFADSSYELPYVMDAGQEGSLPPFPNDVFMVPQYGYCGLVTGNTSQQQTDRNAFYCLEYFPSQMLRTGNNFEITYSFEKVPFHSMYAHSQSLDRLMNPLIDQYLWGLQSTTTGTTLNAGTATTNFTKLRPTNFSNFKKNWLPGPSIKQQGFSKTANQNYYIPATGSDSLILYETHSTLDGRWSALTPGPPMATAGPADSKFSNSQLIFAGPKQNGNTATVPGTLIFTSEEELAATNATDTDMWGNLPGGDQSNSNLPTVDRLTALGAVPGMVWQNRDIYYQGPIWAKIPHTDGHFHPSPLIGGFGLKHPPPQIFIKNTPVPANPATTFSSTPVNSFITQYSTGQVSVQIDWEIQKERSKRWNPEVQFTSNYGQQNSLLWAPDAAGKYTEPRAIGTRYLTHHL

SEQ ID NO: 2113 - protein, 735 aa, Artificial Sequence
  Description of Artificial Sequence: Synthetic polypeptide
MAADGYLPDWLEDNLSEGVREWWALQPGAPKPKANQQHQDNARGLVLPGYKYLGPGNGLDKGEPVNAADAAALEHDKAYDQQLKAGDNPYLKYNHADAEFQQRLQGDTSFGGNLGRAVFQAKKRVLEPLGLVEQAGETAPGKKRPLIESPQQPDSSTGIGKKGKQPAKKKLVFEDETGAGDGPPEGSTSGAMSDDSEMRAAAGGAAVEGGQGADGVGNASGDWHCDSTWSEGHVTTTSTRTWVLPTYNNHLYKRLGESLQSNTYNGFSTPWGYFDFNRFHCHFSPRDWQRLINNNWGMRPKAMRVKIFNIQVKEVTTSNGETTVANNLTSTVQIFADSSYELPYVMDAGQEGSLPPFPNDVFMVPQYGYCGLVTGNTSQQQTDRNAFYCLEYFPSQMLRTGNNFEITYSFEKVPFHSMYAHSQSLDRLMNPLIDQYLWGLQSTTTGTTLNAGTATTNFTKLRPTNFSNFKKNWLPGPSIKQQGFSKTANQNYGIPATGSDSLIKYETHSTLDGRWSALTPGPPIATAGPADSKFSNSQLIFAGPKQNGNTATVPGTLIFTSEEELAATNATDTDMWGNLPLYDASSSNLPTVDRLTLLGAVPGMVWQNRDIYYQGPIWAKIPHTDGHFHPSPLIGGFGLKHPPPQIFIKNTPVPANPATTFSSTPVNSFITQYSTGQVSVQIDWEIQKERSKRWNPEVQFTSNYGQQNSLLWAPDAAGKYTEPRAIGTRYLTHHL

SEQ ID NO: 2114 - protein, 735 aa, Artificial Sequence
  Description of Artificial Sequence: Synthetic polypeptide
MAADGYLPDWLEDNLSEGVREWWALQPGAPKPKANQQHQDNARGLVLPGYKYLGPGNGLDKGEPVNAADAAALEHDKAYDQQLKAGDNPYLKYNHADAEFQQRLQGDTSFGGNLGRAVFQAKKRVLEPLGLVEQAGETAPGKKRPLIESPQQPDSSTGIGKKGKQPAKKKLVFEDETGAGDGPPEGSTSGAMSDDSEMRAAAGGAAVEGGQGADGVGNASGDWHCDSTWSEGHVTTTSTRTWVLPTYNNHLYKRLGESLQSNTYNGFSTPWGYFDFNRFHCHFSPRDWQRLINNNWGMRPKAMRVKIFNIQVKEVTTSNGETTVANNLTSTVQIFADSSYELPYVMDAGQEGSLPPFPNDVFMVPQYGYCGLVTGNTSQQQTDRNAFYCLEYFPSQMLRTGNNFEITYSFEKVPFHSMYAHSQSLDRLMNPLIDQYLWGLQSTTTGTTLNAGTATTNFTKLRPTNFSNFKKNWLPGPSIKQQGFSKTANQNYTIPATGSDSLITYETHSTLDGRWSALTPGPPGATAGPADSKFSNSQLIFAGPKQNGNTATVPGTLIFTSEEELAATNATDTDMWGNLPRVDTSASNLPTVDRYTNLGAVPGMVWQNRDIYYQGPIWAKIPHTDGHFHPSPLIGGFGLKHPPPQIFIKNTPVPANPATTFSSTPVNSFITQYSTGQVSVQIDWEIQKERSKRWNPEVQFTSNYGQQNSLLWAPDAAGKYTEPRAIGTRYLTHHL

SEQ ID NO: 2115 - protein, 735 aa, Artificial Sequence
  Description of Artificial Sequence: Synthetic polypeptide
MAADGYLPDWLEDNLSEGVREWWALQPGAPKPKANQQHQDNARGLVLPGYKYLGPGNGLDKGEPVNAADAAALEHDKAYDQQLKAGDNPYLKYNHADAEFQQRLQGDTSFGGNLGRAVFQAKKRVLEPLGLVEQAGETAPGKKRPLIESPQQPDSSTGIGKKGKQPAKKKLVFEDETGAGDGPPEGSTSGAMSDDSEMRAAAGGAAVEGGQGADGVGNASGDWHCDSTWSEGHVTTTSTRTWVLPTYNNHLYKRLGESLQSNTYNGFSTPWGYFDFNRFHCHFSPRDWQRLINNNWGMRPKAMRVKIFNIQVKEVTTSNGETTVANNLTSTVQIFADSSYELPYVMDAGQEGSLPPFPNDVFMVPQYGYCGLVTGNTSQQQTDRNAFYCLEYFPSQMLRTGNNFEITYSFEKVPFHSMYAHSQSLDRLMNPLIDQYLWGLQSTTTGTTLNAGTATTNFTKLRPTNFSNFKKNWLPGPSIKQQGFSKTANQNYSIPATGSDSLIKYETHSTLDGRWSALTPGPPFATAGPADSKFSNSQLIFAGPKQNGNTATVPGTLIFTSEEELAATNATDTDMWGNLPDYDSSLSNLPTVDRDTTLGAVPGMVWQNRDIYYQGPIWAKIPHTDGHFHPSPLIGGFGLKHPPPQIFIKNTPVPANPATTFSSTPVNSFITQYSTGQVSVQIDWEIQKERSKRWNPEVQFTSNYGQQNSLLWAPDAAGKYTEPRAIGTRYLTHHL

SEQ ID NO: 2116 - protein, 735 aa, Artificial Sequence
  Description of Artificial Sequence: Synthetic polypeptide
MAADGYLPDWLEDNLSEGVREWWALQPGAPKPKANQQHQDNARGLVLPGYKYLGPGNGLDKGEPVNAADAAALEHDKAYDQQLKAGDNPYLKYNHADAEFQQRLQGDTSFGGNLGRAVFQAKKRVLEPLGLVEQAGETAPGKKRPLIESPQQPDSSTGIGKKGKQPAKKKLVFEDETGAGDGPPEGSTSGAMSDDSEMRAAAGGAAVEGGQGADGVGNASGDWHCDSTWSEGHVTTTSTRTWVLPTYNNHLYKRLGESLQSNTYNGFSTPWGYFDFNRFHCHFSPRDWQRLINNNWGMRPKAMRVKIFNIQVKEVTTSNGETTVANNLTSTVQIFADSSYELPYVMDAGQEGSLPPFPNDVFMVPQYGYCGLVTGNTSQQQTDRNAFYCLEYFPSQMLRTGNNFEITYSFEKVPFHSMYAHSQSLDRLMNPLIDQYLWGLQSTTTGTTLNAGTATTNFTKLRPTNFSNFKKNWLPGPSIKQQGFSKTANQNYSIPATGSDSLIWYETHSTLDGRWSALTPGPPCATAGPADSKFSNSQLIFAGPKQNGNTATVPGTLIFTSEEELAATNATDTDMWGNLPQGDSSLSNLPTVDRMTVLGAVPGMVWQNRDIYYQGPIWAKIPHTDGHFHPSPLIGGFGLKHPPPQIFIKNTPVPANPATTFSSTPVNSFITQYSTGQVSVQIDWEIQKERSKRWNPEVQFTSNYGQQNSLLWAPDAAGKYTEPRAIGTRYLTHHL

SEQ ID NO: 2117 - protein, 735 aa, Artificial Sequence
  Description of Artificial Sequence: Synthetic polypeptide
MAADGYLPDWLEDNLSEGVREWWALQPGAPKPKANQQHQDNARGLVLPGYKYLGPGNGLDKGEPVNAADAAALEHDKAYDQQLKAGDNPYLKYNHADAEFQQRLQGDTSFGGNLGRAVFQAKKRVLEPLGLVEQAGETAPGKKRPLIESPQQPDSSTGIGKKGKQPAKKKLVFEDETGAGDGPPEGSTSGAMSDDSEMRAAAGGAAVEGGQGADGVGNASGDWHCDSTWSEGHVTTTSTRTWVLPTYNNHLYKRLGESLQSNTYNGFSTPWGYFDFNRFHCHFSPRDWQRLINNNWGMRPKAMRVKIFNIQVKEVTTSNGETTVANNLTSTVQIFADSSYELPYVMDAGQEGSLPPFPNDVFMVPQYGYCGLVTGNTSQQQTDRNAFYCLEYFPSQMLRTGNNFEITYSFEKVPFHSMYAHSQSLDRLMNPLIDQYLWGLQSTTTGTTLNAGTATTNFTKLRPTNFSNFKKNWLPGPSIKQQGFSKTANQNYCIPATGSDSLIRYETHSTLDGRWSALTPGPPLATAGPADSKFSNSQLIFAGPKQNGNTATVPGTLIFTSEEELAATNATDTDMWGNLPYKDSSRSNLPTVDRETSLGAVPGMVWQNRDIYYQGPIWAKIPHTDGHFHPSPLIGGFGLKHPPPQIFIKNTPVPANPATTFSSTPVNSFITQYSTGQVSVQIDWEIQKERSKRWNPEVQFTSNYGQQNSLLWAPDAAGKYTEPRAIGTRYLTHHL

SEQ ID NO: 2118 - protein, 735 aa, Artificial Sequence
  Description of Artificial Sequence: Synthetic polypeptide
MAADGYLPDWLEDNLSEGVREWWALQPGAPKPKANQQHQDNARGLVLPGYKYLGPGNGLDKGEPVNAADAAALEHDKAYDQQLKAGDNPYLKYNHADAEFQQRLQGDTSFGGNLGRAVFQAKKRVLEPLGLVEQAGETAPGKKRPLIESPQQPDSSTGIGKKGKQPAKKKLVFEDETGAGDGPPEGSTSGAMSDDSEMRAAAGGAAVEGGQGADGVGNASGDWHCDSTWSEGHVTTTSTRTWVLPTYNNHLYKRLGESLQSNTYNGFSTPWGYFDFNRFHCHFSPRDWQRLINNNWGMRPKAMRVKIFNIQVKEVTTSNGETTVANNLTSTVQIFADSSYELPYVMDAGQEGSLPPFPNDVFMVPQYGYCGLVTGNTSQQQTDRNAFYCLEYFPSQMLRTGNNFEITYSFEKVPFHSMYAHSQSLDRLMNPLIDQYLWGLQSTTTGTTLNAGTATTNFTKLRPTNFSNFKKNWLPGPSIKQQGFSKTANQNYIIPATGSDSLIYYETHSTLDGRWSALTPGPPRATAGPADSKFSNSQLIFAGPKQNGNTATVPGTLIFTSEEELAATNATDTDMWGNLPWIDNSRSNLPTVDRPTSLGAVPGMVWQNKNIYYQGPIWAKIPHTDGHFHPSPLIGGFGLKHPPPQIFIKNTPVPANPATTFTSTPVNSFITQYSTGQVSVQIDWEIQKERSKRWNPEVQFTSNYGQQNSLLWAPDAAGKYTEPRAIGTRYLTHHL

SEQ ID NO: 2119 - protein, 735 aa, Artificial Sequence
  Description of Artificial Sequence: Synthetic polypeptide
MAADGYLPDWLEDNLSEGVREWWALQPGAPKPKANQQHQDNARGLVLPGYKYLGPGNGLDKGEPVNAADAAALEHDKAYDQQLKAGDNPYLKYNHADAEFQQRLQGDTSFGGNLGRAVFQAKKRVLEPLGLVEQAGETAPGKKRPLIESPQQPDSSTGIGKKGKQPAKKKLVFEDETGAGDGPPEGSTSGAMSDDSEMRAAAGGAAVEGGQGADGVGNASGDWHCDSTWSEGHVTTTSTRTWVLPTYNNHLYKRLGESLQSNTYNGFSTPWGYFDFNRFHCHFSPRDWQRLINNNWGMRPKAMRVKIFNIQVKEVTTSNGETTVANNLTSTVQIFADSSYELPYVMDAGQEGSLPPFPNDVFMVPQYGYCGLVTGNTSQQQTDRNAFYCLEYFPSQMLRTGNNFEITYSFEKVPFHSMYAHSQSLDRLMNPLIDQYLWGLQSTTTGTTLNAGTATTNFTKLRPTNFSNFKKNWLPGPSIKQQGFSKTANQNYGIPATGSDSLIIYETHSTLDGRWSALTPGPPRATAGPADSKFSNSQLIFAGPKQNGNTATVPGTLIFTSEEELAATNATDTDMWGNLPGGDQSNSNLPTVDRLTALGAVPGMVWQNRDIYYQGPIWAKIPHTDGHFHPSPLIGGFGLKHPPPQIFIKNTPVPANPATTFSSTPVNSFITQYSTGQVSVQIDWEIQKERSKRWNPEVQFTSNYGQQNSLLWAPDAAGKYTEPRAIGTRYLTHHL

SEQ ID NO: 2120 - protein, 735 aa, Artificial Sequence
  Description of Artificial Sequence: Synthetic polypeptide
MAADGYLPDWLEDNLSEGVREWWALQPGAPKPKANQQHQDNARGLVLPGYKYLGPGNGLDKGEPVNAADAAALEHDKAYDQQLKAGDNPYLKYNHADAEFQQRLQGDTSFGGNLGRAVFQAKKRVLEPLGLVEQAGETAPGKKRPLIESPQQPDSSTGIGKKGKQPAKKKLVFEDETGAGDGPPEGSTSGAMSDDSEMRAAAGGAAVEGGQGADGVGNASGDWHCDSTWSEGHVTTTSTRTWVLPTYNNHLYKRLGESLQSNTYNGFSTPWGYFDFNRFHCHFSPRDWQRLINNNWGMRPKAMRVKIFNIQVKEVTTSNGETTVANNLTSTVQIFADSSYELPYVMDAGQEGSLPPFPNDVFMVPQYGYCGLVTGNTSQQQTDRNAFYCLEYFPSQMLRTGNNFEITYSFEKVPFHSMYAHSQSLDRLMNPLIDQYLWGLQSTTTGTTLNAGTATTNFTKLRPTNFSNFKKNWLPGPSIKQQGFSKTANQNYVIPATESDSLIYYETHSTLDGRWSALTPGPPYATAGPADSKFSNSQLIFAGPKQNGNTATVPGTLIFTSEEELAATNATDTDMWGNLPPRDDSTSNLPTVDRKTYLGAVPGMVWQNRDIYYQGPIWAKIPHTDGHFHPSPLIGGFGLKHPPPQIFIKNTPVPANPATTFSSTPVNSFITQYSTGQVSVQIDWEIQKERSKRWNPEVQFTSNYGQQNSLLWAPDAAGKYTEPRAIGTRYLTHHL

SEQ ID NO: 2121 - protein, 735 aa, Artificial Sequence
  Description of Artificial Sequence: Synthetic polypeptide
MAADGYLPDWLEDNLSEGVREWWALQPGAPKPKANQQHQDNARGLVLPGYKYLGPGNGLDKGEPVNAADAAALEHDKAYDQQLKAGDNPYLKYNHADAEFQQRLQGDTSFGGNLGRAVFQAKKRVLEPLGLVEQAGETAPGKKRPLIESPQQPDSSTGIGKKGKQPAKKKLVFEDETGAGDGPPEGSTSGAMSDDSEMRAAAGGAAVEGGQGADGVGNASGDWHCDSTWSEGHVTTTSTRTWVLPTYNNHLYKRLGESLQSNTYNGFSTPWGYFDFNRFHCHFSPRDWQRLINNNWGMRPKAMRVKIFNIQVKEVTTSNGETTVANNLTSTVQIFADSSYELPYVMDAGQEGSLPPFPNDVFMVPQYGYCGLVTGNTSQQQTDRNAFYCLEYFPSQMLRTGNNFEITYSFEKVPFHSMYAHSQSLDRLMNPLIDQYLWGLQSTTTGTTLNAGTATTNFTKLRPTNFSNFKKNWLPGPSIKQQGFSKTANQNYYIPATGSDSLIIYETHSTLDGRWSALTPGPPIATAGPADSKFSNSQLIFAGPKQNGNTATVPGTLIFTSEEELAATNSTDTDMWGNLPTDDDSRSNLPTVDRMTLLGAVPGMVWQNRDIYYQGPIWAKIPHTDGHFHPSPLIGGFGLKHPPPQIFIKNTPVPANPATTFSSTPVNSFITQYSTGQVSVQIDWEIQKERSKRWNPEVQFTSNYGQQNSLLWAPDAAGKYTEPRAIGTRYLTHHL

SEQ ID NO: 2122 - protein, 735 aa, Artificial Sequence
  Description of Artificial Sequence: Synthetic polypeptide
MAADGYLPDWLEDNLSEGVREWWALQPGAPKPKANQQHQDNARGLVLPGYKYLGPGNGLDKGEPVNAADAAALEHDKAYDQQLKAGDNPYLKYNHADAEFQQRLQGDTSFGGNLGRAVFQAKKRVLEPLGLVEQAGETAPGKKRPLIESPQQPDSSTGIGKKGKQPAKKKLVFEDETGAGDGPPEGSTSGAMSDDSEMRAAAGGAAVEGGQGADGVGNASGDWHCDSTWSEGHVTTTSTRTWVLPTYNNHLYKRLGESLQSNTYNGFSTPWGYFDFNRFHCHFSPRDWQRLINNNWGMRPKAMRVKIFNIQVKEVTTSNGETTVANNLTSTVQIFADSSYELPYVMDAGQEGSLPPFPNDVFMVPQYGYCGLVTGNTSQQQTDRNAFYCLEYFPSQMLRTGNNFEITYSFEKVPFHSMYAHSQSLDRLMNPLIDQYLWGLQSTTTGTTLNAGTATTNFTKLRPTNFSNFKKNWLPGPSIKQQGFSKTANQNYHIPATGSDSLIYYETHSTLDGRWSALTPGPPSATAGPADSKFSNSQLIFAGPKQNGNTATVPGTLIFTSEEELAATNATDTDMWGNLPRRDSSVSNLPTVDRYTDLGAVPGMVWQNRDIYYQGPIWAKIPHTDGHFHPSPLIGGFGLKHPPPQIFIKNTPVPANPATTFSSTPVNSFITQYSTGQVSVQIDWEIQKERSKRWNPEVQFTSNYGQQNSLLWAPDAAGKYTEPRAIGTRYLTHHL

SEQ ID NO: 2123 - protein, 735 aa, Artificial Sequence
  Description of Artificial Sequence: Synthetic polypeptide
MAADGYLPDWLEDNLSEGVREWWALQPGAPKPKANQQHQDNARGLVLPGYKYLGPGNGLDKGEPVNAADAAALEHDKAYDQQLKAGDNPYLKYNHADAEFQQRLQGDTSFGGNLGRAVFQAKKRVLEPLGLVEQAGETAPGKKRPLIESPQQPDSSTGIGKKGKQPAKKKLVFEDETGAGDGPPEGSTSGAMSDDSEMRAAAGGAAVEGGQGADGVGNASGDWHCDSTWSEGHVTTTSTRTWVLPTYNNHLYKRLGESLQSNTYNGFSTPWGYFDFNRFHCHFSPRDWQRLINNNWGMRPKAMRVKIFNIQVKEVTTSNGETTVANNLTSTVQIFADSSYELPYVMDAGQEGSLPPFPNDVFMVPQYGYCGLVTGNTSQQQTDRNAFYCLEYFPSQMLRTGNNFEITYSFEKVPFHSMYAHSQSLDRLMNPLIDQYLWGLQSTTTGTTLNAGTATTNFTKLRPTNFSNFKKNWLPGPSIKQQGFSKTANQNYSIPATGSDSLISYETHSTLDGRWSALTPGPPRATAGPADSKFSNSQLIFAGPKQNGNTATVPGTLIFTSEEELAATNATDTDMWGNLPRHDSSLSNLPTVDRNTGLGAVPGMVWQNRDIYYQGPIWAKIPHTDGHFHPSPLIGGFGLKHPPPQIFIKNTPVPANPATTFSSTPVNSFITQYSTGQVSVQIDWEIQKERSKRWNPEVQFTSNYGQQNSLLWAPDAAGKYTEPRAIGTRYLTHHL

SEQ ID NO: 2124 - protein, 735 aa, Artificial Sequence
  Description of Artificial Sequence: Synthetic polypeptide
MAADGYLPDWLEDNLSEGVREWWALQPGAPKPKANQQHQDNARGLVLPGYKYLGPGNGLDKGEPVNAADAAALEHDKAYDQQLKAGDNPYLKYNHADAEFQQRLQGDTSFGGNLGRAVFQAKKRVLEPLGLVEQAGETAPGKKRPLIESPQQPDSSTGIGKKGKQPAKKKLVFEDETGAGDGPPEGSTSGAMSDDSEMRAAAGGAAVEGGQGADGVGNASGDWHCDSTWSEGHVTTTSTRTWVLPTYNNHLYKRLGESLQSNTYNGFSTPWGYFDFNRFHCHFSPRDWQRLINNNWGMRPKAMRVKIFNIQVKEVTTSNGETTVANNLTSTVQIFADSSYELPYVMDAGQEGSLPPFPNDVFMVPQYGYCGLVTGNTSQQQTDRNAFYCLEYFPSQMLRTGNNFEITYSFEKVPFHSMYAHSQSLDRLMNPLIDQYLWGLQSTTTGTTLNAGTATTNFTKLRPTNFSNFKKNWLPGPSIKQQGFSKTANQNYFIPATGSDSLIRYETHSTLDGRWSALTPGPPLATAGPADSKFSNSQLIFAGPKQNGNTATVPGTLIFTSEEELAATNATDTDMWGNLPVIDFSKSNLPTVDRLTHLGAVPGMVWQNRDIYYQGPIWAKIPHTDGHFHPSPLIGGFGLKHPPPQIFIKNTPVPANPATTFSSTPVNSFITQYSTGQVSVQIDWEIQKERSKRWNPEVQFTSNYGQQNSLLWAPDAAGKYTEPRAIGTRYLTHHL

SEQ ID NO: 2125 - protein, 735 aa, Artificial Sequence
  Description of Artificial Sequence: Synthetic polypeptide
MAADGYLPDWLEDNLSEGVREWWALQPGAPKPKANQQHQDNARGLVLPGYKYLGPGNGLDKGEPVNAADAAALEHDKAYDQQLKAGDNPYLKYNHADAEFQQRLQGDTSFGGNLGRAVFQAKKRVLEPLGLVEQAGETAPGKKRPLIESPQQPDSSTGIGKKGKQPAKKKLVFEDETGAGDGPPEGSTSGAMSDDSEMRAAAGGAAVEGGQGADGVGNASGDWHCDSTWSEGHVTTTSTRTWVLPTYNNHLYKRLGESLQSNTYNGFSTPWGYFDFNRFHCHFSPRDWQRLINNNWGMRPKAMRVKIFNIQVKEVTTSNGETTVANNLTSTVQIFADSSYELPYVMDAGQEGSLPPFPNDVFMVPQYGYCGLVTGNTSQQQTDRNAFYCLEYFPSQMLRTGNNFEITYSFEKVPFHSMYAHSQSLDRLMNPLIDQYLWGLQSTTTGTTLNAGTATTNFTKLRPTNFSNFKKNWLPGPSIKQQGFSKTANQNYKIPATGSDSLIKYETHSTLDGRWSALTPGPPMATAGPADSKFSNSQLIFAGPKQNGNTATVPGTLIFTSEEELAATNATDTDMWGNLPVRDFSLSNLPTVDRTTKLGAVPGMVWQNRDIYYQGPIWAKIPHTDGHFHPSPLIGGFGLKHPPPQIFIKNTPVPANPATTFSSTPVNSFITQYSTGQVSVQIDWEIQKERSKRWNPEVQFTSNYGQQNSLLWAPDAAGKYTEPRAIGTRYLTHHL

SEQ ID NO: 2126 - protein, 735 aa, Artificial Sequence
  Description of Artificial Sequence: Synthetic polypeptide
MAADGYLPDWLEDNLSEGVREWWALQPGAPKPKANQQHQDNARGLVLPGYKYLGPGNGLDKGEPVNAADAAALEHDKAYDQQLKAGDNPYLKYNHADAEFQQRLQGDTSFGGNLGRAVFQAKKRVLEPLGLVEQAGETAPGKKRPLIESPQQPDSSTGIGKKGKQPAKKKLVFEDETGAGDGPPEGSTSGAMSDDSEMRAAAGGAAVEGGQGADGVGNASGDWHCDSTWSEGHVTTTSTRTWVLPTYNNHLYKRLGESLQSNTYNGFSTPWGYFDFNRFHCHFSPRDWQRLINNNWGMRPKAMRVKIFNIQVKEVTTSNGETTVANNLTSTVQIFADSSYELPYVMDAGQEGSLPPFPNDVFMVPQYGYCGLVTGNTSQQQTDRNAFYCLEYFPSQMLRTGNNFEITYSFEKVPFHSMYAHSQSLDRLMNPLIDQYLWGLQSTTTGTTLNAGTATTNFTKLRPTNFSNFKKNWLPGPSIKQQGFSKTANQNYFIPATGSDSLIQYETHSTLDGRWSALTPGPPMATAGPADSKFSNSQLIFAGPKQNGNTATVPGTLIFTSEEELAATNATDTDMWGNLPGGDQSNSNLPTVDRLTALGAVPGMVWQNRDIYYQGPIWAKIPHTDGHFHPSPLIGGFGLKHPPPQIFIKNTPVPANPATTFSSTPVNSFITQYSTGQVSVQIDWEIQKERSKRWNPEVQFTSNYGQQNSLLWAPDAAGKYTEPRAIGTRYLTHHL

SEQ ID NO: 2127 - protein, 735 aa, Artificial Sequence
  Description of Artificial Sequence: Synthetic polypeptide
MAADGYLPDWLEDNLSEGVREWWALQPGAPKPKANQQHQDNARGLVLPGYKYLGPGNGLDKGEPVNAADAAALEHDKAYDQQLKAGDNPYLKYNHADAEFQQRLQGDTSFGGNLGRAVFQAKKRVLEPLGLVEQAGETAPGKKRPLIESPQQPDSSTGIGKKGKQPAKKKLVFEDETGAGDGPPEGSTSGAMSDDSEMRAAAGGAAVEGGQGADGVGNASGDWHCDSTWSEGHVTTTSTRTWVLPTYNNHLYKRLGESLQSNTYNGFSTPWGYFDFNRFHCHFSPRDWQRLINNNWGMRPKAMRVKIFNIQVKEVTTSNGETTVANNLTSTVQIFADSSYELPYVMDAGQEGSLPPFPNDVFMVPQYGYCGLVTGNTSQQQTDRNAFYCLEYFPSQMLRTGNNFEITYSFEKVPFHSMYAHSQSLDRLMNPLIDQYLWGLQSTTTGTTLNAGTATTNFTKLRPTNFSNFKKNWLPGPSIKQQGFSKTANQNYEMPATGSDSLIIYETHSTLDGRWSALTPGPPFATAGPADSKFSNSQLIFAGPKQNGNTATVPGTLIFTSEEELAATNATDTDVWGNLPSGDHSQSNLPTVDRPTMLGAVPGMVWQNRDIYYQGPIWAKIPHTDGHFHPSPLIGGFGLKHPPPQIFIKNTPVPANPATTFISTPVNSFITQYSTGQVSVHIDWEIQKERSKRWNPEVQFTSDYGQHSSLLWAPDAAGKYTEPTAIGTRYLTHHL

SEQ ID NO: 2128 - protein, 734 aa, Artificial Sequence
  Description of Artificial Sequence: Synthetic polypeptide
MAADGYLPDWLEDNLSEGVREWWALQPGAPKPKANQQHQDNARGLVLPGYKYLGPGNGLDKGEPVNAADAAALEHDKAYDQQLKAGDNPYLKYNHADAEFQQRLQGDTSFGGNLGRAVFQAKKRVLEPLGLVEQAGETAPGKKRPLIESPQQPDSSTGIGKKGKQPAKKKLVFEDETGAGDGPPEGSTSGAMSDDSEMRAAAGGAAVEGGQGADGVGNASGDWHCDSTWSEGHVTTTSTRTWVLPTYNNHLYKRLGESLQSNTYNGFSTPWGYFDFNRFHCHFSPRDWQRLINNNWGMRPKAMRVKIFNIQVKEVTTSNGETTVANNLTSTVQIFADSSYELPYVMDAGQEGSLPPFPNDVFMVPQYGYCGLVTGNTSQQQTDRNAFYCLEYFPSQMLRTGNNFEITYSFEKVPFHSMYAHSQSLDRLMNPLIDQYLWGLQSTTTGTTLNAGTATTNFTKLRPTNFSNFKKNWLPGPSIKQQGFSKTANQNDIPATGSDSLIKYETHSTLDGRWSALTPGPPMATAGPADSKFSNSQLIFAGPKQNGNTATVPGTLIFTSEEELAATNATDTDMWGNLPGGDQSNSNLPTVDRLTALGAVPGMVWQNRDIYYQGPIWAKIPHTDGHFHPSPLIGGFGLKHPPPQIFIKNTPVPANPATTFSSTPVNSFITQYSTGQVSVQIDWEIQKERSKRWNPEVQFTSNYGQQNSLLWAPDAAGKYTEPRAIGTRYLTHHL

SEQ ID NO: 2129 - protein, 735 aa, Artificial Sequence
  Description of Artificial Sequence: Synthetic polypeptide
MAADGYLPDWLEDNLSEGVREWWALQPGAPKPKANQQHQDNARGLVLPGYKYLGPGNGLDKGEPVNAADAAALEHDKAYDQQLKAGDNPYLKYNHADAEFQQRLQGDTSFGGNLGRAVFQAKKRVLEPLGLVEQAGETAPGKKRPLIESPQQPDSSTGIGKKGKQPAKKKLVFEDETGAGDGPPEGSTSGAMSDDSEMRAAAGGAAVEGGQGADGVGNASGDWHCDSTWSEGHVTTTSTRTWVLPTYNNHLYKRLGESLQSNTYNGFSTPWGYFDFNRFHCHFSPRDWQRLINNNWGMRPKAMRVKIFNIQVKEVTTSNGETTVANNLTSTVQIFADSSYELPYVMDAGQEGSLPPFPNDVFMVPQYGYCGLVTGNTSQQQTDRNAFYCLEYFPSQMLRTGNNFEITYSFEKVPFHSMYAHSQSLDRLMNPLIDQYLWGLQSTTTGTTLNAGTATTNFTKLRPTNFSNFKKNWLPGPSIKQQGFSKTANQNYIIPATGSDSLITYETHSTLDGRWSALTPGPPVATAGPADSKFSNSQLIFAGPKQNGNTATVPGTLIFTSEEELAATNATDTDMWGNLPFNDDSSSNLPTVDRSTFLGAVPGMVWQNRDIYYQGPIWAKIPHTDGHFHPSPLIGGFGLKHPPPQIFIKNTPVPANPATTFSSTPVNSFITQYSTGQVSVQIDWEIQKERSKRWNPEVQFTSNYGQQNSLLWAPDAAGKYTEPRAIGTRYLTHHL

SEQ ID NO: 2130 - protein, 733 aa, Artificial Sequence
  Description of Artificial Sequence: Synthetic polypeptide
MAADGYLPDWLEDNLSEGIREWWDLKPGAPKPKANQQKQDDGRGLVLPGYKYLGPFNGLDKGEPVNAADAAALEHDKAYDQQLKAGDNPYLRYNHADAEFQERLQEDTSFGGNLGRAVFQAKKRVLEPLGLVEEGAKTAPGKKRPLESPQEPDSSSGIGKKGKQPARKRLNFEEDTGAGDGPPEGSDTSAMSSDIEMRAAPGGNAVDAGQGSDGVGNASGDWHCDSTWSEGKVTTTSTRTWVLPTYNNHLYLRLGTTSSSNTYNGFSTPWGYFDFNRFHCHFSPRDWQRLINNNWGLRPKAMRVKIFNIQVKEVTTSNGETTVANNLTSTVQIFADSSYELPYVMDAGQEGSLPPFPNDVFMVPQYGYCGIVTGENQNQTDRNAFYCLEYFPSQMLRTGNNFEMAYNFEKVPFHSMYAHSQSLDRLMNPLLDQYLWHLQSTTSGETLNQGNAATTFGKIRSGDFAFYRKNWLPGPCVKQQRFSKTASQNYKIPASGGNALLKYDTHYTLNNRWSNIAPGPPMATAGPSDGDFSNAQLIFPGPSVTGNTTTSANNLLFTSEEEIAATNPRDTDMFGQIADNNQNATTAPITGNVTAMGVLPGMVWQNRDIYYQGPIWAKIPHADGHFHPSPLIGGFGLKHPPPQIFIKNTPVPANPATTFTAARVDSFITQYSTGQVAVQIEWEIEKERSKRWNPEVQFTSNYGNQSSMLWAPDTTGKYTEPRVIGSRYLTNHL

SEQ ID NO: 2131 - protein, 742 aa, Artificial Sequence; identical to SEQ ID NO: 1942
  Description of Artificial Sequence: Synthetic polypeptide

SEQ ID NO: 2132 - protein, 733 aa, Artificial Sequence; identical to SEQ ID NO: 421
  Description of Artificial Sequence: Synthetic polypeptide

SEQ ID NO: 2133 - protein, 733 aa, Artificial Sequence; identical to SEQ ID NO: 138
  Description of Artificial Sequence: Synthetic polypeptide

SEQ ID NO: 2134 - protein, 733 aa, Artificial Sequence; identical to SEQ ID NO: 425
  Description of Artificial Sequence: Synthetic polypeptide

SEQ ID NO: 2135 - protein, 735 aa, Artificial Sequence
  Description of Artificial Sequence: Synthetic polypeptide
MAADGYLPDWLEDNLSEGVREWWALQPGAPKPKANQQHQDNARGLVLPGYKYLGPGNGLDKGEPVNAADAAALEHDKAYDQQLKAGDNPYLKYNHADAEFQQRLQGDTSFGGNLGRAVFQAKKRVLEPLGLVEQAGETAPGKKRPLIESPQQPDSSTGIGKKGKQPAKKKLVFEDETGAGDGPPEGSTSGAMSDDSEMRAAAGGAAVEGGQGADGVGNASGDWHCDSTWSEGHVTTTSTRTWVLPTYNNHLYKRLGESLQSNTYNGFSTPWGYFDFNRFHCHFSPRDWQRLINNNWGMRPKAMRVKIFNIQVKEVTTSNGETTVANNLTSTVQIFADSSYELPYVMDAGQEGSLPPFPNDVFMVPQYGYCGLVTGNTSQQQTDRNAFYCLEYFPSQMLRTGNNFEITYSFEKVPFHSMYAHSQSLDRLMNPLIDQYLWGLQSTTTGTTLNAGTATTNFTKLRPTNFSNFKKNWLPGPSIKQQGFSKTANQNYEIPATGSDSLIEYETHSTLDGRWSALTPGPPMATAGPADSKFSNSQLIFAGPKQNGNTATVPGTLIFTSEEELAATNATDTDMWGNLPGGDQSSSNLPTVDRLTALGAVPGMVWQNRDIYYQGPIWAKIPHTDGHFHPSPLIGGFGLKHPPPQIFIKNTPVPANPATTFSSTPVNSFITQYSTGQVSVQIDWEIQKERSKRWNPEVQFTSNYGQQNSLLWAPDAAGKYTEPRAIGTRYLTHHL

SEQ ID NO: 2136 - protein, 735 aa, Artificial Sequence
  Description of Artificial Sequence: Synthetic polypeptide
MAADGYLPDWLEDNLSEGVREWWALQPGAPKPKANQQHQDNARGLVLPGYKYLGPGNGLDKGEPVNAADAAALEHDKAYDQQLKAGDNPYLKYNHADAEFQQRLQGDTSFGGNLGRAVFQAKKRVLEPLGLVEQAGETAPGKKRPLIESPQQPDSSTGIGKKGKQPAKKKLVFEDETGAGDGPPEGSTSGAMSDDSEMRAAAGGAAVEGGQGADGVGNASGDWHCDSTWSEGHVTTTSTRTWVLPTYNNHLYKRLGESLQSNTYNGFSTPWGYFDFNRFHCHFSPRDWQRLINNNWGMRPKAMRVKIFNIQVKEVTTSNGETTVANNLTSTVQIFADSSYELPYVMDAGQEGSLPPFPNDVFMVPQYGYCGLVTGNTSQQQTDRNAFYCLEYFPSQMLRTGNNFEITYSFEKVPFHSMYAHSQSLDRLMNPLIDQYLWGLQSTTTGTTLNAGTATTNFTKLRPTNFSNFKKNWLPGPSIKQQGFSKTANQNYEIPATGSDSLIEYETHSTLDGRWSALTPGPPMATAGPADSKFSNSQLIFAGPKQNGNTATVPGTLIFTSEEELAATNATDTDMWGNLPGGDQSSSNLPVVRGLRALGAVPGMVWQNRDIYYQGPIWAKIPHTDGHFHPSPLIGGFGLKHPPPQIFIKNTPVPANPATTFSSTPVNSFITQYSTGQVSVQIDWEIQKERSKRWNPEVQFTSNYGQQNSLLWAPDAAGKYTEPRAIGTRYLTHHL

SEQ ID NO: 2137 - protein, 735 aa, Artificial Sequence
  Description of Artificial Sequence: Synthetic polypeptide
MAADGYLPDWLEDNLSEGVREWWALQPGAPKPKANQQHQDNARGLVLPGYKYLGPGNGLDKGEPVNAADAAALEHDKAYDQQLKAGDNPYLKYNHADAEFQQRLQGDTSFGGNLGRAVFQAKKRVLEPLGLVEQAGETAPGKKRPLIESPQQPDSSTGIGKKGKQPAKKKLVFEDETGAGDGPPEGSTSGAMSDDSEMRAAAGGAAVEGGQGADGVGNASGDWHCDSTWSEGHVTTTSTRTWVLPTYNNHLYKRLGESLQSNTYNGFSTPWGYFDFNRFHCHFSPRDWQRLINNNWGMRPKAMRVKIFNIQVKEVTTSNGETTVANNLTSTVQIFADSSYELPYVMDAGQEGSLPPFPNDVFMVPQYGYCGLVTGNTSQQQTDRNAFYCLEYFPSQMLRTGNNFEITYSFEKVPFHSMYAHSQSLDRLMNPLIDQYLWGLQSTTTGTTLNAGTATTNFTKLRPTNFSNFKKNWLPGPSIKQQGFSKTANQNYEIPATGSDSLIEYETHSTLDGRWSALTPGPPMATAGPADSKFSNSQLIFAGPKQNGNTATVPGTLIFTSEEELAATNATDTDMWGNLPGGDQSSSNLPVVNRLSALGAVPGMVWQNRDIYYQGPIWAKIPHTDGHFHPSPLIGGFGLKHPPPQIFIKNTPVPANPATTFSSTPVNSFITQYSTGQVSVQIDWEIQKERSKRWNPEVQFTSNYGQQNSLLWAPDAAGKYTEPRAIGTRYLTHHL

SEQ ID NO: 2138 - protein, 735 aa, Artificial Sequence
  Description of Artificial Sequence: Synthetic polypeptide
MAADGYLPDWLEDNLSEGVREWWALQPGAPKPKANQQHQDNARGLVLPGYKYLGPGNGLDKGEPVNAADAAALEHDKAYDQQLKAGDNPYLKYNHADAEFQQRLQGDTSFGGNLGRAVFQAKKRVLEPLGLVEQAGETAPGKKRPLIESPQQPDSSTGIGKKGKQPAKKKLVFEDETGAGDGPPEGSTSGAMSDDSEMRAAAGGAAVEGGQGADGVGNASGDWHCDSTWSEGHVTTTSTRTWVLPTYNNHLYKRLGESLQSNTYNGFSTPWGYFDFNRFHCHFSPRDWQRLINNNWGMRPKAMRVKIFNIQVKEVTTSNGETTVANNLTSTVQIFADSSYELPYVMDAGQEGSLPPFPNDVFMVPQYGYCGLVTGNTSQQQTDRNAFYCLEYFPSQMLRTGNNFEITYSFEKVPFHSMYAHSQSLDRLMNPLIDQYLWGLQSTTTGTTLNAGTATTNFTKLRPTNFSNFKKNWLPGPSIKQQGFSKTANQNYEIPATGSDSLIEYETHSTLDGRWSALTPGPPMATAGPADSKFSNSQLIFAGPKQNGNTATVPGTLIFTSEEELAATNATDTDMWGNLPGGDQSSSNLPPVMGLGALGAVPGMVWQNRDIYYQGPIWAKIPHTDGHFHPSPLIGGFGLKHPPPQIFIKNTPVPANPATTFSSTPVNSFITQYSTGQVSVQIDWEIQKERSKRWNPEVQFTSNYGQQNSLLWAPDAAGKYTEPRAIGTRYLTHHL

SEQ ID NO: 2139 - protein, 736 aa, Artificial Sequence
  Description of Artificial Sequence: Synthetic polypeptide
MAADGYLPDWLEDNLSEGVREWWALQPGAPKPKANQQHQDNARGLVLPGYKYLGPGNGLDKGEPVNAADAAALEHDKAYDQQLKAGDNPYLKYNHADAEFQQRLQGDTSFGGNLGRAVFQAKKRVLEPLGLVEQAGETAPGKKRPLIESPQQPDSSTGIGKKGKQPAKKKLVFEDETGAGDGPPEGSTSGAMSDDSEMRAAAGGAAVEGGQGADGVGNASGDWHCDSTWSEGHVTTTSTRTWVLPTYNNHLYKRLGESLQSNTYNGFSTPWGYFDFNRFHCHFSPRDWQRLINNNWGMRPKAMRVKIFNIQVKEVTTSNGETTVANNLTSTVQIFADSSYELPYVMDAGQEGSLPPFPNDVFMVPQYGYCGLVTGNTSQQQTDRNAFYCLEYFPSQMLRTGNNFEITYSFEKVPFHSMYAHSQSLDRLMNPLIDQYLWGLQSTTTGTTLNAGTATTNFTKLRPTNFSNFKKNWLPGPSIKQQGFSKTANQNYEIPATGSDSLIEYETHSTLDGRWSALTPGPPMATAGPADSKFSNSQLIFAGPKQNGNTATVPGTLIFTSEEELAATNATDTDMWGNLPGGDQSRVDRLPTVDRLTALGAVPGMVWQNRDIYYQGPIWAKIPHTDGHFHPSPLIGGFGLKHPPPQIFIKNTPVPANPATTFSSTPVNSFITQYSTGQVSVQIDWEIQKERSKRWNPEVQFTSNYGQQNSLLWAPDAAGKYTEPRAIGTRYLTHHL

SEQ ID NO: 2140 - protein, 736 aa, Artificial Sequence
  Description of Artificial Sequence: Synthetic polypeptide
MAADGYLPDWLEDNLSEGVREWWALQPGAPKPKANQQHQDNARGLVLPGYKYLGPGNGLDKGEPVNAADAAALEHDKAYDQQLKAGDNPYLKYNHADAEFQQRLQGDTSFGGNLGRAVFQAKKRVLEPLGLVEQAGETAPGKKRPLIESPQQPDSSTGIGKKGKQPAKKKLVFEDETGAGDGPPEGSTSGAMSDDSEMRAAAGGAAVEGGQGADGVGNASGDWHCDSTWSEGHVTTTSTRTWVLPTYNNHLYKRLGESLQSNTYNGFSTPWGYFDFNRFHCHFSPRDWQRLINNNWGMRPKAMRVKIFNIQVKEVTTSNGETTVANNLTSTVQIFADSSYELPYVMDAGQEGSLPPFPNDVFMVPQYGYCGLVTGNTSQQQTDRNAFYCLEYFPSQMLRTGNNFEITYSFEKVPFHSMYAHSQSLDRLMNPLIDQYLWGLQSTTTGTTLNAGTATTNFTKLRPTNFSNFKKNWLPGPSIKQQGFSKTANQNYEIPATGSDSLIEYETHSTLDGRWSALTPGPPMATAGPADSKFSNSQLIFAGPKQNGNTATVPGTLIFTSEEELAATNATDTDMWGNLPGGDQSRALRLPTVDRLTALGAVPGMVWQNRDIYYQGPIWAKIPHTDGHFHPSPLIGGFGLKHPPPQIFIKNTPVPANPATTFSSTPVNSFITQYSTGQVSVQIDWEIQKERSKRWNPEVQFTSNYGQQNSLLWAPDAAGKYTEPRAIGTRYLTHHL

SEQ ID NO: 2141 - DNA, 1172 bp, Artificial Sequence
  Description of Artificial Sequence: Synthetic polynucleotide
cttaattaggctgcgcgctcgctcgctcactgaggccgcccgggcaaagcccgggcgtcgggcgacctttggtcgcccggcctcagtgagcgagcgagcgcgcagagagggagtggccaactccatcactaggggttccttgtagttaatgattaacccgccatgctacttatctaccagggtaatggggatcctctagaactatagctagtcgacattgattattgactagttattaatagtaatcaattacggggtcattagttcatagcccatatatggagttccgcgttacataacttacggtaaatggcccgcctggctgaccgcccaacgacccccgcccattgacgtcaataatgacgtatgttcccatagtaacgccaatagggactttccattgacgtcaatgggtggactatttacggtaaactgcccacttggcagtacatcaagtgtatcatatgccaagtacgccccctattgacgtcaatgacggtaaatggcccgcctggcattatgcccagtacatgaccttatgggactttcctacttggcagtacatctacgtattagtcatcgctattaccatgtcgaggccacgttctgcttcactctccccatctcccccccctccccacccccaattttgtatttatttattttttaattattttgtgcagcgatgggggcggggggggggggcgcgcgccaggcggggcggggcggggcgaggggcggggcggggcgaggcggagaggtgcggcggcagccaatcagagcggcgcgctccgaaagtttccttttatggcgaggcggcggcggcggcggccctataaaaagcgaagcgcgcggcgggcgggagcaagctttattgcggtagtttatcacagttaaattgctaacgcagtcagtgcttctgacacaacagtctcgaacttaagctgcagaagttggtcgtgaggcactgggcaggtaagtatcaaggttacaagacaggtttaaggagaccaatagaaactgggcttgtcgagacagagaagactcttgcgtttctgataggcacctattggtcttactgacatccactttgcctttctctccacaggtgtccactcccagttcaattacagctcttaaggctagagtacttaatacgactcsactatagg

SEQ ID NO: 2142 - DNA, 3231 bp, Artificial Sequence
  Description of Artificial Sequence: Synthetic polynucleotide
taagaattcacgcgtggtacctctagagtcgacccgggcggcctcgaggacggggtgaactacgcctgaggatccgatctttttccctctgccaaaaattatggggacatcatgaagccccttgagcatctgacttctggctaataaaggaaatttattttcattgcaatagtgtgttggaattttttgtgtctctcactcggaagcaattcgttgatctgaatttcgaccacccataatacccattaccctggtagataagtagcatggcgggttaatcattaactacaaggaacccctagtgatggagttggccactccctctctgcgcgctcgctcgctcactgaggccgggcgaccaaaggtcgcccgacgcccgggctttgcccgggcggcctcagtgagcgagcgagcgcgcagccttaattaacctaattcactggccgtcgttttacaacgtcgtgactgggaaaaccctggcgttacccaacttaatcgccttgcagcacatccccctttcgccagctggcgtaatagcgaagaggcccgcaccgatcgcccttcccaacagttgcgcagcctgaatggcgaatgggacgcgccctgtagcggcgcattaagcgcggcgggtgtggtggttacgcgcagcgtgaccgctacacttgccagcgccctagcgcccgctcctttcgctttcttcccttcctttctcgccacgttcgccggctttccccgtcaagctctaaatcgggggctccctttagggttccgatttagtgctttacggcacctcgaccccaaaaaacttgattagggtgatggttcacgtagtgggccatcgccctgatagacggtttttcgccctttgacgttggagtccacgttctttaatagtggactcttgttccaaactggaacaacactcaaccctatctcggtctattcttttgatttataagggattttgccgatttcggcctattggttaaaaaatgagctgatttaacaaaaatttaacgcgaattttaacaaaatattaacgcttacaatttaggtggcacttttcggggaaatgtgcgcggaacccctatttgtttatttttctaaatacattcaaatatgtatccgctcatgagacaataaccctgataaatgcttcaataatattgaaaaaggaagagtatgagtattcaacatttccgtgtcgcccttattcccttttttgcggcattttgccttcctgtttttgctcacccagaaacgctggtgaaagtaaaagatgctgaagatcagttgggtgcacgagtgggttacatcgaactggatctcaacagcggtaagatccttgagagttttcgccccgaagaacgttttccaatgatgagcacttttaaagttctgctatgtggcgcggtattatcccgtattgacgccgggcaagagcaactcggtcgccgcatacactattctcagaatgacttggttgagtactcaccagtcacagaaaagcatcttacggatggcatgacagtaagagaattatgcagtgctgccataaccatgagtgataacactgcggccaacttacttctgacaacgatcggaggaccgaaggagctaaccgcttttttgcacaacatgggggatcatgtaactcgccttgatcgttgggaaccggagctgaatgaagccataccaaacgacgagcgtgacaccacgatgcctgtagcaatggcaacaacgttgcgcaaactattaactggcgaactacttactctagcttcccggcaacaattaatagactggatggaggcggataaagttgcaggaccacttctgcgctcggcccttccggctggctggtttattgctgataaatctggagccggtgagcgtgggtctcgcggtatcattgcagcactggggccagatggtaagccctcccgtatcgtagttatctacacgacggggagtcaggcaactatggatgaacgaaatagacagatcgctgagataggtgcctcactgattaagcattggtaactgtcagaccaagtttactcatatatactttagattgatttaaaacttcatttttaatttaaaaggatctaggtgaagatcctttttgataatctcatgaccaaaatcccttaacgtgagttttcgttccactgagcgtcagaccccgtagaaaagatcaaaggatcttcttgagatcctttttttctgcgcgtaatctgctgcttgcaaacaaaaaaaccaccgctaccagcggtggtttgtttgccggatcaagagctaccaactctttttccgaaggtaactggcttcagcagagcgcagataccaaatactgttcttctagtgtagccgtagttaggccaccacttcaagaactctgtagcaccgcctacatacctcgctctgctaatcctgttaccagtggctgctgccagtggcgataagtcgtgtcttaccgggttggactcaagacgatagttaccggataaggcgcagcggtcgggctgaacggggggttcgtgcacacagcccagcttggagcgaacgacctacaccgaactgagatacctacagcgtgagctatgagaaagcgccacgcttcccgaagggagaaaggcggacaggtatccggtaagcggcagggtcggaacaggagagcgcacgagggagcttccagggggaaacgcctggtatctttatagtcctgtcgggtttcgccacctctgacttgagcgtcgatttttgtgatgctcgtcaggggggcggagcctatggaaaaacgccagcaacgcggcctttttacggttcctggccttttgctggccttttgctcacatgttctttcctgcgttatcccctgattctgtggataaccgtattaccgcctttgagtgagctgataccgctcgccgcagccgaacgaccgagcgcagcgagtcagtgagcgaggaagcggaagagcgcccaatacgcaaaccgcctctccccgcgcgttggccgattcattaatgcagctggcacgacaggtttcccgactggaaagcgggcagtgagcgcaacgcaattaatgtgagttagctcactcattaggcaccccaggctttacactttatgcttccggctcgtatgttgtgtggaattgtgagcggataacaatttcacacaggaaacagctatgaccatgattacgccagatttaattaaggc

SEQ ID NO: 2143 - protein, 737 aa, Artificial Sequence
  Description of Artificial Sequence: Synthetic polypeptide
  misc_feature (264)..(264): Xaa can be any naturally occurring amino acid
  misc_feature (266)..(266): Xaa can be any naturally occurring amino acid
  misc_feature (268)..(268): Xaa can be any naturally occurring amino acid
  misc_feature (448)..(448): Xaa can be any naturally occurring amino acid
  misc_feature (459)..(460): Xaa can be any naturally occurring amino acid
  misc_feature (467)..(467): Xaa can be any naturally occurring amino acid
  misc_feature (470)..(471): Xaa can be any naturally occurring amino acid
  misc_feature (474)..(474): Xaa can be any naturally occurring amino acid
  misc_feature (495)..(495): Xaa can be any naturally occurring amino acid
  misc_feature (516)..(516): Xaa can be any naturally occurring amino acid
  misc_feature (533)..(533): Xaa can be any naturally occurring amino acid
  misc_feature (547)..(547): Xaa can be any naturally occurring amino acid
  misc_feature (551)..(551): Xaa can be any naturally occurring amino acid
  misc_feature (555)..(555): Xaa can be any naturally occurring amino acid
  misc_feature (557)..(557): Xaa can be any naturally occurring amino acid
  misc_feature (561)..(561): Xaa can be any naturally occurring amino acid
  misc_feature (563)..(563): Xaa can be any naturally occurring amino acid
  misc_feature (577)..(577): Xaa can be any naturally occurring amino acid
  misc_feature (583)..(583): Xaa can be any naturally occurring amino acid
  misc_feature (593)..(593): Xaa can be any naturally occurring amino acid
  misc_feature (596)..(596): Xaa can be any naturally occurring amino acid
  misc_feature (661)..(662): Xaa can be any naturally occurring amino acid
  misc_feature (664)..(665): Xaa can be any naturally occurring amino acid
  misc_feature (710)..(710): Xaa can be any naturally occurring amino acid
  misc_feature (717)..(719): Xaa can be any naturally occurring amino acid
  misc_feature (723)..(723): Xaa can be any naturally occurring amino acid
MAADGYLPDWLEDNLSEGIREWWDLKPGAPKPKANQQKQDDGRGLVLPGYKYLGPFNGLDKGEPVNAADAAALEHDKAYDQQLKAGDNPYLRYNHADAEFQERLQEDTSFGGNLGRAVFQAKKRVLEPLGLVEEGAKTAPGKKRPVEPSPQRSPDSSTGIGKKGQQPAKKRLNFGQTGDSESVPDPQPLGEPPAGPSGLGSGTMAAGGGAPMADNNEGADGVGNASGNWHCDSTWLGDRVITTSTRTWALPTYNNHLYKQISSXSXGXTNDNHYFGYSTPWGYFDFNRFHCHFSPRDWQRLINNNWGFRPKRLNFKLFNIQVKEVTTNDGVTTIANNLTSTVQVFSDSEYQLPYVLGSAHQGCLPPFPADVFMIPQYGYLTLNNGSQAVGRSSFYCLEYFPSQMLRTGNNFTFSYTFEDVPFHSSYAHSQSLDRLMNPLIDQYLYYLXRTQSTGGTAGXXELLFSQXGPXXMSXQAKNWLPGPCYRQQRVSKTLXQNNNSNFAWTGATKYHLNGRXSLVNPGVAMATHKDDEXRFFPSSGVLIFGKXGAGXNNTXLXNVMXTXEEEIKTTNPVATEXYGVVAXNLQSSNTAPXTGXVNSQGALPGMVWQNRDVYLQGPIWAKIPHTDGNFHPSPLMGGFGLKHPPPQILIKNTPVPANPPXXFXXAKFASFITQYSTGQVSVEIEWELQKENSKRWNPEIQYTSNYAKSXNVDFAVXXXGVYXEPRPIGTRYLTRNL

SEQ ID NO: 2144 - protein, 737 aa, Artificial Sequence
  Description of Artificial Sequence: Synthetic polypeptide
MAADGYLPDWLEDNLSEGIREWWDLKPGAPKPKANQQKQDDGRGLVLPGYKYLGPFNGLDKGEPVNAADAAALEHDKAYDQQLKAGDNPYLRYNHADAEFQERLQEDTSFGGNLGRAVFQAKKRVLEPLGLVEEGAKTAPGKKRPVEPSPQRSPDSSTGIGKKGQQPAKKRLNFGQTGDSESVPDPQPLGEPPAGPSGLGSGTMAAGGGAPMADNNEGADGVGNASGNWHCDSTWLGDRVITTSTRTWALPTYNNHLYKQISSASSGSTNDNHYFGYSTPWGYFDFNRFHCHFSPRDWQRLINNNWGFRPKRLNFKLFNIQVKEVTTNDGVTTIANNLTSTVQVFSDSEYQLPYVLGSAHQGCLPPFPADVFMIPQYGYLTLNNGSQAVGRSSFYCLEYFPSQMLRTGNNFTFSYTFEDVPFHSSYAHSQSLDRLMNPLIDQYLYYLARTQSTGGTAGNRELLFSQGGPSNMSAQAKNWLPGPCYRQQRVSKTLAQNNNSNFAWTGATKYHLNGRDSLVNPGVAMATHKDDEDRFFPSSGVLIFGKEGAGANNTALENVMLTNEEEIKTTNPVATEQYGVVASNLQSSNTAPATGAVNSQGALPGMVWQNRDVYLQGPIWAKIPHTDGNFHPSPLMGGFGLKHPPPQILIKNTPVPANPPATFTPAKFASFITQYSTGQVSVEIEWELQKENSKRWNPEIQYTSNYAKSTNVDFAVNNEGVYSEPRPIGTRYLTRNL

SEQ ID NO: 2145 - protein, 737 aa, Artificial Sequence
  Description of Artificial Sequence: Synthetic polypeptide
MAADGYLPDWLEDNLSEGIREWWDLKPGAPKPKANQQKQDDGRGLVLPGYKYLGPFNGLDKGEPVNAADAAALEHDKAYDQQLKAGDNPYLRYNHADAEFQERLQEDTSFGGNLGRAVFQAKKRVLEPLGLVEEGAKTAPGKKRPVEPSPQRSPDSSTGIGKKGQQPAKKRLNFGQTGDSESVPDPQPLGEPPAGPSGLGSGTMAAGGGAPMADNNEGADGVGNASGNWHCDSTWLGDRVITTSTRTWALPTYNNHLYKQISSQSSGSTNDNHYFGYSTPWGYFDFNRFHCHFSPRDWQRLINNNWGFRPKRLNFKLFNIQVKEVTTNDGVTTIANNLTSTVQVFSDSEYQLPYVLGSAHQGCLPPFPADVFMIPQYGYLTLNNGSQAVGRSSFYCLEYFPSQMLRTGNNFTFSYTFEDVPFHSSYAHSQSLDRLMNPLIDQYLYYLSRTQSTGGTAGNRELLFSQGGPANMSAQAKNWLPGPCYRQQRVSKTLSQNNNSNFAWTGATKYHLNGRDSLVNPGVAMATHKDDEERFFPSSGVLIFGKQGAGANNTTLDNVMMTSEEEIKTTNPVATEQYGVVASNLQSSNTAPQTGTVNSQGALPGMVWQNRDVYLQGPIWAKIPHTDGNFHPSPLMGGFGLKHPPPQILIKNTPVPANPPAVFSPAKFASFITQYSTGQVSVEIEWELQKENSKRWNPEIQYTSNYAKSTNVDFAVNSEGVYSEPRPIGTRYLTRNL

SEQ ID NO: 2146 - protein, 737 aa, Artificial Sequence
  Description of Artificial Sequence: Synthetic polypeptide
MAADGYLPDWLEDNLSEGIREWWDLKPGAPKPKANQQKQDDGRGLVLPGYKYLGPFNGLDKGEPVNAADAAALEHDKAYDQQLKAGDNPYLRYNHADAEFQERLQEDTSFGGNLGRAVFQAKKRVLEPLGLVEEGAKTAPGKKRPVEPSPQRSPDSSTGIGKKGQQPAKKRLNFGQTGDSESVPDPQPLGEPPAGPSGLGSGTMAAGGGAPMADNNEGADGVGNASGNWHCDSTWLGDRVITTSTRTWALPTYNNHLYKQISSASSGSTNDNHYFGYSTPWGYFDFNRFHCHFSPRDWQRLINNNWGFRPKRLNFKLFNIQVKEVTTNDGVTTIANNLTSTVQVFSDSEYQLPYVLGSAHQGCLPPFPADVFMIPQYGYLTLNNGSQAVGRSSFYCLEYFPSQMLRTGNNFTFSYTFEDVPFHSSYAHSQSLDRLMNPLIDQYLYYLARTQSTGGTAGTRELLFSQGGPSNMSAQAKNWLPGPCYRQQRVSKTLTQNNNSNFAWTGATKYHLNGRDSLVNPGVAMATHKDDEDRFFPSSGVLIFGKQGAGANNTALDNVMITNEEEIKTTNPVATEQYGVVASNLQSSNTAPATGTVNSQGALPGMVWQNRDVYLQGPIWAKIPHTDGNFHPSPLMGGFGLKHPPPQILIKNTPVPANPPTVFSPAKFASFITQYSTGQVSVEIEWELQKENSKRWNPEIQYTSNYAKSTNVDFAVNSEGVYTEPRPIGTRYLTRNL

SEQ ID NO: 2147 - protein, 737 aa, Artificial Sequence
  Description of Artificial Sequence: Synthetic polypeptide
  misc_feature (264)..(264): Xaa can be any naturally occurring amino acid
  misc_feature (448)..(448): Xaa can be any naturally occurring amino acid
  misc_feature (459)..(459): Xaa can be any naturally occurring amino acid
  misc_feature (470)..(470): Xaa can be any naturally occurring amino acid
  misc_feature (495)..(495): Xaa can be any naturally occurring amino acid
  misc_feature (533)..(533): Xaa can be any naturally occurring amino acid
  misc_feature (547)..(547): Xaa can be any naturally occurring amino acid
  misc_feature (555)..(555): Xaa can be any naturally occurring amino acid
  misc_feature (557)..(557): Xaa can be any naturally occurring amino acid
  misc_feature (561)..(561): Xaa can be any naturally occurring amino acid
  misc_feature (563)..(563): Xaa can be any naturally occurring amino acid
  misc_feature (593)..(593): Xaa can be any naturally occurring amino acid
  misc_feature (596)..(596): Xaa can be any naturally occurring amino acid
  misc_feature (661)..(662): Xaa can be any naturally occurring amino acid
  misc_feature (664)..(664): Xaa can be any naturally occurring amino acid
  misc_feature (718)..(718): Xaa can be any naturally occurring amino acid
  misc_feature (723)..(723): Xaa can be any naturally occurring amino acid
MAADGYLPDWLEDNLSEGIREWWDLKPGAPKPKANQQKQDDGRGLVLPGYKYLGPFNGLDKGEPVNAADAAALEHDKAYDQQLKAGDNPYLRYNHADAEFQERLQEDTSFGGNLGRAVFQAKKRVLEPLGLVEEGAKTAPGKKRPVEPSPQRSPDSSTGIGKKGQQPAKKRLNFGQTGDSESVPDPQPLGEPPAGPSGLGSGTMAAGGGAPMADNNEGADGVGNASGNWHCDSTWLGDRVITTSTRTWALPTYNNHLYKQISSXSSGSTNDNHYFGYSTPWGYFDFNRFHCHFSPRDWQRLINNNWGFRPKRLNFKLFNIQVKEVTTNDGVTTIANNLTSTVQVFSDSEYQLPYVLGSAHQGCLPPFPADVFMIPQYGYLTLNNGSQAVGRSSFYCLEYFPSQMLRTGNNFTFSYTFEDVPFHSSYAHSQSLDRLMNPLIDQYLYYLXRTQSTGGTAGXRELLFSQGGPXNMSAQAKNWLPGPCYRQQRVSKTLXQNNNSNFAWTGATKYHLNGRDSLVNPGVAMATHKDDEXRFFPSSGVLIFGKXGAGANNTXLXNVMXTXEEEIKTTNPVATEQYGVVASNLQSSNTAPXTGXVNSQGALPGMVWQNRDVYLQGPIWAKIPHTDGNFHPSPLMGGFGLKHPPPQILIKNTPVPANPPXXFXPAKFASFITQYSTGQVSVEIEWELQKENSKRWNPEIQYTSNYAKSTNVDFAVNXEGVYXEPRPIGTRYLTRNL

SEQ ID NO: 2148 - protein, 737 aa, Artificial Sequence
  Description of Artificial Sequence: Synthetic polypeptide
  misc_feature (264)..(264): Xaa can be any naturally occurring amino acid
  misc_feature (448)..(448): Xaa can be any naturally occurring amino acid
  misc_feature (470)..(470): Xaa can be any naturally occurring amino acid
  misc_feature (533)..(533): Xaa can be any naturally occurring amino acid
  misc_feature (547)..(547): Xaa can be any naturally occurring amino acid
  misc_feature (555)..(555): Xaa can be any naturally occurring amino acid
  misc_feature (557)..(557): Xaa can be any naturally occurring amino acid
  misc_feature (561)..(561): Xaa can be any naturally occurring amino acid
  misc_feature (563)..(563): Xaa can be any naturally occurring amino acid
  misc_feature (593)..(593): Xaa can be any naturally occurring amino acid
  misc_feature (596)..(596): Xaa can be any naturally occurring amino acid
  misc_feature (662)..(662): Xaa can be any naturally occurring amino acid
  misc_feature (664)..(664): Xaa can be any naturally occurring amino acid
  misc_feature (718)..(718): Xaa can be any naturally occurring amino acid
MAADGYLPDWLEDNLSEGIREWWDLKPGAPKPKANQQKQDDGRGLVLPGYKYLGPFNGLDKGEPVNAADAAALEHDKAYDQQLKAGDNPYLRYNHADAEFQERLQEDTSFGGNLGRAVFQAKKRVLEPLGLVEEGAKTAPGKKRPVEPSPQRSPDSSTGIGKKGQQPAKKRLNFGQTGDSESVPDPQPLGEPPAGPSGLGSGTMAAGGGAPMADNNEGADGVGNASGNWHCDSTWLGDRVITTSTRTWALPTYNNHLYKQISSXSSGSTNDNHYFGYSTPWGYFDFNRFHCHFSPRDWQRLINNNWGFRPKRLNFKLFNIQVKEVTTNDGVTTIANNLTSTVQVFSDSEYQLPYVLGSAHQGCLPPFPADVFMIPQYGYLTLNNGSQAVGRSSFYCLEYFPSQMLRTGNNFTFSYTFEDVPFHSSYAHSQSLDRLMNPLIDQYLYYLXRTQSTGGTAGNRELLFSQGGPXNMSAQAKNWLPGPCYRQQRVSKTLSQNNNSNFAWTGATKYHLNGRDSLVNPGVAMATHKDDEXRFFPSSGVLIFGKXGAGANNTXLXNVMXTXEEEIKTTNPVATEQYGVVASNLQSSNTAPXTGXVNSQGALPGMVWQNRDVYLQGPIWAKIPHTDGNFHPSPLMGGFGLKHPPPQILIKNTPVPANPPAXFXPAKFASFITQYSTGQVSVEIEWELQKENSKRWNPEIQYTSNYAKSTNVDFAVNXEGVYSEPRPIGTRYLTRNL

SEQ ID NO: 2149 - DNA, 2217 bp, Artificial Sequence
  Description of Artificial Sequence: Synthetic polynucleotide
atggctgccgatggttatcttccagattggctcgaggacactctctctgaaggaataagacagtggtggaagctcaaacctggcccaccaccaccaaagcccgcagagcggcataaggacgacagcaggggtcttgtgcttcctgggtacaagtacctcggacccttcaacggactcgacaagggagagccggtcaacgaggcagacgccgcggccctcgagcacgacaaagcctacgaccggcagctcgacagcggagacaacccgtacctcaagtacaaccacgccgacgcggagtttcaggagcgccttaaagaagatacgtcttttgggggcaacctcggacgagcagtcttccaggcgaaaaagagggttcttgaacctctgggcctggttgaggaacctgttaagacggctccgggaaagaagagaccggtagagccatcaccccagcgttctccagactcctctacgggcatcggcaagaaaggccaacagcccgccagaaaaagactcaattttggtcagactggcgactcagagtcagttccagaccctcaacctctcggagaacctccagcagcgccctctggtgtgggacctaatacaatggctgcaggcggtggcgcaccaatggcagacaataacgaaggcgccgacggagtgggtagttcctcgggaaattggcattgcgattccacatggctgggcgacagagtcatcaccaccagcacccgaacctgggccctgcccacctacaacaaccacctctacaagcaaatctccaacgggacatcgggaggagccaccaacgacaacacctacttcggctacagcaccccctgggggtattttgactttaacagattccactgccacttttcaccacgtgactggcagcgactcatcaacaacaactggggattccggcccaagagactcagcttcaagctcttcaacatccaggtcaaggaggtcacgcagaatgaaggcaccaagaccatcgccaataacctcaccagcaccatccaggtgtttacggactcggagtaccagctgccgtacgttctcggctctgcccaccagggctgcctgcctccgttcccggcggacgtgttcatgattccccagtacggctacctaacactcaacaacggtagtcaggccgtgggacgctcctccttctactgcctggaatactttccttcgcagatgctgagaaccggcaacaacttccagtttacttacaccttcgaggacgtgcctttccacagcagctacgcccacagccagagcttggaccggctgatgaatcctctgattgaccagtacctgtactacttgtctcggactcaaacaacaggaggcacggcaaatacgcagactctgggcttcagccaaggtgggcctaatacaatggccaatcaggcaaagaactggctgccaggaccctgttaccgccaacaacgcgtctcaacgacaaccgggcaaaacaacaatagcaactttgcctggactgctgggaccaaataccatctgaatggaagaaattcattggctaatcctggcatcgctatggcaacacacaaagacgacgaggagcgtttttttcccagtaacgggatcctgatttttggcaaacaaaatgctgccagagacaatgcggattacagcgatgtcatgctcaccagcgaggaagaaatcaaaaccactaaccctgtggctacagaggaatacggtatcgtggcagataacttgcagcagcaaaacacggctcctcaaattggaactgtcaacagccagggggccttacccggtatggtctggcagaaccgggacgtgtacctgcagggtcccatctgggccaagattcctcacacggacggcaacttccacccgtctccgctgatgggcggctttggcctgaaacatcctccgcctcagatcctgatcaagaacacgcctgtacctgcggatcctccgaccaccttcaaccagtcaaagctgaactctttcatcacgcaatacagcaccggacaggtcagcgtggaaattgaatgggagctgcagaaggaaaacagcaagcgctggaaccccgagatccagtacacctccaactactacaaatctacaagtgtggactttgctgttaatacagaaggcgtgtactctgaaccccgccccattggcacccgttacctcacccgtaatctgtaa

SEQ ID NO: 2150 - protein, 733 aa, Artificial Sequence; identical to SEQ ID NO: 1935
  Description of Artificial Sequence: Synthetic polypeptide

(The sequence listing continues in the following parts.)
